United States Patent Application Publication US 2019/0348154 A1 - sequence listing, part 92

SEQ ID NO: 344889 - DNA, 1350 bp, Pseudomonas aeruginosa
atgaccacctttgatcaaatcctgcccatctcgatcgagatcctggctgcccaccgcgacaagattgcgcaactggaatggctggttatcaaccgtgatctcaacggtcgggtgcgttttatcgcgccggaacaatccagagacaacgaggtgcagcgagcagagcttgacgtcatatatcaggcgctgtccgaacgccttgcatctcatgcttattccactggttcgggcattctgtacgaggcgagccgggagctgacgtgccaaggcgcatccctatttgccctgagcgaatttagcaacgtgtgggtggtggatcggctggtaaccgaagccaattgggcacacatcgcgccggaaacggagagcgttccgcgcatcgtctttttctctatcaaaggtggcgttggtcgctccaccgcattggcagcgaccgcatggagcctcgctcaagcgggcaaacgggtgctggtgctcgaccttgatctggagtctccaggcttgtcttccgcgctattaccttcggaacgccaacccatgtacggcatcaccgattggttggttgaggatctggtggacaacggcaatgccgtttttgacagcatggtggccaccagcaatctttcccatgacggtgaaattcacgttgtgcctgcgcatggcgctgaccacggtgagtacattgccaagatgggccgcgtgtggatgccaaagttgcatgcagatggaacgcgcgaaatgtggtcagcccgacttgggcgcttgctgcaagccctggaggcgcgtgtccaacccgatgtggtcctcatcgactcgcgttctggaattgatgaaattgcgtcggcttgcattactgagctaggtgccaacctgattctgctgtttgcgctggaaggtgagcagacctggaatggctatcgaatgctgttcgagcaatggcaacgagctcatgttgcagagacaatccgtgaacgtctgaaggttgttggtgccattgtgcccgagctggatcgcgtgacctatcttgagggcttgcgtgagagcgcttatgggatctttgtagatacgctctatgacgagattgcaccagcgaggccggaagctatcgggccaatttctaacggcgacgggaagtggcgggtcgatgactttgttgaaggatggaattttgatgaggctgatgaaggtgctccccattacccatgggcagtgaactggcaccgcagttttgccggcctgcgatccttgcagggacggcttgctgccatcgacgcccaggaggtgcagtctgtcttcgggccgctgatcggtggagtcagtgatgccgtcgattcgaggagaccgtcatga

SEQ ID NO: 344890 - DNA, 2928 bp, Pseudomonas aeruginosa
atgcaaaaaacgacaacgctcacgccgctcgccctgaaagatgtgcccgctctgatcgagacggtttttccggcgcagaaagtgtcgttcgaagcgcagaaggaacgcaaggcaaatcttggccagaccctgaccgggcttggttcctactggaagggccgaaagccgctgattctggtgcgtgctgtcgtgctgggcagcctactgccgcccaccgacgatgctgaggccgatctcgctctctttgaaaagctcatggccttcgacgatgaaggtttggcacgtcgcgcgctggcggccaatgcgttctcggctaccaagctgcaggagatgatcctaatctccgacccagagcgttactttggcgggcgcggctggcgacgcgacatcaccgctgacgacaaactggtgctgtaccgacaggcactggccgcaatgtctggttacgaggaaaaagctggcatcagcaaacgtccggaagagctcgatcaggagtggctatacgctccggtgtgggccgaggttaaccgccactatgctcatctgggtgtgagcgttcagtccttttctgagctggtagaacaattgggtatcctgcgttatgggcaccgtgtgcgtgtgggggatacctttagcggtggcggttccatcccttttgaggctgcacgaattggctgcgatgtgtatgcctcagacctcaaccccatcgcctgcatgctgacctggggcgcattgaatattatcggcgcaagcccggaacgacgctcagaaatcgagaattcgcaggagcgcgttgccaaagtcgtagatgcggagattatcgagcttggaatcgagcatgacaggcaaggcaatcgtgccaaatcgtacctgtattgcttggaggcccgctgcccggaaacgggctggatgattccgctgtcaccgtcatgggtgatctccaagggccggaacatcatcgcccgcttgaagccggatcaccataacaaacgtttcgacatcgaaatcgtcaccggtgtttcggacaaggaggcagccgccgctgacaagggcaccgtgcaagaaggcgatatggtctatgcgctggatggcagaacctatcgcacgcccatcaagacgctgcgtggcgactacagaaacgccgacggcagcactggcaatcgcctgcgtcgttgggaaaaatccgatttcaagccgcagcctgacgacatctttcaggagcggctctacgccattcactggatcaccaaagaatcgcttgcaaaaacgcggcaggaatcatggtttgcagccccgaccgatgccgattgggaacgcgagcgtcgcgtagatgcgctcgttgccgagaacctggggagctggcaggacgaaggcttggtgccggatatggccattgagcatggtgacgaaacaacccgtctattccgggagcgaggctggactcactggcatcatttgttcaatgcgcggcagttgcttttgatctcgcgttatttccagcaccgcacaccggaagactacgttttcaacgccaagtcactggactggaactcccggatcgccaactggatgaaccattgggagaagaccaacaacgtcttctacaaccaagcattgaacactttttacaactacggcatccgttgctttttcagtcatgaagcaggccggtcgttcggctttgccaacagcccgcttccggatactagccggtcgatcaagtgccttgatgcgaccaagcttgaagacgacgcagatatctggatcaccgatccaccctatgccgatgcggtgaactaccacgagatcaccgagttctttatcgcttggctccgcaagaacccacctaagcctttcgatgactgggtgtgggattcgcgtcgcgcgttggcaatcaagggttccgacgacgagtttcggcgcggcatggccgctgcctacaaggccatggctgatcacatgcctgacaacggtatgcagtgcgtgatgttcacgcaccaggacaccggtgtttggggcgacctgattggcatcttctgggcggcgggcctgcaagttgtggcagcgtggtacatcgcaacggaaaccaatgcagcaatcaagaagggaagctttgtccagggcaccgtcatcctgatgctcaagaagcgtgctgcgggcgagcgcactggcttcaagcagcgcttgttgcccgctgtacggcaggaagtcgcgcgccaaatcgaaaccatgatgcatctgaacgacacagtggccgcccaccacggcgagccggtgtggggcgactccgacctacaaatggctggttatgcggcagcgctcaaagtgctgacagcctatacccggatcggcgatgaggatgccaccaccttcgcccttcgtccgcgcgcacgcggtgaagtgaccgttgtggacgaaatcgtccagcaggcatcggaaaccgcatccagcctgctggttcccgagggtcttagcgccgacgcttggggacgcctcaccggcatcgaacgctttgtgctgcggatgatggacatggaaaccgcaggtgcggccaagctggacaactaccagaacttcgcgaaggccttccgcgttacggattacacccgtgtgatgggcgacatgcgacccaataacgcacgtctcaaacgcgtcagcgaatacgcttcgcgcgaccttacagattccaccgagatcggcgtgacacggctgggacagctcatcattgccttgcagcaactgctcaaggataccgaagcgcaagtcatcgtcgaacaactgcgagccgaaatggcggacttcttggaagtccgttccctgctggtggacatgctggccttcatcgagcgtaaagcgcccgaatctgaggtgcgctctgccgccgaggtactgggcgcgcgtctcaagaatctgcgcttcggcgaataa

SEQ ID NO: 344891 - DNA, 1059 bp, Pseudomonas aeruginosa
atgatcgagtacacctcgggcgacatcctccaatgtgaggccgacgccctggtcaacaccgtcaactgcgttggcgtaatggggcgtggcatcgccttacagttcaagaacgtataccccgaaaacttcagggcttacgagtctgcctgcaagcgcgaagccgtgcagccgggccgcatgtttgtttttgaaacgggacagctcacgctgccgcgcttcgtcgtcaacttcccgaccaagcgccactggcgcggtaagagccgcattgaggacatcgaggctggacttatcgatctggtcaaggtcatccgcgacaagggcatacgctccattgccattccaccactgggggcaggcttgggcgggctggactggagtgaggtgcgcccgcgcatcgagcgtgcattggccgggcttgccgacgtgcgggtgctggtgtttgagcccaagggcgcaccggcccacgacaagatggcgcatgtgcgcgaggtccccaaaatgaccgcgggccgcgccgccctggtggagttgatgcagcgctatctcggcggcctgcttgacccctttgtcaccctgctggaagtccacaagctgatgtacttcatgcaggaggctggtgagccgttgcgacttcagtacgtcaagcatcactacggcccttacgccgagaaccttcggcatgtgctgaaggccgtggaaggccatttgatcgcgggttatgccgatggcggcgatgcgccggacaagccactcacgctggtgcccggcgcagtggaagacgccaagggctacctggatcggcacgacatcagtcgcgcccgctttgagcgtgtgaccaagctggtggagggcttcgaatcgccttacgggctggagcttttggccactgtacattgggtgatgagccgcgagggtgccacccaacatgacagcgtggagcgccaagtttatgactggagctcccgcaagcggcagttcacgccgcgccaacttgccattgctgaggagcggctgcgctcgcagggctggctgttgctcgaagaggcggcagtacattga

SEQ ID NO: 344892 - DNA, 651 bp, Pseudomonas aeruginosa
atgagcgccgtgctggtgccgccacatcccaagatctaccacatcgcccatgtggatcgtctgccctccatcgtggcggacggctttctgtggtgcgatgcggagatcgtgcgacgcgcaccgccgggtaccaccatcggcatgaacggcatcaagcaacgacgtttgaaggaactgtacctcggcagctaccccgaccttcacgttggtgactgcgtgccgttctacttctgcccgcgctcagtgatgctgtacctgatctatcagggcaatcatccggaaatggactatcgcggcgggcaagggccgatcatgcatttcgaggctgacctgaacgcagttgttgcgtgggcgaacgcgcagcctgcacgctgggccttcaccaactcgaatgctgggtcacgctacttcgaggactacaacgatctcgcccagctaggcaagatcgactggaatgcagtacaggcgctcaggtgggtgcagtgcaaggaaggcaaacaagccgaattcctgctggagcagcgctttccctggcatttgatcgagcgtatcggcgtcaggtctgcggccgtttacggccaagttgttaacgcccttccggcgcacggacaccgtcccacggtggaagtgctttcggactggtattactga

SEQ ID NO: 344893 - DNA, 627 bp, Pseudomonas aeruginosa
atggccaaagccgcagtcagcaccccattgtcaaaagcgcgtgcgcaagtgccgcatacgctgggctttggcgtgcctgcgacttccgatccgcatcacttcaaggtcatcatcccgaagtccagttcgggcaaggtgcagattagcgagcagcttggcctgcaggcagcgagcagcgatagtgctgtgattgatcgcatcttgcttgatcgcccgcgctgggcggctatccgcgccgaagtgcaacgtgccttcaatgctcgcctggccgtgcacggcatcaagtcaggcgcatggaaggtgggtgaaaaccctgtggaccgtctgctcggcaaggagctgtgcgtgctggcttgggccgtcgagcaaatggagattgagaagattccggtagctgtgcgcaactggctggcgctgcgcccggaggagcgctggtggctgtttggcatgaccgccatgagcaccggcggagtgatggatgcgggcaagggctggcgcgcggcgctcaagcacgccttgggcgatgtggcccagagcgaactgcttgctccacgcgcacgacgtggcaaacctgagcaggaaaccgcccaggcctcgttggggctgttcggagacgaagggccatga

SEQ ID NO: 344894 - DNA, 3126 bp, Pseudomonas aeruginosa
atgattaaaacggtcaagcaagcctgccgattcaatcccattatccgtgattatcggatgagtcagggcattgagaatctctctgacctcatcaatgatgaaggtgacggacgcgagttcttctcgcgcaacttcgttacccatggcatggaccagcttttccgtgaggggctgctgcgtctttccggaaagtccgatcaggctgtattcgagctgacccaggcgatgggcggtggtaaaacacacatgatgatcgcgctgggtttgctcgcccgacatccgcatctgcgccaggaagttttgcctaccgacctcgcttcgcgcattgaatttggccatgcgcgcatcgccgcgttcaacggccgcaacaaccccgacaactacatctggggtgaaattgccacccagctcggagctgctgaagccatcaagccgttttgggtgaacgggccgaaggccgtcgatcagcgccagtggaaggaaatcattggcgaccagccgaccctgatcctcctggacgagttgcctccctacctcgacaacgccagcacccaggtattcggccaaggcacgctggccaatatggcggtctacagtctctccagtttgatgagtgccgcgctggaattgcctaattgcgccatcgtggtcgcgaacctatcgggcagctacaaggcccagactaaggccctggccgatgccatctccaacctgcagcaagaaacccgccgtcaggcaatgaccatcacaccggtgcaattggcgggcaacgaaatctatgaaatccttaagaaacgcctaattgacgagttgccggacgaacgtgtcgtttctgacattgccgaggaatacgctcagcagatcaagaaggccgaggacggcggctacattgtcgccagcagcatcgagcagatcgccgagcaggtgcgggaaacctatcctttccatccttccttcaagcatctcgtcgcgctgttcaaggaaaacgaaggcttccgccagacccggggcctgatgcagttcactgcgcgtctgctcaagagtgtggacgagcgtaataccgatgacgtcttcctagtcgggacacagcacctaaacctgaacgacgagcaggtcaaggacgagatcgaacgcatcgctcctaagttgatgccggcggtgacccgcgacatcgccgatgcgggtaatgcgatctccgagcatatcgacgacgaactggctggtgatgcagcgcagcagcttatgaccttactgctgtcgtccagcctgtcgcgcgctgtcggtggacgtatcggcctgaccgagagtgaattaatcgagtttctggccgcgccgcaacgtaagcctgacgagttcctgcaggccttgcagcgcttgcgcgaatcggcgtggtacctgcatcgcgaagaacaacgcttcttcatcaaggaaaccgagaacctctcgcgccagatcgagcgcaatgccaaggacgttccgcagccgaaggtcgatcaagcgctcatcaaccgcctctccggcatccttgcaccggtcagcaagatcgcctatcaggacgtgcaggtgctgccaaagttggaccagctcaagctcggcgggccgcgcacgctgatcgtcattaagcctgatggcaaggtgccgcccaatgagctgcagaatttcttcgactatcagcaggagaagaacaacctactggtactgagtggccaggacagcctgctggccgaagcggtggaagagcggctgcgcgaactgtatgccattgagcaaatccacaagcgcctcaagtcaggcgacaccttgttcgaggaagctcgcgaccgctttgaagaatctgaggatcgcttcggcaaggcgctgtcggccgcttacaactgcctctacattcccgtgaacgatgcggtggatggaatcaacaagctgggcaaggtcagcatcgatcaaggcctcaagctcggccagggcgatcaatccgccgaatcgcagatcgaaaaactgctggccagcccgcgcgccgactacaagctcgtggccgaattgggtaaggataacttcgacgaatgcttcgcgcaggccgaagaatacttgtggccgtccggcaaggagaaccgccgcacgccctggaaggatgtcgtcactcgcgccaagtgctcacccatctggccgtggatgccgggtgccagcggcatggatgcgctcaaggctgaagcgctgaagcaaggccgctggcgcttgggtgaggacggttacatcgagaaagggccgtttcccaaggacaaggccaccgtcaacgtctccgtcatcaacgtcaaaccggacatcggtgaaacggtgctaagcctcgcgccgcgccatgcgggtgacagccccatcgtctactggtcgaacaaacccgacgtgtccgacaaggacaacaaggtagaggacctggataacttcgccaccggcgagggcacggtctacttcatggtgaaggaacccaccgggcgttatgagagcggcccggccacccgctggctcgccgatctcaagattcgccatcaggtcgaacccgccgccgacaagcgccgtgtcaccttggccgccaccccgcgcgcagacattttctacacccttgacggctccaaccccaaggatggcactcgctacgacgcccccttcgagattggttccgcaagctgccgcctactggtgtttgcccgcgctggcgaggccaacaagacggcggacttccagattcccgccagcggcgacaagacggtgcagatcgtcgacagcaaacccgctcgcttgcaaagcaaacgcgtcgccctcgacaccacagaccgcgtattcagcgtcatcaaccgtttccgcgatcagccgggcacgcgcttcaagggggtgcgtgtcgagatcggtgagggcgaaaacacggttaccgtgcgcttccaggagcgggaggtcaccgccgccattatcgagggtgtggtcaacagtctgcgtgaggtgctcgaggagcccgacgcgccactcaacattgccattgctgacggcattgcctttgataccggttttgcgctcaaagagttcgccaacctcgccgggattgagctaaagcccggtgacgtgaatcaggaggaatga

SEQ ID NO: 344895 - DNA, 198 bp, Pseudomonas aeruginosa
atggccaccgtcaagaccgccacgctcacatttcgtatcgagccaggactgaaggaagcgcttcgcactgcggcggatctggagcaccgatccatcgcgaatatggtcgaggtcctcattcgggactactgcgagcgccatggcattgcgattgtgcactctgaggaatccgaagacagcaatggagcgcattcatga

SEQ ID NO: 344896 - DNA, 1086 bp, Pseudomonas aeruginosa
atgcttgccaagtacctgccaatcctctcgctggccctcctgttgtgcgcctgccaggacaacgccgatgacgccgcgaaaagcggtggaagctccgccgcaaccgtcgaacccagttccgaacaggccgcggccacggaagtggaagaagacccgcagctcaagcgcctgatcggccagcccgcaccggccattaccttgcagtctctgacaggaggctcggtggacctggccgacatctatggaaagaaacccgtatacctgaagatgtgggcctcctactgcatcccctgccgagcgcagatgcccaagctcgacaagatctacgaggcgatgggggatcgcatggagatcgtcgccgtgaatgcgggcatcggcgacgacgcgcgcaagatcacgggatttgccgccaggacccatctgcgtacgccgatcgcgatcgacgacggcagcctgagtgcctggctgaaaatgcagggcacgcccgtgcacctggtgatcggacgtgacggtcgggtgattttctccggccagggcgacggagcggaactggactccgcattgcagcaggcactcgacagtccggccgccaacggcccggtacagaccagcccgatgcgacagctggcgccgctgaagccaggagagcagattcccgagatcagcgttacgctgccggacggttcgtcctccaccttgggcgccgacggcaccggcaaaccacacgccatcctgttcaccgccacctggtgcgaggattacctgaaggaaatggagcccgggacctcggccagttgcgcgcgtctgcgccaggacttcgaccggctgtcggcgaacagcgccgttcgctggagcggcgtcgtaacccacctgtggacatccccccaggcattggcggactaccggcagcagacccggcagcagcagcctttcgtcatagacagcgaaggcaaggccttccgcctgttcggcatccatcgcttccccgcggtcgccctggtcgatgcgcagggccgtctgcaacgcgtcgtgggtcccgacgacaacgacctggaacaggcgatcgaggagctttccgctcgatga

SEQ ID NO: 344897 - DNA, 2097 bp, Pseudomonas aeruginosa
atgagacaacatagaaggcttttcctgggcctggccgcgctgctcgctttacttgcccagggcagctcgctggcagcgcagggccgaccggagccgccggtcacacctatcggcgaacggcacatgaaagtcacgctggagctggagaacgctgctccggctccaggcacgcgaacgacgctggcgttgctgatggagcccgagcgaggctggcatggctattggaaaacgccgggcgatgcgggctttcccaacgacgtgcaatggcggctgccgaaagccgccagtatcggcgagttgcagtatcccgttccccggcccctgctgatgcagggcctgatgaaccatgtctacgaaggtccctactccctgctggcgacattgcggataccggccgatgccaggcccggagagcctctgccgatcagcgccaggctgcgctatctggtctgtaccgagcgcagttgcgttccagaaagtgccaacgtcgagaccatcgtcacacccggcgacgccgccacccccgaccctgctcgacaggcccgcttcgatggctggcgtcgagccctgccacggccgctgcgcgcagaggcccggtatgaattcaggaacggccggtttcgcctcggcataccgctgccggcgacagtcgagctcaccagtccccatgtctttccgctatcggacactgccttcggctacgccgcggcacaacgtttctcccgcaacggcgacacgctggtggtcgaaatggccggcaatgacgtgaccgagctgccggccttctccggcgtgctcggcctcggcaatggcgcagggctggcgatacaggcccggccaggtagcgtacccgccgcgggccaggggctggcggtgggcgacagcgctccgcagctgcgcacgacgctcctggccctgctgggagcgatactcggcggcctgctgctcaacgtgatgccttgtgtgttcccgatcctcagcctgaaggtcctcagtctggccaaggccaatccggatgcctacggagcgcgcaacgaagcactggcctacaccgccggagcggtactggtctgcctcgcgctgggcgccgtgctgatggcgctgagagcgctgggaagcgagattggccgggccttccaattgcagaatcctgcggtgatcctgctgctgattctgctgatcagcgccatgggccttaacctggccgggctcttcgaactgggttcgctatccgcgggctccaggctggcgggccaggatggtccggcgggcgcattctggaccggcgggctggccgccttcgtcggcactccctgctccgggccgttcatggccggtgccctgggggccgccctggtccttccgccattggccggcctcctggtattcgccggcctgggattcggcctggcgttaccgtttctgctcctgagcttcgctccggtcctgcaaggctggctacccaggccgggcgcctggatgcaaacgctgcgaagagttctcgcgatcccgctgttcgccagcacggtttggctggtctgggtgctgggacgccagacaggtgtcgatggcgcagtcctgggcatcgccgcggcgctactgctgggcctgggcctgtggttcaccggcctgcgccaacagaccctgctgcgcctgcgctggtggccggctttcctggccatgctgctggccctggggtgtatcggcctgttgccgtccaacatggaaaaaaccgagcgctctgccaaattggccggagagccattcgaccaggcgcgcctggcagccctgcaagccgaaggccgaccggtgttcctctacttcaccgcggactggtgcctgacctgcaaggtcaacgaacgcgtagcgatcgaccgccaggacacccggcaagccttcagcaaagccggggtggtgacgatgatcggcgactggaccgacggcgatccgcagatcagccgtttcatcaccgcccacgggcattccggagttcccttctatctctggcagcatgccgacgggaggaccgagatcctgccgcaactgctcacacccgacagcctgccaaaactggccagggacattccgcaggattga

SEQ ID NO: 344898 - DNA, 1422 bp, Pseudomonas aeruginosa
atggcactgaagcttcacctggaccgctccaatcgaacccctctgagcgaacagattcgcgccggaatcgcagctgccatccgcaacggcgtgctgagccccggcatgcggctaccctcctggatagacctcgccactcagctaggcgtctccaggggaaccgtcaaggccgcctatgaccggctgaccgacgcccaactggtcataccgctgggagccggaggaacccgggtcgcctcgcaaccctgccggcaggccaggaacccgtcgttcgacggcgcaggcaggcattccctgatgtacccggccttcgatgcaagcccctcctgcccgatcgtcttccgcatgggcgtgcccggcatggattgcctgccgaccgcgttgctggctcgcctgcaagccaaggcggccagggccaaggcacgggaaccggcactctatccttccgccctgggagaatccgacctgcgccgcgaaatcgccgttcacctggcgcttgcacgagggatagagtgccttccggagcagatcatcgtcaccacaggcttcagcggggcactaggcctggcgctccagacgcttcggctggagaaacgcgaggcctgggtggaagaccccggctttcctcccagccggaaagcgctgacgctctcgggatccaacctgataccggtccccgtggatgaccacggactggatgtcgagcagggcatccgccaggcgccggacgccaccctcgtgctcaccacccccagccaacaggcccccaccggggcgacgctgtcgctggatcggcgcatgggcttgctggaatgggcagaacaggttggggcctggataatcgaggacgactacctgggagaattgcagctgaaacgccgtgccgctccggccctggcctccctggatcgctcgggacgcgtcatccatatcggctcgttcagcaagaccatcggcccgaccttgcggctgggcttcatcgtcgcccccctcgcgcttctggaacgcttcgccattgccgcgaactgcctggctcccgcccccgacccggtagtgcagatgacgatctcccgtttcatgagcgaggggcattacatgagacacctgcgccgcacgaagcgcctgtatacccagcgggccgacgcgctacgggcagaactgggaaggcttggcctgacgacgaagctggccgggctggccctgctcctgaagctgccgccctcctccagcgaccagaagatcgctcgccaggcgtattcgcaggggctcgccccttcgcccctttccatgtggtactgctccctgaaacaggaggtccggagcggcctgcttctgggcgtttcgaacatagaccgcaacgagctcgaaccgatctgcggaagattgcgccagctcatcgaaaaggacggcgaagcgtcctga

SEQ ID NO: 344899 - DNA, 357 bp, Pseudomonas aeruginosa
atggtgcggattcgcggaagcatcggcgattggccggtggacctgaccctggagctggacgccgaggattggcgccagctggcgcaacacttgcccccgccgccgccgggcgagccgcaggccgcggcggccaggacgccggtggcggaagcgcctcaggatcgcctgtggcaggctgccatcgacctgctgcgcggcagtggacggatcgagggaccgcaactgctcgcggaactgcaggccttcaccggcaacgccggggccgccaagcatctgctggtgcgcctgcggcacaacgcgcgggtcagggtcgaggtggtcgacggtacccaggtattcgtctggcaggaagagtga

SEQ ID NO: 344900 - DNA, 576 bp, Pseudomonas aeruginosa
atgtccgcctgggcgcgctggtatgagcgctactggcgcgagtggttgccctcggcctatcgaccgggcgcgaccctggcgctggtgcgtcgaaacctggcgggtatcgactgcgtgaagcaggatggcaggctgttgctgcgtacgaaggatctgagtatcgaggtccgcgagcgggtccaggcgcacctgctgatgcatatcgtcaccaccgagttccgcctgttcgtcccggctccgggatatccgccggtcagcctggagctgcgccatgacggctggctgcgccgccgcgggatcgtctgcgtggtgcgtcgtggcggtgttcccgggccgttgccggcgatcctggaggaggaccgggccttgcgggagcagctcatgcccctggatttccgcagcctgcgcctgcgccgcgacagcctgggctggaacctgagcctggagcacctgggggcctgcgaagtggtcaaccggatgcccgcctaccgccgctacattcccctggtcggcgagcagcgccaggcgctgctggggaccttcgtgcaattgcagcgcctgctttcttcctcctga

SEQ ID NO: 344901 - DNA, 669 bp, Pseudomonas aeruginosa
atgccttcgaccctctcgcccgacctcggccaacgctgcatgcaggccttcacccaggtggtgccggccagcctgtgcgtgttctaccgcatcgaccgggaataccgcgcgcacgacttccagctgctgcgaatgccggcctccatgcaccgcgactacctgcgccactaccgcgactacgacccgctgctaccgcgccactgtctggccagcgcctcgccggtggtgccgttgcgccagggcatggcccgccaggacgcgcgacacaccgcgctataccagggtttcctgcgccgccacggggtctgcgatgtggtcgaggtgctggcccgcgcgcaggatcgcccggtggccgccctgtcgctgctgcgcggtaccgagctgggcgccttttccggccatgacctgcagcagttgcaggccctgcatggcctgatggaactggccgcgcaggcctgggtggacgaaccggcgcacggcgaccgcctgcacggcctgacgccgcgggaacggcagatcgccctgctgctgcgcgacggaatcagcaacaagtgcctggcccggcaactcggcctcggcctgccgacggtgaagacccacctgctcaatctgttccgcaagaccggagcgcgcaaccgtacggagctggtgcggcagttgttcctctag

SEQ ID NO: 344902 - DNA, 375 bp, Pseudomonas aeruginosa
atgacctgcaagcgctttttcctcgaactgcttctcgcgctggcggcctatgccgccgccgttctcctctccggccggttcctcgccggactggaggcgggcgccggccgcgtgctcctcgccctgctgccggtgccgccgatgatcaccatggccctggtggtgatccgccagttacggcgactcgacgagatgggccggcgtatccacctcgaagcgctcgcgctggccttcgtctgcaccgccctgctcaccttcgcctacggattcctcgaaaccatcggttttccgaagctctcgatgttcttcgtctggcccctgatgggcgcgacctgggctatcggttgcgtcctggcgctgaggcgctacgcatga

SEQ ID NO: 344903 - DNA, 207 bp, Pseudomonas aeruginosa
atgaggaaccgggtccgcgagctgcgcgcggagcatggctggtcgcaggccgacctggcgacgaagctggaggtatcgcggcagacagtgaacgccatcgagaccggccgctacgaccccagcctgccgctggccttcaggttcgcccgggtcttcggactggcgatagaagcgatattcgacgaccgggaacagcaccccgactga

SEQ ID NO: 344904 - DNA, 2979 bp, Pseudomonas aeruginosa
atgtcgaaagattctgttctgggcttgttcagccagcaagcgaagagccatcccgagcgcctggccatcgtcgaccatgcgcgctcgctcacctatcgcgaactggaccggctcagcgaccggcttgccgcccggctcgccgggcgcggcgtcggcaagggcgccctgctgcccctgctggccgaacgttcgcccgagctggtcatcgccatcctcgcggcggccaagtgcgcggcggcctatgtcccggtagaccggcggcagccggacaagcgcaagcaggagatcctccggcaatgccgggcgccgctggtccttgccacccaggccggggagctgccggggcacgccgtcgagaccatcgcggagctcctcgaccaggccacccgggcaagcccggcgggtccggagcctggcggcagcgacgcgctctatgtgatcttcacctcgggcaccaccggcgaacccaagggcgtggtggtcgagagccgctccctggccaacctggtgcgctggcacaaccggcgcttcgaaatgtccgggcagagccgcaccaccctgatggccggcgtcggcttcgacgtatcccagtgggaaatatggtccaccctgtgcgccggcgcctgcctgcacctggtgcccgaggacgtccgccccgatcccgcggcgctgctggcgttcttcgccgaacagcggatcagccacgccttcgcccctaccgtgatggtccccgcgctggtggagcgccccgtcccggcctcgctggcgctgcgctacctgttctgcgccggggaaaagctgccaccggtggccaccggtagcctgccctataccctcgtggattactacggaccgaccgaagccacggtcttcgccacctgccgcgtcgtcgacgccgaggcctgccggcgaccggcgtcgatcggcttgccgatcggcggctgcgaggcattcatcctcgatgccgaggaccgcccatgtcgcggcgacacacccggcgagctcaatctggccgggatctgcctggcgcgcggctacctgaacgacccggtgatgaccgagcgtcgtttccatcacgccccgcacctccgacgtcgcctctaccgcaccggcgaccgcgcccgctggctggccgacggcagcctgcaattcctcggccgcctggacgaccaggtgaagatccgcggcaaccgtgtcgagctcggcgacgtcgaagccgcactgctgcgccagccggcgatccatggcgcggtggtgctggcgcacgccgacgacagctccggcagccagcagttgagcgccttcgtcgtcccccgcgagcgcgccgtcgcccccgcggccctgctcgccgccctgaagtcgggattgcgccaggaattgcccgactacatgctgcccagccgctacctgctgctggagcggctgccgaccacggccaacggcaagaccgatcgccaggccctgcggcggagcctcgcggaacaccggcatgagcggctcgacacccagcgcttcgggacgccggaccaactgcaggcggccctggcctggcaggaagtgctggggcataacgacttcggcctcgacgacagcttcttcgatgtcggcgggcactccctgctggccgcggcgctggtgcgcgagctgagccgacgcttcggcagccgcgcctatatccacgacgtctatcgcacgcccagcgtgcggcagcaggccgccagcctggctcgacgcgccggacaggcgccggcggaactggacagcgagccggcccaggagctgcggcaggacgtgcgcctgccggaaggcctcgacttcggccgctccccacaccccgagcagttgcagacgccacggcacctcctgctgaccggggccaccggcctgatcggcgcgcacctgctcgccgaactgctggccagccgcgatgccgagctgcactgcccggtacgcgcgcagagcgacgcgcacgccctcgagcgcctgcgccaggccacgcgccaataccgcatcgaactcgccgagacggactggcgaagggtcagggcctacgccgccgacctcgccgaaccaggcttcggactaccggcggagacctaccgcgaactggccggcagcgtcgaccaggtattccactccgccagcgcggtgaacttcatccagccgtacagctacatgaagcgcgacaacgtccagggactcgaggaggtcctgcgcttctgcgcctgcggccaggccaagccgctgatgttgctgtcgagcatctcggtgtacagctgggggcacctgcacaccggcaagcgcctgatgcgcgaggacgacgatctcgaccagaacctgccggcggtgctcaccgacatgggctacgtgcgcagcaaatgggtgatggagaagatcgccgacctcgccgccgaacggggcctggcgctgatgaccttccgcctcggctacgccacctgccacagccgcagcggtgcccatgccgactaccagtggtggagccggctggcgcggacctgcctggaataccgggcggtgccgctgttgcgcgaactgcgcgagggcctcaccacggtggactacatggtcggcgcgatcagcgccatcgcccgccagccgacggcgctgggcaagaaattcaacctggtgccgagcatccctcgctgcctgaccctggaggagttcttcgcccgcctcggcgaacgcgccggccagccgctgcgtcctatgcccttccacgactgggtcagcctctgggaggagaatcgcgacgctccgctccatcccctgctgagcatgttccgcgacaacatgtatgccggccgcagcaccgtcgaactgtaccaggacacctacctgtgggactgcgccaacgtcgaggagcatctgcgcggcagcggcatacgcgagccggagttcgacgcccgcctgctcgacctctatctcgccagcctgaccggcgccgccgctacccgctga

SEQ ID NO: 344905 - DNA, 690 bp, Pseudomonas aeruginosa
atgcacaacgtcctgatcgtcggcgcctcgcgcggcattggcctgggtctggtggcacgctacctcgacagcggcgcccgggtctacgccgtggcccgccggccggaagactccgcgggcctgcaggccttgcggcacgccagcggtgatcgcctgcaactggtgaccggcaacctcgacgacgcgcagtgcgccggcgccatcctgcacgcactggcggaggagcggctcgatcggctggtggtgaatgccggtgtctatggtccggcggaccaggatgtgacgacgatcgacggcgcccagatcgcccagctcttcctcaccaacgccatcgccccgctgcgcctggccagggccctgtccgggaaggtgcgcgaaggcggcgtggtggccttcatgagttcgcagatggccagcctggggctgggcctctcggccacgatgcccctctacggagccagcaaggccacgctgaacagcctggtgcgcagctggcaggcggagttgggagaactgccgttcagcctgctgctcctgcatcccggctgggtacgtaccgaaatgggcggcgagcgcgcgccgctgagcgtcgaggaaagctccgccgggctggtcgccgcggtggaggatgccgcgggcgcgaatgcctgccgcttcgtcgactaccggaaccagccgctgccgtggtga

SEQ ID NO: 344906 - DNA, 1200 bp, Pseudomonas aeruginosa
atgcggcagatcagcgtcctggttctggaagatcatccgttcctacgcttggcagcggtcaccgccctgcgccgggcgggtctcgtcgacatccacgaagcgcagaacggcagcgaggccctggccctgctcaagcaacgcggtggggtggatatcgccatctgcgacctgcagatgccggaaatggatggcctggccttcatccgggcggtaagcgaagtcggcctggtgcgggccgtcgccctgagttcctcggtggagagcccgctgcggacggcggccaccagcctgatccagcgcctcgggctggatttcatcggcgacctcggcaaatccttcgatacccgggcggtgctcgatgcgctgtccgccttcaggaacatgcccaggctgcttccgcccgctcttcccgccttgccgcaaagacccacgccgtcgccggcggacgtccgtcgcggcctggcctgcaacgagttcgaagcctattaccagcccaagctcctgttacggggcaaccagatgcagggcgcggaaatactcgcccgttggaaccatcctcgcctgggcctgctgaccccgggatccttcctggaagtactgcaggcagcgggactcgccgacgacctgctggcccgcctgctcggccaggggctggagtggcaacgacaattgcgccgctacgcgtacggaaaaccggtggagctggctttcaacctggcgccggcccaggcgatctcgcccggcctgatggagctcctcgcgcagaccctgcggcgccatcgcgcctgcgccgaacatgtccttttcgaactcaccgaagaacccttcgcggactcgcccaccctgctgctggagaacctgacacgcctgcgcatgctcggttgcggattggccatggatgacttcggctcgggccattcctccctggaacgcctgctcgacctgccattcacccagataaagctggccattcccttcacccaccacctgctgggaaaccccgattgccaggccatcattcacgccaccgtgctactggccaggagcctcggcgtgcaactggtggccaccggcgtggaaagcgccgagcagcgcctgttgctcggcgaactgggcgtgacgctcggccagggggtcgccctcgccccgcccatgagcggccgcgacttcatgcattattgcctgggacagaagcactga

SEQ ID NO: 344907 - DNA, 1140 bp, Pseudomonas aeruginosa
atgagcgcgaggtcttttcccttcggccatatccccgccggacgtgcctgccggccgctgcttctgtgctccctgctcgccgggctgtccctgcagccggcctcggcgctggacgagatcgcgcgcgactgcaccttccgcaacggcctgggaggcccctggcgcgcagtcaacgacctgaccagcaacacgcccaagggcaccgtgttgttcatcaggccggtcaacctgtttatcgactacaaggtgtcgtactccgcggagccgcatgagttgatcctggggggaaactggagcggggtcggctatccggaaccctacgggacggtacagaccaacatccacgggatcggctaccggatctccatggacgcccaggatggcgtcaagcgaccgatccccatcgataacattcctcacgccctcgatcgacgcgcgaccgacaatgccggaggcgcggtcaacgactacctgcaggaactggtgctgacggtcgatcccagggacctccccagtggcgaactgctggtcacccgcgtttccggcagtgcaatgctgaacctctgggcggtggacatgctcaagggcgaaacgtccttgggggggcgcttcgacattcccaccagcaacacgccggttggtgtatgccggacgccttatcggctggtcgggccggaggcgatcaatatcggcggcggaccgccgccgctgattcctaacaagtgcaaggtcgaggtcgggcagaccatcccggtcgagctgggcagcgtcgcgctgaaggattttccgcagatcaacgatacctccagggcgcgccacttcagcatcgccctgagcgaatgcgcggcggcggcgaagccgcaggtggccttccaggacaagtacgcctccgtggccccggccgatccgacgatcctcagcctgaaggacggcggtgccaagggtttcggcatcgtcgtcgagaacggcctggacagcggcaggcgcatccgcttcgacggcacgccttacccgatgcgccgcgtcggcgacaccgccgacattcccctgagcgccgcctacatccgtaccggcaccgcggccgagctcaaggccggggtggccgacggcgcggccgagttcagcttcaccttcccctga

SEQ ID NO: 344908 - DNA, 3030 bp, Pseudomonas aeruginosa
atgaacaaatgctatgcactggtctggaacgcatcccagggctgctggaacgtcgccagcgaaggtacccgtcggcgtggcaagaccgctggcgtacgggcggtggcggcctcgctcctcgccctgatgggcgcgggcgtcctggctccggcctatgcactgccgaccgaccccaaggtggtggccggcagcggagacatccagctggtcggcgccaagaacatgtcgatcaaccagcacaccgagaagctgatcaccaactgggattccttcagcgtcggcgccggcgagcgagtaaccttcaaccagccaacctcgacttcgattgccctgaaccgggtgctcggcaccaggggcagcgatatccagggcaatatcgacgccaacggcaaggtattcctggtcaaccccaacggtgtgctcttcggccgtaatgcccaggtcaacgtcggtggcctggtggtttcgacgcagaacatcaaggacgccgatttcctggccagcaagttccagttctccggctcgtcgaccagcgaagtgctcaacatggggcgcctgagcgcggcggaagggggatccatcgccttgctgggcgcccgggtcgacaaccaggggacgatcctggcgcagatgggcaccgccgctctcggcgcaggtggcgatttcaccctgaacttcgatggcaaccggctgctcgatatccaggtcaacggcgccgtcaccgatgcgctggcgaagaacggcggcctgctgaaggccgatggcggccaggtgctgatgaccgccagggcaaccaccacggtcctcggctcggtggtgaacaaccagggcgccatcgaggccaggagtctgcgcggccagtccggcaagatcatcctcgatggcggttcgggcaaggtgctcgtggccggcgcgctgtccgccaacgcgctgaacgagccgggccacggtggcacggtggagatgaaagcggccgaggtcgaggtcaacctggcgacccaggtgaacaccctggccagcaacggcaacaatggcatctggaagatcagcgccgacaaggtcgacgtccatcgcacggcgctggccagcggcggcaccgtgcatgtcgataccctgtcgcgcaacctggcgaccaccaatatcgaactgaactcgaccaagggcgacctgaacctgaatggcccggtggcctgggcgtcgggcaaccggctggcgctgaactccgccggcgacctgaacctgaacggcaagctgaccgctaccggcgtcaatgccaggctgggtctgcaggccaagggcgggatcgagatcaacgacaagatcgtgatcagcggcgcctccagcggcatgagcctggatgccggcaacggacatcgggtgaacggcaatgcgtcggtcacgctgtccggcgccaatgcgagctatgtctcgggcggttattactacacggtggtccagaccctggcgcaactgcaggcgatcaacaccaacctggacggcctctacgtcctcggcaacaacatcctgggcagctactactgcacggcattgcagtccatcggcggtcccgccggcatcttcaccggaaccctggatggtctgggcaacaccatcggcaacctctcgatcaccaacaccggggccaacgtcggcctgttcgcccgctcttccggcaccctgtccaacctgaagctggacaacctgcgggtctccgacagcaactacggcgccgggccgtcctccctcggcgcgctggtgggtatcaacaacggcctggtttccaatgtcaccgccactcgggtcagcgtcaatggcagcagttcgcgctccaacgccgtgggcggcctggtcggccgcaataacggcgggcggattcgcgccgccagcgtcagcggcacggtcagcggctacgcgcccaccaccgcgatcggcggtttggtcggcgagaacgcttccaatggtcggcaggcgctgatcgaggacagtaattccagcgtgcagatcgccgccaggtccaccgagcgcaacagcctgggcggcgtcggcggcctggtcgggttgaattcgcgcggcgtgatcaacaactcccatagccaaggccgggttgatgcctccagggccggcctcaacgtgggtggcctggtcggcttcaacctgatgggcgagatattccgcagcagcgccagcggccaggtggtggcgggcagcgccggctataccggcggcctggttggcctgaacagcaacggtgtgatttcgcagtcccaggccagcggcatggtttccagcagcagcggcctggcgaccggcgggttggtgggcaggaacgagggcgacagcgagctgaggaacgtcaaggccagcggcaatgtcacggacagctacggtgcggacatcggcggcctgatcggagtcaacaccgccgcgcgggtggataccgccgaggcgaccggcaaggtctccgggggcgccaacagccgggtcggcggtctggtcggcagcaacatcagcgcctcgctcgatcatgtgatcgcccgcggcgacgtgttcggcggcatcaacagccaggtcggcggaatcgccggcagcaacagcggcgagatctccagcgcggataccagcggcatcgtctccggtggctcgaacagttcgctcggcggcctggtagggaccaacttcggcagcatcatggcatccagcagcaagaacgacgtgcggggcgggagccgcagccgcatcggcggtctggtgggcgagaaccagattcagggacgaatcagctcttccagctcggagagcaccgtcagcggcgactactacaccaccatgggcggtattgccggagtcagcctggggcggatcgagtactccggcgtcagcggcaggatcaacttcaggccgcaatccaactatgggcagatctacggctccctggtgggcgagaaccgtggcgtcctcgtcggcaactacgtgaccggcgaggcggcggtcctgccgcctgccggcgtcgactacgggcaaatctggtaa

SEQ ID NO: 344909 - DNA, 753 bp, Pseudomonas aeruginosa
gtgatccgccgatgcctgcatcgctgcggcttggcgctcggcctttctctcgcgctgccggcgagcgtcgacgcggcgctgaacgtggtcggtagccgcttcatctatccggcgcagagcgaggccctgagcatccgtatcggcaatggcggccagcggccgatcctggtccaggcctggttggatcgcggcgatggctccgccgacccgagcaccgtccaggtgcccttcgtcctgtctcggccattgtcgcgtgtcgagccgcaggaaaagtacgcgttgcagctgcgctacaccggcgagccgctgccggacgaccgtgaatcgctgttctggctgaacctgctcgaggtgccatcgcgggacgagggccgcgacaacctgctgctgctgagctaccgcctgcggatgaaggtcctgtttcgcccgcggggattgcccggcgatccacgggcggccgccggacaggtggcctggcgtctgttgccggccgcgtcgccggggaagctggcggtgctcgaggccgacaaccgttccccctatcacgtttccctgacccgcctggaactgcgcgagggggacgtggcgatcgcccttggccacccgaccctgccgccattcagccgtaccccgctgccactgcccaagccggcgcgcgcgggcgcgcgggttcactacgaggtcgtggatgaccagggccggatcgaggtcggcgtggcgtcgaccggcccgcccgtggcggaacacccctag

SEQ ID NO: 344910 - DNA, 2547 bp, Pseudomonas aeruginosa
atggctgcgaacggccccgtgttgccggcgaagcctggcgccaggggcgcgccgccgcgccggatcatcttcgatgcgcagatgctgtcgctgggagcggggggccgcgccatcgacacttcgcgcttcgagcgcggcaacgtcatcgagccggggcgctatcgtctcgacctgctggtcaacaaccagtggcggggtgtcgaggacgtcgagttgcgccgcgagccgggccaggacagcgcggtgctctgctacgaccggcgcctgctggagcgggccggtatcgacctggccaggagcgcgcgcgggcaggacggcgtttccggcggcgtcccgctgcccgagggaccggcctgcgagccactggcgcgccacgtgccgggcgccacgaccaggctggacatcgccgagcaggccatctatctctcggtgcccgagttttacctgagcctggcctcctcgaagacctacgtcgatccgtcgagctgggacaacggcatttccgccgcgctgctcaactacaacgccagcctctacaacaccgatacccgcggcaggagcgacaccagcggttatgccgggctgaacgccggcctgaacctgggccggctgcggctgcgccacaacggcacggccacctggtcgcggcgcaacggcagccactaccagcgcagcgccacctacggccagaccgatcttccggcctggcgctcgcaactgctggtaggggaaagttcgaccagcagcgagttcttcgacccggtgtcgttccgtggcgcgcggctttccagcgacgaccggatgctgcccgattcgctgcgctattacgcgccggtggtgcgcggaacggccaacaccaatgcgcgggtctcggtctaccagcgcggctacctgatctacgagaccaccgtggcccccggcgccttcgcgctcgacgaactgcaggccgcaagcttcggcggcgacctggaagtgcgggtggccgaggccagcggcgaggtgcgcaccttcatcgtgccgttcgccaccacggtacaactgctgcgtcccggcaccacgcgctacagcctgaccgccgggcaggtcaacgaccccagcctggagcggcgaccgaacctggtgcaaggcatctaccagcgcggcctgggcaacgacctgaccgcctatggggggggggccttcaccggcagctacatgtcggcgctgctgggcctggccctgaacacgccgatcggcggcttcgccggggacgtgacgctggcgcgaaccgacgtgcccggcggtggcggccagttgaacggttcgagctaccggctttcctacagcaagaacctgccgaacaccggcaccaacttctcgctgctcgcctaccgctattccaccagtggctacctggggctgcgcgacgcggtgttcatgcaggaccgggtggacaggggcgagccgctggagtcgttctcgcgcctgcgcaatcgcgtggatgccaacatcagccagcagctcggcgccggcgggggccacctgtacctcaacggttccgcgcagcgctactggagccatggtggccgggccgtgaacttctcggtcggctacagcaaccagtggcgcgacgtcagctataccctctccgcgcaacgtctgcgcagccagtacgagggcttctccgaccgtgagcgcggcggcgccagcagtaccctgttcagcctgagcgtttccattccgctgggcggtcccggccgtggctcgccgaccctgagcagctacctcacccatgacagcgccagcggcacgcagctcaccagtggggtgtccggcctgctgggcaggcgcgatgagctttcctacgcgctgtcggcctcccacgatcgcgagcgcggagagacctcgaagaacgccagcctcgactaccgcctgccgcaggtggaactgggttcgagcctgtcgcagggcccgggttatcgccaggtgtcgctcaaggcgtccggcggcctggtcgcccatgccggcgggctcaccgccacccagatgctgggcgagaccattgccctggtgcatgccgccgatgccctgggcgcacgcgccggctatgccggcaacagggtcgaccgcagtggctacgcggtggtccccaacctgattccctaccagtcgaacagtatcgacctcgatcccctcgggatgcccgaggcggtggaactgaaggccagctcgcgcaacgtggcgcccaccgccggggcggtggtgcgcctggagtatccgacgcggatcgcccgcccgctgctggtcgacagccggatgcccagcggcgagccgctgcccttcgccgcggaagtcgtcgatgcgcagagcggagagaacgtcggtgccgtcggccagggcagccgcctggtgctgcgcgtcgaacggcaacgcggcacgttgcgcgtgcgctggggcgacgcgcccgaccagcagtgcctgctggactatgcgttgccggcgcgcgcgcagacctcgacggtcctgaagctggcgtgccggccggtggccggaggactgcgctcgtga

SEQ ID NO: 344911 - DNA, 747 bp, Pseudomonas aeruginosa
atggcttcgccaatgcacaatgttctcctctcttgggttgcggcgagcgccgtggtcttcgccctgggcgtctccccggccgaggccgggctggtcgcccagggcacccgcgtcgtgtttcctggcaatgagcgcgaagtcaccctgcgggtcaacaatacctccagcgtgccggtgctggcgcaggcctggatcgacgatggacgcgaggatgtgccgcccgagcaactgaacatgccgttcagcatcacccccgcggtcgcccgggtggagcccaacgggggcctggtcctgcgcgtcgcctacctcggcacggcattgccgaaggaccgcgagtcggtgttctggctgaatatcctggaagtgccgccacgggacgagagcgacgagaatgccttgcagttctccttccgttctcgcctcaagttgttcttccgtcccagccagttgaaaagtgccgaatccgcacctgaaaagctccgctggaagttggttggaagtgcgggacgaagtccagtcgttcgagtcgataatcccacgccgtatttcgtttctttctccgacgtcgaggtgcttgtcgatggacgcgccgtctcgatcggcaatggcatggtttccccgttctcccggaaggacttcggcgcaaagaagaacatgccgctcgatagccggaacgcttccgtccgctacgaggtgatcaacgattacggcggccgttccacgctcgagcgagcgttcggcgagtaa

SEQ ID NO: 344912 - DNA, 564 bp, Pseudomonas aeruginosa
atgaacatgttcaagcgtagcgttctcgctcccctcgccgtttccggcgctctcctggccatgggatctcccgcgttcgccgccgatggcgtggtcaacttcatgggcagcatctccgacgtgacctgtgacatcaacggccaggcgccgggtatcggcaacgtcacccatgtcgacctgggtaccgtagctcccggcgtattcaccgcggtcggcaccgcatcccccttcaagaacttcgacctggtcctgtccggcgccggctgcaccgatggcaagaaggcttccatcgccttcgacgccgtgaccaacgtggaccagtccaccggcaacctgaagctgaccagcaactccccggctggcggcgtgcagatccagatctacaacaacgccggcaacaattccaagatcccgctgggctcggccgaggcttcgccgcaacaggccgagatcaagaacaacaccgcgaccctgaaatacaaggcgtcctatgtctccaccgccgccaccgtcactccgggcagcggcgtgtcccatatccgctacgtgctggcgtaccagtaa

SEQ ID NO: 344913 - DNA, 825 bp, Pseudomonas aeruginosa
atgcccgcctccccccaccccgaatggatcaccgtcggcgccctggccgatggcttcgccccggacagccacgtcctgcccgccagcctcgacctcgacggacgcgagctggtcctgcacttcgccaacggctggatcatccagcacgccttcggccggcaacgcctgcgctggcgcctggcggacggcagcgtcagcggcgagtcggcctatcgcgccagttcgctgcgggaaaacgtctacctggtggacttcctcaagcaggaagacggccggacggtgtcggtcagcctggtgctggatttccaccacctggcattcaccgcggtactcggccggttgccaacccgcgccacctgcgagcagggcctgttcagccgtgcgctcagcggccaggaaccgaccggcgtcgaggccgggttcctgcacggcagcctcgggcgtccctggcagcccggcgcctgcccgcacgcgcccagcgaagaactgctcggcctgcgcaaccagtacgtctacagcgccagcgaggcctacgagcacatctacctgaatccgcgcttctatacctggcattgcctgcgcggcgccgagcagggcctggccgacacagaccgctgccaccactaccgactggccgagcgtctgtacctcttcgtctggcgcgaaaagatcgtgccgaccctcggcgtgctgctcatcgacctcgaagccgggcgtaccgacggcaagatcttcggctaccagggcgacgacttcgccaccccggtgaacttcccggtcggcgccctcgcccgggtactcggccagacccgccacgaacagtga

SEQ ID NO: 344914 - DNA, 1563 bp, Pseudomonas aeruginosa
atgaaacccgaagatttccgtgcctctgccacccgtccgttcaccggcgaggaatacctcgccagcctgcgcgacgaccgtgagatctacatctacggcgaccgcgtcaaggacgtcaccagccaccccgccttccgcaacgcggccgcctccatggcccggctctacgacgccctgcacgatccgcagagcaaggacaggctctgctgggagaccgacaccggcaacggcggctatacccacaagttcttccgctacgcgcgcagcgccgacgagctgcgccagcagcgcgacgccatcgccgagtggtcgcgcctgacctacggctggatgggccgcacccccgactacaaggccgccttcggcagcgcgctgggcgccaacccgggcttctacggcaagttcgaggacaacgcgaggacctggtacaaacgcatccaggaagcctgcctgtatctcaaccacgccatcgtcaacccgccgatcgaccgcgacaagccggtggaccaggtcaaggacgtgttcatctcggtggacgaggaggtcgacggaggcatcatcgtcagcggcgccaaggtggtcgccaccaactccgcgctgacccactacaacttcgtcggccagggctcggcgcagctgctcggcgacaacaccgacttcgccctgatgttcatcgcgccgatgaacacccccggcatgaagctgatctgccgcccctcctacgaactggtggcgggtatcgccggatcgccgttcgactacccgctgtccagccgcttcgacgagaacgacgcgatcctggtgatggacagggtattcattccctgggagaacgtactgatctaccgcgacttcgaacgctgcaagcagtggttcccccagggcggcttcggccggctgttcccgatgcagggctgcacccgcctggcggtcaagctcgacttcatcaccggcgccctctacaaggccctgcagtgcaccggttccctggagttccgcggggtgcaggcgcaggtcggcgaggtggtggcctggcgcaacctgttctggtcgctgaccgacgccatgcacggcaatgccagcgagtggcacggcggcgccttcctgcccagcgccgaggccttgcaggcctaccgggtgctggcgccgcaggcctatccggaaatcaagaagaccatcgagcaggtggtcgccagcggcctgatctacctgccttccggcgtccgcgacctgcacaacccgcagctcgacaagtacctcgccacctattgccgcggctccggcggaatggggcaccgcgagcggatcaagatcctcaagctgctctgggacgccatcggcagcgagttcggcggccgccacgagctgtacgagatcaactacgccggcagccaggacgagatccgcatgcaggccctgcgccaggcgctcggcagcggcgcgatgaagggcatgctcggcatggtcgagcagtgcatgggcgactacgacgagaacggctggaccgtgccgcacctgcacaacccggacgacatcaacgtgctcgaccgcatccgccaatga

SEQ ID NO: 344915 - DNA, 750 bp, Pseudomonas aeruginosa
atggatgagcgcctgcgccaacagcagttcagcctcgcccggcacctgcgcgacccgcttggcaacgcgccgccgccgggtctcgaagagcggcgcctgcgggtctaccgcgagctgttctacaacgccatcgaaggggttctcgccagcggcttcccgcgtttgcgcggactgcttggcgacccggactggcatggccgggtgcgtgagttctatcgcgaggagagaagccataccccactgttcacccgtatcgccggggtgttcgtcgactacttgcaggcgaacgtcggggccgaccaggcctggcaggcggagctggcccatttcgagtggagcgagacgcgcctctatctggccgagccggacgacccgccgcaccggcctgatggcgagctgctggacgaggtgccgctgttgtcgagcctggcgctgccgctcggctatcgctgggcggtgcatgacctcgacgcggatcctgccggaccggcagcggcaccgactctgctgctgatgcgtcgcgactcctcgcatcgcgtgcacaccgcgcgcctgaccccgctggcctatcgcctgctggtgtcactggcgagccggcgcctgagcgggcgcgagcatctggcggcgctggcgctcgaagcggggcgcgcgccaggaaccttcgacgcggcggggctggcgttgctggaagcgttgcggacccagggtatcgtgctcggaaccctggatcgcgatccggcgggcgaatga

SEQ ID NO: 344916 - DNA, 234 bp, Pseudomonas aeruginosa
atgctggagagcgagatcgttgcggcacgccgggcgtatgccgccagcctggggctgacgcttgacggaccgaccagcaacgctgacgagccacgccatatccgccatgctgtcagcgactccaatcacaaccccgacgccagaaaccgtatcaatctcggaaatgccatcgcgtacaaaaaagagtccgaacaggaagatcgcttcttccttactattccaaacgctggttaa

SEQ ID NO: 344917 - DNA, 1194 bp, Pseudomonas aeruginosa
atgcgccatgcgacaatcctcaacctgtgcggcctcgccgcttccaccctgttcttcgcgacaacatcggccttcgccacggcggcgccggcggagcgcctgaaggctctggtggacgccgccgtgcaaccggtcatgaaggccaatgatatcccgggactggccgtcgccatcactctcaagggcgaaccgcattacttcagttatggggtggcctcgaaggaggacgcccgcaaggtgacccccgagaccctgttcgagatcggctcggtgagcaagaccttcaccgccaccctcgccggctacgccctggcccaggacaagatgcgcctcgacgaccgcgccagccggcactggcccgccctgcagggcagccgcttcgacggtatcagcctgctcgacctcggcacctacagcgctggcggcctgccgctacagttccccgatgcggtgcagaaggatccggcgcagatccgcgactactaccgccagtggcaaccgacctacgccccgggcagccaccgccagtactccaacccgagcatcggtctgttcggctatctcgccgcgcgcagcctgggccagccattcgagcgcagcatggaacggcagctgttcccggcgctcggcctggagcacacctttatccgggtgcccgccgcgcagcaggggctgtacgcccagggctacggcaaggacgaccgcccgctgcgggtcggacccggtccgctggacgccgaggcctacgggctgaagtccagcgctgcggacctgctgcgcttcgtcgaggccaacctgcaccccgagcgcctggagaagccctgggcgcaggccctcgacgccacccatcgcggctactacaaggtgggcgacatgacccagggcctgggttgggaagcctacgattggccgatcgacctgaagcgcctgcaggcgggcaactcggcgccgatggcgctacaggcgcacaaggtcgccaggttgccggcgccgcaagccctggacggccagcgcctgctgaacaagaccggctccaccaacggtttcggcgcctacctggcgttcatcccgggacgcgacgtcggcctggtgatcctggccaatcgcaactaccccaatgccgagcgggtgaagatcgcctacgccatcctcagcggcctggaacagcaggccaaggtaccgctggtgcgctga

SEQ ID NO: 344918 - DNA, 789 bp, Pseudomonas aeruginosa
atggcgaagggctggagcgacgaggagttggcggcggcggtcaaggcgtaccggcacatggagacaatgcaggcgagtgccacgccctattcgaaaaaacaggtgtatcgggacttggccaagcgctatgcgcggacggaaaagtcgttcgagtaccgcatgcaaaacatctcggcggttctcgatgaattgggtatgtcttggttgccggggctcaagcccgcggtgaacgtgggctcggaaatgaaagcccggctggtgcgcctgcttggcgtcgaagcgctcggcgcaaccagtgtgtccgtagatcttgtcgcgcagcggagcgcacaaggcctgcgcacggcgggacaagtcgcggaaagcgccggtgcgttcgatcccacgagtgtcgaggatgctcgcgaaagggtctacgcatccatcgtgcgtcgccgcgggcaggctgcgttccgcaagcaattgttggaagcctacggcggctcctgcgcgatcagcggctgcgaggtgaccgaaatactcgaggctgcgcacatccatccctataagggtgcgcacacccacagcgtttcgaatgggcttttgttgcgcgccgacctgcatacattgttcgatcttggcctgatcgtcatcgacacgccgtctttacgcgtgaaaatcgcgcctgctctacgacacacggaatattccagttggcatgacgctgcgctgcgcccgcctaagttagcgtcgcaacgcgccagccaggaggcgttggagtggcatcgtctccatattggctggcaatga

SEQ ID NO: 344919 - DNA, 588 bp, Pseudomonas aeruginosa
atgtccccacgtccttcgccagccctcgccgcactacgcgacgccacccgtgacctgcacgccgagctggaccgccgttcgcccttgggcgccgaggatctcgaccagcgggactatctcgaacatgccgggcgcatcctgggctggctggaccccctggaacgcgcgtttcgtgacaaccgcggcggctggccggcgaccctgggagccgaggcgcggctggtgaaaagcgcctggctggaaagcgacctgctggccggcggcctgagccatgccgaggtgcaggcgctgccgcgctgcgccgacctgcccgtcgcgacacgcgccgcgcaggccttcggcgtggcctacgtgatggagggtgcgacgctgggcggcgcgtttctctacaaacgactagctccccgcctgccaggtctgccgctacagtggctgcaaggctacggccaggccaccgggccgcgctggcaggactttctcgagcagctcgcccgccaggtcgtcagccccgaatccattggcctggcgcaggacgcggcacgggctacctttgtttcgtttcgtcggtgggtcatcgacgaagcctga

SEQ ID NO: 344920 - DNA, 807 bp, Pseudomonas aeruginosa
atgcatgacgcagccgcctccctaccgccccaggcgcccgccgcctgggccgattatctttccggctaccgctggcaggcacagcgcgaaggctgctcagcggccgctgtccatcgtctcgatgcggcccggcggccgaccctgttcgtcaagcacgaggcgctctccgagcaggccgaactgcccgacgagatcgctcgcctgcgctggctgcacggtgccggcatcgactgcccgcaggtactgaacgaaacccagggtggtggtcggcagtggttgctgatgagcgccgtggcgggagacacgctctccgcgctggcgcagcgcggcgagctggagccggagcgcctggtgcgtctggtggccgccgccctgcgccggctgcacgacctcgacccagccgcctgccccttcgaccaccgcctcgagcggcgcctggaaagcgtgcgccggcgggtcgaggccgggctggtggaggagacggacttcgacgacgagcatcgcgggcgcagcgccgtggagctgtaccgcctgctgctcgaccggcgcccggcggtcgaggacctggtagtcacccatggcgacgcctgcctgcccaacctgctggccgagggccgacgcttcagtggcttcatcgattgcggccgcctcggcgtcgccgaccgccaccaggacctggcactggccgcgcgggacatcgagaccgacctcggcgcgccctgggccgaggccttcctggaggcgtacggcggcgatatcgacggcgaacgactggcgtacttcaggctgctggacgagttcttctag

SEQ ID NO: 344921 - DNA, 1422 bp, Pseudomonas aeruginosa
atgggcatgtccttgtcgacccgcctggcgggcatgttcgccggcgccgcgctggtgatcttcgccctgatcggcagcatgctctactgcatcctcgaccggcagaccgagcgcttgcagcagggcgaggtggacgtgcgcttcaacatggtctcgcggatgctcgaccaccccgacctggccgagcgctggccctacctgcagggcaagctggacaacctgagccaggagtacgaactgattcgcttctggatcgacagtgacgatccgcgctaccgctacggccgcttcagcgagccggtgcagcgcctgatcgccagcggcgccgggcgctacgagttgcagttgccggaacaccggtacgcgctgaccgcgcgggtcggcgtgttgccggcgcgcgagggccggccgcggctgacctacgtcaccgccatcgacagcgcggcgttccacgaggcgcggacttccaccgtgaaatggctgctcggcctgtccgccctcggcgtgctgctggcctcgctgctcggccactggatcgcccgcctgggcctgtggccggtgcaccggctgtccgaggaaacccggcggatcagtccgcgacaattgtcgctgcggctgcagatgtcgcccttgccggccgaactgcgcgagctggtgggggcgttcaacggcgcgctggaccgcctggaacaggcctatgtgcgcctggaatcgttcaacgccgacgtcgcccacgagctgcgcacgccgctgaccaacctgatcggccagacccaggtggcgttgtcccgcgagcgcagcggcgaacactacgaggaagtcctgcaatccaacctcgaggaactggagcggctgcgagcgatcgtcaacgacatgctgttcctcgcccgcgccgaccagggtcgcctggcctgcgagcgcgaggacacctggctggccggcgagatcgcgaccacggtggagttcctcgaggtgatcttcgacgaggccggggtgagcccccaggtacagggcgacgcccgggcgatggtcgagcgcgcgctgttccagcgggcggtgaccaacctgctgtacaacgccgcccagcacaccgcggccggtggcgaggtgcgggtcgcggtggagcggcgcggcgacgaggtgcgggtggcggtgagcaaccccggcgcgccgatcgccgtggagcaccgcgtgcacctgttcgagcgcttctaccgggtcgacgcggcgcgcagcaacagcgaggccaaccacggcctcggcctgtccatcgtcaaggcggtggcgagcatgcacggcggttcggtgttcgtcgacagcgcgggcggctggaacaccttcggcttcagcgtgctgagccccgagcgacgcgggcccggtgaccgcctgccgctgggcgagggcgatccggcgctgtcctga

SEQ ID NO: 344922 - DNA, 1848 bp, Pseudomonas aeruginosa
atgaagcgctaccacatcaccctgggcgcccgcaccacggcgggcggcaccgtcaccggcgcctgggagcacgccagcatcgaaggcaggcccatggcccgcgaaggcgacagcgtgttctgcccggcttgcggcagcgtcggcgtcatcgtctgcgtcggcccgcgcctggacgagcggctggaaacgcgcagcaccgccctggacggcgatctctgcatgtgccgctgcgatccgccgccacgcctgctcgccaaccagacgttgcgttgccaggtactctcatccgaggagtcggtggccatgtctctcaatccccgcgctccctttccaggccgttcgatggcgcgtcctccggccgatgcctggcgttcgccgacagcccccggcgcaggtctggaagaagaggaagaagaggaagaacggagcggcgtcaccctgcgcctggggttgttcttcgacggcaccggcaacaaccaggccaacagcgcggcggtcgccggctgccacgccctggcggtgggcctgagcgacacggccgccgaggatatccgccagcactgcgccgcctatggctacgacggcgagggccgggtgccggacaacagctatggcaacgatgtgaccaatgtggcgcggttgtacgagttgtatccagatcagacgggcgagccgttaacttctcacgttgaagaggcgtacctcaaggtctatctggagggcgtcggcacccgcagcggcggcgaggactccctctacagccagggaacgggccagggcccgaccggggtgctggcgcggatcaggcagatgcctgctctggtactggagcagttgcgtctgttgcaggataacaatcccaatctcctgatcgagcgcatcgaaatcgacctgttcggcttcagccgcggcgcggcggccgcgcggcactgcgccaacgaactgctcaagggcccggacagcccgctggcccgggccctgcccggcgggtcgccattgttcgcccggcgcttcgcctggcgccgcggaaccgacttcgcgctgaacttcatcggcctgttcgacaccgtggccggcatcgtcgcgccgctgcgcggcgatttcagtccgcacgacgggcgcaacgccgacctcgccctgggcctggcccccggctgcgcgcggcgggtggtgcaactggtggcgggcaacgagtaccgccacaacttctccctggtccgcagcgaccacgacatccgcttgcctggcgcccactcggacatcggcggcggctacctgcccgaagcggtggagaaggttctgctcagccggccggacagcaacctggtcagccagggccaggccgacgagcataccgaggcctactggcgcacccgccaacgtctggagcgcgagttgccgcactggcggccctatgtgcagcgcctgggcatcgccacctggtcggtggcgcagccccagcgccgcggcgaaccgccggagaagcgggtctacgcggcgctcagcagcgagcggcgggtgcgcggcgagctgtcgcgggtctacctgcggatcatgcgtgaactggcggtgcgggccggggtagccttcaaggcgatcgaagagcgcgaccccgcgttagccctcccggacgaactacggcccatcgccgccaagttgcaggcctatgccctgggcgagcccttcgccggcctcagcgaggaggaaatcgccctgctgtgtcgccgctacatccacctgtccgcccattggaacgccgccaagggcaagcacaacagcgtgctggcggtgatgttcatcaaccgccccgcggagggcggcaagcgcaaggagtatcccaatgcctag

SEQ ID NO: 344923 - DNA, 654 bp, Pseudomonas aeruginosa
atgcctaggttcatgctcgccctgctgctggccctggtctggttgccggcgggctgcgcccgcggcggcaatggcctgccctacgacgcctggcgcctgggctttctcgcgcccagctacatggaggtgtggatcgagaccgccgatgcggtggatatccacgaccgggtgtttcgccgcgccatgagcggcgtcgcggcgatccagacgccgaagaacttcaaggggaatcctcgaggctggcctaaacgccccggttggggggccggcaagcatgtccgtggagcggccctgccgcgactgatctacgtgcgctggcagtcgctggtggaaccgcagacctaccaggcctatatcgtcattcccgagcccatccggcaggccatggtcaagggggagaaggcttactgccgggccgatgacaagtggatcaccggctaccgcgaaggcctggccatcggactggcccccggcggcatcgccaaggcctggatcatggggccgtgcctgagtcccatcgaggtcacccgagtgcagggagaagtggtgaagaaggggccctatggcggtgggtcaggcgggcatcactatcccttgagcgatatttccaaagcctacattgaaagaaatggcattccgtatggttcctggtga

SEQ ID NO: 344924 - DNA, 1269 bp, Pseudomonas aeruginosa
atggatcgaaccctgtctgatcgtattttcccacgcttgctcctgttgctcgccctggcctggctggtgccctggatgcccgcgcacgccgaagcgccggcggaatgggtcgccttgcccctgtcggagcgggtggtggataccaccaacaccctggacgaggcgacgcgcctgcgcctggtggaacggctcgaggcgctggagcgccgccgcggcgcgcagatcgcggtggtgatgctggcgactaccggcagcctggacatcgagaccttcgccgacaagctgttccaggcctggaagctcgggcgcaagacggtcgacgacggattgctgctggtggtggcgaaggacgaccggcggatgcgcatcgaggtcggctacggcctggagggcgcggtgcccgacgtggtcgccggacggatcattcgcgagcggatggccccggcgttccgccagggtgactacgccggcggggtcgaggccgcggtggccgaactgatccgcctggtcgacggcgaatcgctgccggttgccgtggcggcgtcggatgcgtcggatgcgccgggagtctcgctgggacaagtgccggcggaagcctgggcgctgctggtcgccttcgtctacggggcgctcgccggggtgctgttgactgcccggccggcgcgctggccctggctgctcggcggtgcgctgtgctgctgggcgctgggtacgctggccggcgcctccggcgaatggctgagcgtgctgctggtcgctccgctgtgcatgctggtcggcggcgcgaccttcggcgcgttgtggacggtgcgcccggtgttccatctggtgatcggcgtactggtctatatagccctgctcgggctggcggcgcatttcttcagcgcggtgtctttcatctacggcctgctgtggccggccggggtgctgatgctggcgacgctcggctggctgaactaccgcctgatgcgctccctgtggcgcgagcggcggaagggtttccagcgccggctgtgggcgtggctggcggcctacccgctgctcggattgctgtccggtgggctggacgcgccgctggcctggctggccctgataccgttccagctcatgctgggattgctggtattcggccgggtgcgcctgggcgggagtggcggaggttcgtcgggaggttccggcggcggttcgtcttcttcctcttcgtcgtccggcggattttccgggggtggcggctccagcggtggaggcggtgcctccggcagctggtag

SEQ ID NO: 344925 - DNA, 1335 bp, Pseudomonas aeruginosa
atgtctgcaatcatgcgttatctcgtcatgtttcgcctgttcggcgcgctgctctgtgccgttgccgttaacgttccgtccgtttccgccgtggcggcaccggtcagcgtcgccgcgccggcgtccgctgccgccgaggacgctgtcgacgggatggagggggcggccgatgcgacatacgaacccgccgaggtccccgtgttgacccggcgggtcaccgaccttaccgcgaccctcgactccagcgagcgcgcccgcctggaggcgtccctggcgacgctcgagacgcgcaagggcgcgcaggtggcgatcctgatggtttccagtacctatccggacagcatcgaggcctatgcggtgcgagtcttcgaggcctggaagctgggacgcaagggcgtcgacgatggcgtcctggtgctggtggcgaagaatgaccggcgcatgcgcatcgaagtcggctatggcctggagggggcgatcaccgacgtcgatgccgggcggatcattcgtgaatacatgaccccggcgttccgccagcaggactacgccggcggcctggaagcgacggcgcagcgcctggtccgcctgatcgacggcgaggcgttgccgccgccgccgcgcgacccgatcgatcccgacagggtgcagcggaccctgggcatcgtcttcctgctcggcgccttcggtggcgtgctgttgctggtgcgcccgcgagcctggtactggaccctcgggacgctggtggcgctcggcgcggcgctggcgctggggcgccactggccggtgtgggcgatggtgccggtggcgcagctggtggcgttcctcggggtcggcttcggcgccctgctcaagtattcgcgcggcgcgcgctggttcttcgccgttctcacgctctatgcgctggggttgttctgggcctatggccgctacggcgtggcggtgctccactacgggctggccgttccgctgtcgctggggttgacgctgctgatgctggccggggcctggcaggggttgcgcaaggggcgccgccgggcctgcctgccgggtctgctgggactgctgctgaccctggccctggagtgcctgctgttgctggtggacgacccgctgaacagcatcgaggcgctgatcatcctgcccgccgcctgcctgccgctgttcatcggctgcaacgtcggttccggcggtccgggcggacggcgcaggcggggcggcggataccagggggcgacgagtttctcttcttcgtcgtcatcgtcgagttcgtcgtccgactccttctccggcggcggcggctcgagcggcggtggtggcgcctccggcagctggtga

SEQ ID NO: 344926 - DNA, 687 bp, Pseudomonas aeruginosa
atggaacctgtactgttttatggcgtaccccacggctgctcctttggttcgatcgtcgccctcgaatggctggggcgaccctaccgcctgtgccggatcgagatgccggtggatgccgaagagcgcacctacgtgcgcctgaacccggcgcgacagacaccggcgctgctgctggaggacggccgcgtgctcaacgagagcctggcgattctccagcacctggcggcgcgcgacctgtgcaggaagctgggctatccgcagggcagcgccgagttcgacgagttgaacttcgtcctcgccctgctgcataccgaatgccattcggcctggggcgcgctgttctacctcgccggcgccgggcagaccgcccaggccggcgcgctggctcgcgccgcgcgggcctacgggcggatcgaaagcctgctcggcgaacgcaagtggctggccggcgaaggaccgagcgtcgccgacgcctacctggccggtaccgcgcgctggggccgggaactgggctacttcgacctggcaagcgacttcccgcggctgcaccggcacctggagaaactggagcaggaccccgccgtacgcttcgcccatgccatcgaggacgggctgcctgcgcaaagcagcggggagttcaggggtgaggttgcgctggaagacgtggcgagccggctgctcgcctga

SEQ ID NO: 344927 - DNA, 414 bp, Pseudomonas aeruginosa
atgcctgcaataccccggcgcgccatggtgctgtgcgccaaccccggccgtctgctcaggtacggagcgctgttcaactgctgcggctatttccacctgagcctgtgcctggaccagcaggagctgcgccgctcgctggatcagggttttccatacgactactttctccatgacggtttccgtctcgacccggcctgcaagagcaccctggcgatgcttgggcgcagtggcaaggtcgaacgcttcctgctggtgggggaactcgactgccgggagaagcgcctgctgttcgagtggtccaccgggcataacctgagcatccgctccctgtccgaccggcccctgggtcatgccgcgctggcggcgctgatggcccgcgatcgcagtggcctggacctgcgcggcatcgcgtga

SEQ ID NO: 344928 - DNA, 732 bp, Pseudomonas aeruginosa
atgtccgtccaggcccggatcctcaagtcgatcgacaccatcgaccatgccttcctgccggcgggcgaggcgctttccgagcgggtgttccggtgccggcaggtgcatggcgccggcatcgtcgaggcgcgttcgctggatgagtcgggacggcatgccgccgatggcgtgttcagcgagggaccgctggcggtcgcggtggtgaccgcggactgcctgccgatcctcatgagcagcgccgatgggcgcctggtcgcggccctgcatggtggctggcaaggcctggtcgccggcatcgtcggcgcggcggtggcccgcttcaacgcccggggtgtggccagcgcggacctccgggtcgccatcggtcccggtatcagggcctgctgctacgaggtgggttccgacttcaccgaggcgttgcaggtgcgtcacggcggactctggatcaacgcgcagcggccctggagccattctcgcccgcttcccgaaagggcgccccggttcgacccgcccgagccaagacaggcggggcggggcgcctggttcgacctggcgatgttctgtcgccagttgttccgggccgctggcgtcggtccggcacagatcgaggccagcaccttctgcacctactgctccggggataccttcgccagccaccgtcgacgccagcgcctgggcgaggagaaataccagcagtacgcctggatcgggcgcaagcgcgacgctggctga

SEQ ID NO: 344929 - DNA, 384 bp, Pseudomonas aeruginosa
atgcgctcgccaagaatcctctccgccgccgccctgctgcttatcagccatgcccaggccagcccggccattctcggcgacgaggaaaaggatgcggtcatcgatcggcaccgcctgaccccggaattccgcgtcaaccggcaagccaaggtacgccatcacgagggggctatcgaccgggtagtcctgattcgggatgggaaccgcttcacctaccgaagctaccttcgcgacgaccagaacgagcctgccaccttctggatcctggagttcgacgcacgcagcgggaaacgcctgagcgagcgccagaccgatgaggacgactattggcgcaggcgcgacgccgactcgcgtcaggcggacagcggcgagaagagccgctag

SEQ ID NO: 344930 - DNA, 774 bp, Pseudomonas aeruginosa
atgactcgacctttcccgtccgtattcgcagcccgtttcgtcgccccggcgctgctcctgctccagttcgccgcggcccagcctgccacggctggcgacagcgccgcaccgccgctgcgcttcgcggtaatggaaagctggggcatgccgctgatccgcctggaagaaagccagccgaccgctggcatcgtccacgatatcacccgttccctggcccgccaggtcggccgcgaagcgctctaccacccctatccgcgcgcacgtatcgaacaggcgatggacggcggcgaaatcgacgtccgctgctacatcagccccgcctggctcagccgggacttccccggctaccgctggagcgtgccgctgctggtgcaacgcgacatcctggccacccgcgaaggcttcgcgccgattcccgaggcgctgcctgcccagcgtatcggtaccgtcctcggctacagctatccacgcctgcaggcgctgttcgacatcggccggctgcgccgcgacgacgcgcgcacccaggacctggtgctggaaaaactgcgtgccgggcgctatcgctacgccgtgagccatcaactggccctgcgctggaacaaccgccagacgccggggcaggcgccactccaggaagccgcccagctcgaggaaaacccggtgagctgcctggtgcgggatgccgcggaggtaccggtggaagcgatcctgaagacgttcgaggagatgaagcgaaacggagagatcgaggagatattgcggcgctaccgctga

SEQ ID NO: 344931 - DNA, 474 bp, Pseudomonas aeruginosa
atgctcacgctcagcggatggctcaccacacaggtacccccggcgtcgcggccggcgacggagggcaggctggcgcgcgcggaaggcgctgctggtgagccgccggaaagccaggcgtccgccgagggcgcgtccgagcggcatgtacggatttcccaggccgggcgggaactggccgccacccggggcgtcccgccggaggatgacgacgaggatattccgcaggaactgcggccgatggtgaaaatgatccgcgagctgaagcagaagatcgaggagaagctcaaggagttgcaggaggccatgggctcgtccgatccggacgtcaggcagaatcgcctgccggccctgcagaaggagctgcagcagctcaactcggccctgcagacggccaccgccgcgctggccaaggccatcaaggaaatgggcctcagcgatccggcgctgatcatgaagatgatgggggggcgctag

SEQ ID NO: 344932 - DNA, 1356 bp, Pseudomonas aeruginosa
atgcgcgatctcagacacgctgtattcgccggcctgcttgccggcacgctttgcgagggggcggccgccacggccggggccggcgggttcatcgaggacagcgaactgcagttcctcgcccgcacctactacttcaaccgcgactaccgcgacggaccgaacaacgccgggcgcaaccgcttcaagccacgcagcgaacgcaacggctaccgcgaggaaaccacccagggcctgcgcctgctgttcggctcaggctacacgccgggcaacctcggcttcggcctcgacgcccatgccatgctcggcctgcagttggacagcggcggcggccgcacgggcaccggcaacctgccggtgggcgccgacggccatcccgagcatcgctacggcaagctcggcggcgcgctcaagctgcgccacggcgagacccgcctgaaatacggccagaccagcaccagcgcgccggtgttcgctgccagcagcaaccgcacgctgaccggcatggcctacggcctgctgctggaggaccgcaccttcgacggcctgctgctcgaaggcggacgcttcagcgccgcctccggccccggcgaatccaaggtgcacggcgagatcagcaccgtctacggccgcctcggcgcctacccggtgcggctcgacacggtgaacttcctcggtggccagtggcaggccggggagcgcctgcaactgtcgctctatgccgcgcgcttcgacgacgtctggcagcaagcctacctcggcgcccgccatcgtcagccgctcggcgagcgacgcgcgctgctgctcgacttcaacgcctaccgcacgcgcgacagcgggcagagccgcttcggccgcatcgacaccctggccagctcgctggcgctgggctacgagcagggcccgcagcgcctgaccctggcctaccagcacgtccgcggcgagcagccgttcgactacatggccttcggcgacggccgttccagcgcctcgatggtgctggccaactcgctgggctattccgacttcaacgggccgggcgaacgctcctggcaactgcgctacgacctcgagctcggcgccctcggcctgcccgggctcagcctgcacgccctgcatgcgcgcggacgcgccggggccagcgccgccagcgccaccgagagcatctacgccggcctctacggacgcgacggccgacaccgggaaaccgacttcggcctcgcctaccgggtcgaggcggggcctctcgccggcctcgcgctgcgcgcctcgcaggcctggcaccggggcaacccgacctacctcgacggcgacgtcgacgagacccggttgatcctcgactacccctggacctggtaa

SEQ ID NO: 344933 - DNA, 1437 bp, Pseudomonas aeruginosa
atgagcatgaacctggtcaccctcctgtacctcatcgcctcggtctgcttcatccaggccctgaaaggcctgtcgcacccgactacctcgcgccgcggcaacctcttcggcatggtcggcatggccatcgccgtggccaccaccgtcggcctggtgttcaagctgggcgcggagatcgccaccaccggcgtcggctacatcttcgtcggcctgctggtcggcggcagcgccggctcgatcatggccaagcgcgtcgagatgaccaagatgcccgagctggtcgccttcatgcacagcatgatcggcctggccgcggtgttcatcgccatcgccgcggtggtcgagccgcagtcgctggggatcgtcgcgcagctgggcgacaccattcccaccggcaaccgcctggagctgttcctcggcgcggccatcggcgccatcaccttctccggttcggtgatcgccttcggcaagctctccggcaagtacaagttccgcctgttccagggcaccccggtgcagttctccgggcagcacctgctgaacctggtgcttggcctggcgaccctcggcctgggcctggtgttcatgttcaccggcaacctcaccgccttcgccgtgatgctggcgctggccttcgtcctcggcgtgctgatcatcatcccgatcggcggcgccgacatgccggtggtggtgtcgatgctcaactcctattccggctgggccgcggcggggatcggtttctcgctgaacaactcgatgctgatcatcgccggctcgctggtcggttcctcgggcgcgatcctctcctacatcatgtgcaaggcgatgaaccgctcgttcttcaacgtcatcctcggcggcttcggcgccgaagccgacgccggcggcccggcgggttccaaggagcagcgcccggtgaagtccggttcggccgacgatgcctcgttcctgctgaccaacgccgacagcgtgatcatcgtccccggctatggcctggcggtggcccgcgcccagcacgcgctgatggagctggcggagaagctgacccaccgcggggtcaccgtgaagttcgccatccacccggtcgccgggcgcatgccggggcacatgaacgtgctgctggccgaggccgaggtgccctacgagcaggtgttcgagatggaggacatcaactccgagttcggccagaccgacgtggtcctggtgctcggcgccaacgacgtggtcaacccggcggcgaagaacgatccgaagtcgcccatcgccggcatgccgatcctcgaggcctacaaggccaagaccgtgatcgtcaacaagcgctccatggccagcggctatgccgggctggacaacgagctgttctacctggacaagaccatgatggtgttcggcgacgccaagaaggtcatcgaggacatggtcaaggcggtggagtga

SEQ ID NO: 344934 - DNA, 420 bp, Pseudomonas aeruginosa
atggccttatcgacccgcgaccgcgacgaagtcctttcccagagcaatgtcaccccgctggtcgacgcgctgctgctggtgttcatcgtcaccgcgccgctgctgatcagctcgatcccgatcaacctgccgaagaccgagtcgatcgccccgccggagcggtttttttgcagatggacgattcgtcggcgttatccgccgatggcgggcccgcgaatgcgcgcgcatcgttcccgccacttgcccgccctgtgcctgggcacgtctcagggctgtcccggcggtggcgcctccggctccctggcgtcctccgttccttcgacctcccattcgccggcccagtcctcgccgaacagttcgctgggatgctgggtgcggctggcgccgttgccgcagcccatcgattgcgccgagcaatag

SEQ ID NO: 344935 - DNA, 693 bp, Pseudomonas aeruginosa
gtggtcatcgcgaacagctcacagcggggctccagccggcgacggctcgctcctgtccctatgcgcgaggcgtctgcgccggagccccacgacctgctcctgggcatggccccggagcacctggccgacgacgcaccgccctgggcccgcgaggtcctggcggccggctggccggtggtggtgcggcgcgcgccgggagatccggcgacggtggccatcggcgtgcgcggcccggcgcgggagcagcgctgggccggctggatgccgttggcggcgatcacccggcgcctgcgtccggaagcgctgtgccagcgcgaaccgccgttgtcgcgcgacctggcggcctggagcgccctgcgccagttgcgcgcgccgctgaacgcgctggggctggcctggggcgtgatcggcggcgccggtttcgagctggccagcggggtcgccgtgctgcatccggacagcgacctcgacctgctgctgcgcaccccgcgcccgttcccgcgcgatgacgcgctgcgcctgctgcgatgcttcgagcattgtccctgccggatcgacctgcaattgcagactccggcgggcggcgtggccctgcgcgaatgggccgagggacggccccgggtgctggcgaaaggcgtcgaggcgccagtgttgctggaagatccctggcgggtcgcggagatcggggcatga

SEQ ID NO: 344936 - DNA, 432 bp, Pseudomonas aeruginosa
atgaagaagtacctgttgcccgccttcctgttcgccgccgcctcgctcaccggctgcaccaactacaacatcagccagccgtccgcaccggtggacggcctggtgaagaccgacctgaaggccgacgtggccgtcggcgccccgatcagcggccagtcctcggtcaacatcctgttcggtttcatcaagttcggcggcgacagccagttcgccgacggcgtgacctacggtggcggcgaatcgggcctcggcctgggcttcgacccgatctcctcggccaaggccgccgccgccttcaaggcggtgaagagcgccgatgccgacctgatcgtggcaccgcgctacgaggtttcggtgaacgactacttcgtgttcaagaaggtcgacgtcaaggtcaccggcagcaagggcaccatccagtcgatccgctga

SEQ ID NO: 344937 - DNA, 1251 bp, Pseudomonas aeruginosa
atgtcgcacccgagcctcgtccgcgcgctctgcgcgtccctctgcctcggcgctggcctgccggtccacgccgagcgaggtttcctcgaagacgccaaggtcagcctcaccgcgcgcaacttctacctgaaccgcgacttcgtcggccacgccagccaggacaaggccgaggaatggacgcagagcttcatcctcgacgcccgctccggcttcaccgagggtagcgtcggcttcggcctcgatgtcctcggcctgtacagcctgaagctggatggcggcaagggaacggccggcacccagttgctgccgacccacgacgacggccgcccggccgacgacttcggacgcctggcggtggccggcaggctgcgcgtgtcgaataccgaactgaagctcggcgaatggatgccggtgctgccgatcctccgttccgacgatggccgctcgctgccgcagaccttccgcggcggccagctcagcgccagcgagatcgccggcctgaccctccacgccggccaattgcgcggcaacagcccgcgcaacgacgcaagcatgcaggacatgtcgctgttcggccggccggccgccacttccgaccgtttcgatttcgtcggtggcgaatatcgcttcaacggtgaacgcaccctgctcggcctgtggcacgccgagctgaaggacatctaccgccagcagtacctgcaactgcaacacagccagccactcggcgactggctgctgggcgccaacctcggctggttccgtggccgcgacgatggcagcgcgcgcgccggcgaactcgacaaccgcaccgtttccgcgctgttctccgcgcgccacggcctgcatgccctctacctcggcctgcagaaggtcggcggcgacgacggctggatgcgggtcaacggcaccagcggcggcaccctggccaacgacagctacaacgccagctacgacaaccccggcgaacgttcctggcagttgcgctacgacttcgacttcgtcggcctcggcctgcccggcctgaccttcatgacccgctacctgcatggcggccatgtgcgtctggccggagtcaccgacgatggtagcgaatggggacgcgagagcgagctgggctacacggtgcagggcggcgccttcaagcgcctcaacctgcgctggcgcaattccagccagcgccgcgactggggcagcaatacccgtttcgacgagaaccggctgatcgtcagctatccgctgggcctgttctga

SEQ ID NO: 344938 - DNA, 1905 bp, Pseudomonas aeruginosa
atgcagcgttcgatcgccaccgtatcgctgagcggtaccctgccggagaagctcgaagccattgccgccgccggattcgatggagtggaagtcttcgagaacgacctgctccattacgacggcagccctcgcgatgtgcgccggctgtgcgccgacctgggactcgagatcctgttgttccagccgttccgcgacttcgagggctgccgccgggagcgcctggcgcgcaacctggagcgcgccgagcgcaagttcgacctgatgcaggagctgggcaccgacctggtgctggtctgtagcaacgtcgccgcggacgccctcggcgagccggcattgctggtcgacgatcttcgcctgctggccgaacgcgctgccgcccggggcctgcgtatcggctacgaggcattggcctggggccgccaggtcagcacctgggagcaggcctgggaattggtgcggcgggccgaccggccgaacctcggtctgatcctcgacagtttccacaccctctcgttgaacggcgatgctcgtggcatcgccgggctacccgcggagaagatctttttcgtacagatggccgatgcgccgttgctggccatggacgtgctggagtggagccggcatttccgctgcttcccggggcagggcggcttcgacctggcgggcttcctcgcgccgatcgtcgccagcggctaccgtgggccgctgtcgctggaggtcttcaacgacggcttccgcgccgcgccgacccgcgccaacgccgccgacggcctgcgcgcgctgctctacctggaggaaaagacccgcgagcgcctgcgccgcgaggcaccgcaggtggccgtggacgggcttttcgcgccgccgccggcgagcgtctgcgacggcatcgagttcctcgagttcgccgtcgacgaagcgttgcgcgcgcgcctgggccagtggctgcgccaactgggcttcgccagggtcgggcagcatcgttcgaagaatgtcagcctgttgcgccagggcgggatcaacctggtgctgaacgccgagccctattccttcgcccacggcttcttcgaggcccatgggccttcgctgtgcgccaccgccctgcgcgtgcgcgacgccggccaggcgctggagcgcgcgcgccgctacggcggccggccctatcgcgggctggtcggccccaacgaacgggaaatcccggcggtgcgtgccctcgacggcagcctcctgtacctggtcgagcaggagggcggggggcgcgacatctaccagaccgacttcgagatgaccggcgaggcgacgcccggcctcggcctgcggcgcatcgaccatgtggccatggcgttgcccgccgagggcctggacagctgggtgctgttctacaagagcctgttcgacttcagcgccgacgacgaggtggtcctgcccgatccctacggcctggtcaccagccgcgcggtgcgcagccgctgcggccaggtgcgcctgccgctgaacatttccgaggaccgcaacaccgccatcgcccgtgcgctgtccagctatcgcggttccggcgtgcaccacatcgccttcgactgcgcggacatcttcgccgccgtggcccaggccaaggaggccggcctgacgctgttggaaatcccgctgaactattatgacgacctcgctgcgcgcttcgacttcaccgaggagttcctcagcgagctggcctactacaacgtgctctatgaccgcgacgcccagggcggcgagctgttccatgtgttcaccgagccgttcgaggaacgcttcttcttcgagatcctccagcgccgccatggctacgccggctatggcgccgccaacgtggcggtgcgcctggcggcgatggcccaggcccggcgcggtgtgcgccgggtcaaactgtga

SEQ ID NO: 344939 - DNA, 855 bp, Pseudomonas aeruginosa
atgagccgcccacgctcggtgctcgccggcctggtcggcgccggcatccaggcctcgcgcactcccgccctgcacgaacacgagggcgacgcccagggcatccgctatctctatcggctgatcgatctcgacctgctgggcaagtcggcggacgacctggaatccctgctcgccgccgccagcgacctcggcttcaccgggctgaacgtcacttttccctgcaagcaggcgatcatcccgttgctcgacgagctttccgccgaggcgcgtggtatcggcgcggtgaataccgtggtgctgcgcgacggccggcgcatcggccacaacaccgattgcctgggcttcgccgaaggtttccggcgcggcctggcggacgcgccgcgccagcgggtggtgcaactgggcgctggcggcgccggcgcggcggtggcccatgcgctgctcgccgagggcgtcgagcggctgatcctgttcgatgtcgagacggcacgcgcgcaagccctggcggacaatctcaacgcgcacttcggcgcggcgcgaacgctcgccggcaacgacctggccagcgccctcggcgccgcccagggactggtcaacaccaccccggtgggcatggccaagctgcccggcatgccgctgccggcggaactgctgcgcagcgagctatgggtcgccgaggttatctactttccgctggaaaccgagctcctgcgccaggcccgcgccctcggctgccggaccctggacggcggcagcatggcggtgttccaggcggtgaaggcgttcgagctgttcagcggggtaaaggccgacgcggcgcggatgcaggcgcatttcgccagtctcggcgactga

SEQ ID NO: 344940 - DNA, 447 bp, Pseudomonas aeruginosa
atgacgcgcacggtactggtcctgaacggtcccaacctgaatctgctcggcacccgcgagccacgcacctacggtcggcagacccttgccgagatcgccgcgcaatgcgcggccttcgccgaatcacgcggcttcgccgtggagttccggcagaccaaccatgagggcgagctgctcgactggatccaccaggcgcgcggccggatcgccggcatcgtcatcaacccagccgcctggacccacacctcggtggccctgcgcgacgcgctggcggcggtggagctgccggtactcgaggtgcacctgtccaacgtgcaccagcgcgagccgttccgccaccactcccacgtctcgccgctggcgaccggggtgatctgcggcctcggcggccttggctatcgcctggccctggaatacttcgccagccagttcgaggccgccgcatga

SEQ ID NO: 344941 - DNA, 447 bp, Pseudomonas aeruginosa
atgtcatccccgctgcagttccgccgctacactcccgccgaccgcgacgccaccctggccatctggctggaggcctcgcggatcggccacggcttcctcggcgaagccgaactgcagaagcagaaggcgctggtgcgcgatcactacctggacgcttcggaaacctggctggcgctggacggcgaaacgccactgggcttcatcggcctgctcgacgccttcatcggcggcctgttcgtcgcaccggcggcccacggccgcggcatcggccggcagttgctggaacatgccgcggccctgaagggcgcgctggaagtcgaggtctacgccgccaaccgcgaggcgctggggttctatgggcattgcggtttcgtcgaaaccggccggcgcaaggaggacgacgagggacggccgctggaaatcgtccacctgcgtcgcggcgattag

SEQ ID NO: 344942 - DNA, 642 bp, Pseudomonas aeruginosa
atgaacgactacatcgcccgcctgcgcgcccgctacgatgagcatttcggctgcgcgcccgccatgacgctggactgccgcggcttctggaaacactgcgcggcagtgccggacatggccgtcttcgcctatcgcctggagaacagccggcgggcgcaccacgtggcgatcaccgccgggatgagccagcgccccatgcacttcgcgccgtacatgggcaaggcgcgctggtcgaccgaactgatctgctacctggatcacctgggcggcgaggacctccgccatctgcagtggctggccgggatgccgttccacgaccagttggcgctcggtcgcgggcacagcgtggcgttcggcttcccgctctacgaatacagcctgctgcggcacttcctcctgctcggcacccccgaccgcgaggacgccggcctgttcgacggcttcgccgactccgcctacccggtcgacctgctctgggtggtgccgctgaccgagcctgaataccaggtcaaggtgaggaggaacctggaaggcatcggcgcgctgctaagccagtccgcccatccgctgagcctcgaccgccaccgtcattgctacgtgaccggcgagcgcccggagggcctcggccgggtcctgcactga

SEQ ID NO: 344943 - DNA, 450 bp, Pseudomonas aeruginosa
atgaacgagaccaacgcactggggctgccgcgcggcccgctgaacctgatgaccgagatcgtgcgccagcgcgagcggcagctgaccgccctgctcgccccgctcggccttggcctgcacgaatggcgcgcgttgcggatcatccatgcgttcgacggcgacgtaccgatgagcctgctcatcgaacattcgcagaccgaccggaccgcgctgggccgcaccatcgaacggctggtgcagcgtggctgggccagccgcctgccggatccggaggacggtcgtgccgtgctggtgcgccgcagccgcgcggcacaggcggtgttcgaacaggccctggaacgggtcgcgcgcctcgacgaggcgctgctggcaagcctggaggcgggcgaggacggcacgctggccgtcgccctgggaaaactcctgcgcgccttggacgggcgttcctga

SEQ ID NO: 344944 - DNA, 408 bp, Pseudomonas aeruginosa
atgagactgtcccgaacgttcgcctgcctgctgtgcgcggcgctgccggccctggccgcggcccatgatgcggaaaaggtcgtgaccctgcgcgaccagccgctggcggagccgcccggctatcgcggattgatgctgaccgtgtcgttcaagcccggccaggtgtcggcgccgcacgtgcaccccggcccggtgttcgtctacgtcctcgaaggcaccgttcagacgcagctggaaggtggtccggtggagacctatacggtcggccagagctggtacgaaccggccaacgtggcgcacgtgctggcgcgcaaccccgacccgatgaagccggccaagctgctggtctgggaactgctcaaggacggcgagccggtcctgaagcccctgtcgcccggcgcccactga

SEQ ID NO: 344945 - DNA, 285 bp, Pseudomonas aeruginosa
atgagcgccagccaggtgattcgcatccgtgcgcgcaagggccagtccgaccgtctcggcctgcgcctgcggcaattgtccggaccggggcgggaggcgccgggatgtctggacttccaggtgcgcagggatgcgctcgaagcggacgtctggctgatccgcagtcagtggcgggagctgcagcagatgctcgactacctcagcggcgagatccagcaggtgttcgccgaggtgctctggcgctcgctggcggcgagcctggaggtccgcgacgaggaaggctag

SEQ ID NO: 344946 - DNA, 753 bp, Pseudomonas aeruginosa
atgtccgtcgacctccacgccctgatcccgctgatcgccctgaccttcctcctcgccggcttcgtcaagggtgtggtcgggctcggcctgccgacggtctcggtgggcctgctcggcctggccatgccgccgatgcaggcggcggcgttgctgatcgtgccgtcgatggtgaccaacctctggcagctcgcctgcggcccgagcttcctcggcctgatgaagcgcctggccggcatgctcctcggggtggtcgtggacaccctgctgatcggcgcctggctcggcggcgacgcgccacggcaggccaccggcgtgctcggcctggccctggtggtctacgcgctgctcggcctggcggcgatcgccctgcatctgccggcgcgccacgagcgctgggtcggcccgctggtgggcctggcgaccggagcgctgacggcggtcaccggggtcttcgtgattcccgcggtgccctatctcggcgccctgggactgcagcgcgacgaactggtccaggccctcggcctgtcgttcagcgcctcgaccctggccctggcggtcaccctcggcgtgcacggcgacctgctcgaaccgcagatgctcggcgcctccctgctgaccctggtcccggcgctgggcgggatgctcctcggccagtggctgcgccagcggatcagcgcgacgctgttcaggcgctgcttcttcgtcggcctcctgctgctgggcgccgacctggcctggcgcggcttccactga

SEQ ID NO: 344947 - DNA, 312 bp, Pseudomonas aeruginosa
atggaagtcaaattcagccgctatgacacggcggactatctcaagaccgaggacgacattacggcctatctcgatgccgtgatggaggacggcgacctcgcactgatcgcggcggcgcttggagacgtggcccgcgcccgcaaccttcgccagcttgcccgcgacgtgggaatgagccgccaaggactggacaaagtcctttcaggcgagggcgacccgagcttcgcaaccgtggtgaaagtcgcccaagcgcttggtctgcggctctccttcaagccgactgacggcgggcccgctccggccgctcattga

SEQ ID NO: 344948 - DNA, 375 bp, Pseudomonas aeruginosa
atgagcgaagtgatggcaccaaaagaaacggcggcgcggcggcgtggtaagcccatagaggtctgggtaacggatgaggaaaaagctgccattacagagctagctgaccaaactggcttgtctcgttccgcttacctgcgcgccgttggtctgaacagaccggtcggagcacgggccgatcttgaggcggtgcgcgagttggtgaagctgaatggtgatcttggccgggtagccggcctattgaaactctggcttgcggaaaaacgcggccaaggtgcaaatcccatagatgtcgagcggatgatgatcgaattccgcgaattgcaggcaggaattcgagagcagatgagcgctatcgtctttacccggaaatga

SEQ ID NO: 344949 - DNA, 795 bp, Pseudomonas aeruginosa
atggaaagagaatcgagaaaatcggcagcgggcgctgcccggaaactcggccgaggcgcggcgctagcgctggcaatggcaagcacgggtcttggtgtaagtctctacatggcaccggccccggcttacgccatctactgctcgaactgctcgacgttctatcagcaaatgttcgagtacgccgaggcggtcaccacggcgctgaacactgccgagcaactgagcacgcagattcagcagtaccaaaacatggtcacgcagggcacgggcttgccagattcgatgttcggcagcatcgcggccgacctgaaaagcgtggtgaacatctacaaccgctcgcaggccttgggccgccaaatccagaacatggatgcgcagttcaacacggcgtttcccggcttcgagtcctacctgaatcaagcggcgaactcggcagaggtcccggcgcgggatcggtacaaaaagtggtcagaacagggccgcgacaacgtgagaacagcgctggaagcggcgagcctcaataccagcacctttgagtctgaggacgcgcagctagaccgcatggtggctcgctcgcaatcggccgtgggccggatgcaagcgattcaggcgggcaacgaaattgcctcgcagaacgtgcagcagctccagaagctgcgcgatctgctggccacgcaaatcaacatgcagggcaacttcatggctcagcagggcgaccggaaggctgccagcgaagctgccgaacagcagtttgaagcgcgcaaaaacacacgcggcggcgtgaaggggtactga

SEQ ID NO: 344950 - DNA, 1080 bp, Pseudomonas aeruginosa
atgactagcaggcacagcggtccccagtcgataggcgccgtgctaggcgaattgggaggcgcgctggatcgccttggtgaaaacatccggagacgaaacagggaacgcatcgaggcggcagcgctccccggcgagacatacgagcacgttgccgctcgcttgcaacgcgaagcagaccaagaacgccgcccggcagctcttagttcacaaccggcgacccttgtgcgcaaaccgcccaagggtgacgagcagtcagatttcttcgctccaacgctctatgacgtaagcacccgcgacagccgcagcgtcatggacgtggccgtgttccgtctatccaagaaggataagcgagccggtgaactagtccgctatgacctaccggatggatacgtggaattgtccgcaggcgcgcacggtatggcctcagtgtgggactacgacattgtgctgatgctggtgtcccacctgaccgaagctatgaaccgctatcgagaaggaaagggcgacaagccggggagagtattccggccgcatgtcagtgacattctcaaattcgcccggcgcggtgatggcagccgtcaggttgaagaggtggaggccgcgctagatcggttgcgaggcacgaccatcaagaccgtacgcgaaaacggtaagttccgcacaactgaggccgaagggttgattgcgcgctatcgtgttctgtcccgcacggacaccaagaggatcagctcggtcgagatcgaagccccggagtggatttaccgcgaggtggtcgatggcaagcgcccggaggttctgactgtgcacccggactacttcctgatcgaaccgggcattggccggtatctgtatcgtcttgctcgtagggctgctgggcgtacagaggccaagtggagctttgccacaatttacgagcgcagtggttcgacggggacgctcaagaagttcaccgagaacctgcgaaagatcatcaccgcgaatgacctgcccgagtacatattgacggaggaatccggacagagcggcccgcagctcatcatgaggcaccggaacgtgcaggcagattctcccggtccctaa

SEQ ID NO: 344951 - DNA, 231 bp, Pseudomonas aeruginosa
gtggaaaatgaattcaggaaagcgagcaaagttctcatcagcaaaaaacaattgctgtcaataatcccgctgagcgagcgcacgatctacaactttgaaaagcaagggaaattcccgcgtcgcattgcgctcagcagtcgcaaggtcgtgtgggatttggccgaggtcgaggcatggattgatacgtgcaagcattccggcccggcccctcgtcccggaatgggggcctga

SEQ ID NO: 344952 - DNA, 453 bp, Pseudomonas aeruginosa
gtggcgaccactctgaaacgacaaggcatcggtgcatggctggggttgttcgccatgctgatgatcttcgtcggcccgctgatctcccagtcgatgccgatggaccatccgatgccgatgggcgcggcgatgggccacgaaggcatgtcccacgagggcatggacggcgctggcggggagcattgttccgacgtccagcgttccgccgcccttcacgcaggcatgccggggatgggcgacggcaatcgcctggccagcgacgtgctctgggagaagtgcggttattgcagcctgctgttccacagcccgccgctcaccgaagacgccagcctggcgctgttctgcgtgcccttcgcggcggcgcccgtcgtcgccctcctcagcgaggcgttcgtcgcctcgccggtgtttcccggcgcccgcacccgcgcgccgccgtacctgatcgcctga

SEQ ID NO: 344953 - DNA, 333 bp, Pseudomonas aeruginosa
atgaccacagaacgttacctgctcgatgaactggaaaccgccgacatgctcgagatcgacggcctgcatgcctggcgcttcgaactcaacgaggcgctgctggaccaggcggacctggccgcggaggccgaccaggcgttcgccagcgaggagtgggtgctggcggtggaaagcctggatggacgcactcgtcgcgactggcgtttttcctacaacgccgtgatggaagccgagccgcaggccgatggtgacacctggcgcatcgcggacaccgggggcgcgcatctgctcaggtgcctgggagcggtcagcgccagcggcgacgacgaatga

SEQ ID NO: 344954 - DNA, 456 bp, Pseudomonas aeruginosa
atgagcagcgataccgagaacccgttccgtccgccggaagcccgcctggacgagccgggcgcaacccagggcgagccgctgtacaggctttccgccatcggcctgggcactttcatcggcacccccctggctggcgccttcctgaccgcggtgaacctgaggcgcctcggccgtgggcaggaggtcggacgcgcctggctggtcgccgtcggcctgttcgtcctgctgctggtactgggcgcgatattgccggagaacatcccctccaccggcttcgcggtggcgcagatcatcggcatggtctactacgccaggtcggccttcggcccggcgctggagagccacaaggccgctggcggcagcttcatttccaactggagggcggccggcatcgccctgctgttcatgctggcggtcctgctggtgatggtgccggtggtgatgctggtggcctga

SEQ ID NO: 344955 - DNA, 324 bp, Pseudomonas aeruginosa
atgaaatcgaagaggagcatcattgctggcgccgtgttcaccatcgtccttcaggggtgcgcggtaaagaacgacaggaccgaactgggcttcatcggactgagctaccacgcggacataaaggaagtcgcggacggtctctatcgggccgaggtcgaagcctctcccgggcgtggacgtatacggggcgccaaagctgctgcctacgaggatgcggtgaagtactgcgaagcgcagagcaaggccgcgcgggtggtcaaggaacggacggactcgcatgtgttgatcaatggcgttgcgcggctggacttttcctgcgcgtga

SEQ ID NO: 344956 - DNA, 1254 bp, Pseudomonas aeruginosa
atgtcgtcactcatactgcgcggggccgcctgcggcctgctgtgcgcctggctgtccgctgccggcgcagccgggttcatcgaagagagcaggctcaggctgcaactgcgcaatgtctatttcaacgagaacttccgtgacgaacacggcatgagcccgcgcgccgccgccaatgccaggagcgagcgtgtcgagtgggcgcaggggctgctgttcgactaccagtccggctacaccgacggttcgctgggactggggatcgacaccctgggcctgctgggcgtgcacctcgattccggccggggccgcgccggcaccggcttgttgccggtacacgacgatggtcgtgcggcggacgagttcggcagtctcggcgcgaccctcaaggcacgactcgggcagacggtgctcaggcacggcaccctgctgccgaagaatcccctgctgatctacaacgatgcgcgcctgctgccccagacgtatcggggtacccaactgaccagcagccccatcgatggcctcagtctggacgtgggctatctggaccgtttcaaactgcgcgattcctccgatagcaccggcttgtatgccgacgctcatgcaggccggggattcggtggcttcgcttacgccggcatggagcgctccgttggcgaacgcctgcgcttgagctacttccatggccaactggagcatttctaccggcaggatttcgtcggcatgcagcatgacctggcattggctggcggcctgctgaccacggacctgcgttatttccgcagccatgacatgggtgcggcccatgccgggggtatcgacaacgacatgttcagcgggcaactgggcttcaggcactccgggcacgtcttcggcgcgggataccagtggctcgatggtgaggcggggttgccctatgtcagcggagctacggtgtattcgttcagcaatgtcggcatcggcaagttcatcggagaggaagagaagacctggatggccagatattcctatgatttcgtggctgcggctgtgccggggctgaccttcatggtgcgctatctgggcggtagcaacggccgttccggcgagcgcggagagaaagagtgggaacgtgatgcggagttggcctacgtggtgcagtcggggcctgtgaaaggactgggggtgaaactacgcaattatgtctaccgttcggatttttcccgagggcgcgacagcaaccggatctacctgacctacgatatcgccctctggtag

SEQ ID NO: 344957 - DNA, 1305 bp, Pseudomonas aeruginosa
atgctcgcacttctgggcctgctcatggtggtgaccttcacctgcctgatcatgagcaaacgcttgtcgccgatcgttgccctgaccttggtgccgatcgtcttcgccgtgatcggcggcttcgcccccgacctcggcaagttgatgctcgacgggctgaaaatggtcgccccgtcggccgcgctgttgctgttcgccatcctgttcttcggcctgatgatcgacgccggcctgttcgacccgttgatccgcaagatactcaggcgcgtcaacggcgatcccatgaagatcgccgtcggcaccgcgttgttgtccttgctggtggcgctcgacggagacggtaccaccacctacatgatcacctgcgccgccatgctgccgctgtacaggcgcatcggcatggacccgatgatcctggccacgctgtcgatgctgtcgctgagcatcatgagcggactcagcccctggggcgggcctgcgacccgcgccatcgccgcccttggcctggatgcctcggaatacttcatacccatgctgccgaccatggtcggcggcgccgcctgggttgtattcagcgcgttcctgcttggccgctccgaacgcaggcgcatcggcaacgtcaggctcgaatccggtggtggcgattgctacatcgaggcgatcctggaggccactccacacaagcgtccgcgcctggcctacatgaacctggcgttggtcatcgcggtgatggccgcgctggtcctgggggcgatgcacgccgcgatcctgttcatgatcggtttcgtcgccgcgctgatgatcaactacccggcgctggagcaacagaagcagcgcatccaggctcactccggcaacgccatgacggtggtgttgctggtattcgccgccggcatcttcgccggcatcttttccggcacccggatggtcgatgcgctggcccaggcgctggtcggctggattcccgacgcctgggggcactggttcccgctggtggtggcgctgaccagcatgccgctgaccttcgtgctctccaacgatgcctactacttcggcgtggtgccgatcctggccaacgcggccgccgcctatggcatcgatccggtggaaatcgcccgcgcctcggtgctgggccagccggtacacctgatgagtccgctggtggcctcgaccttgctgctgatggggatggtcgatcgtgacatcggcgatttccagcgagcgacggtcaagtgggcggtgctgacctcgctggtcatcaccgcgctggctctggccaccggcgcgctgtcctttttcgtctga

SEQ ID NO: 344958 - DNA, 1308 bp, Pseudomonas aeruginosa
atgaaactcgtcaagtcgttgtacttccagattctctgcgccgtcgtgctgggtgtgctgatcggtcatgtatgggcggaccaggcggtcgcgttgaagccgctgggcgacgccttcatcaagctggtcaagatgatgatcgcgcccgtggtgttctgcaccatcgtcaccggcatcgccggcatgaccgacaaacgctccctgggatgcctgatgggcaagacgctgctgctgttcctggtgctgaccgtgatcagcctggcgatcggcctggcggcggtctccctgttccgtccgggggacggcatgaatatcgacccttccaccctcagtaccgagggacttggccagtacgcggcctcggcggccaggctgagcgtggtcgactttttcatgcacatcattcccgcgacctttgtcggtgcgttcgacaagggcgaggtgctgccggtgctgttcatcgcggcgctgtcgggattcgccctgtcgtcgctgggcgaaagggggcggccgctgctggtggtaatcgagtctgcttcgcagatggttttccgtatcttcggctacctgatgcgtttcgccccggtcggcgccttcggcgccctggcctttaccgtcggccagtacggcatcagctcgctgggagcgctggccaagctgatcggtaccctgtacatcgcctgcgccttcttcgtgctggtggtgctgggcggtatctgccgggcccacggcttcagcctgtggaagctgctgcgctacctgcgcgaggaattcctggtggtgctgggcacatcctccaccgagccggtgttgccacgaatgctggaaaaactcgaggtgctgggctgcagaaagggcgtcgtagggttggtgctgcctacgggttattccttcaacctcgacggcacggccatctacctgtcgctggccgccgtcttcatcgcccaggcctgcgacatcgacctgacgctgggtcagaccatcaccatgctcgccatcatgctgctctcgtccaagggggcggccggggtgaccggcagcggtttcgtcgccctggcttcgaccttgacggtcatccacgacattccgctggcggggctggcgctgctgatcggcatcgatcgcttcatgtccgaagcccgggctctgaccagcctggcgagcaacgcggtagccaccgtggtgatttccctgtcggaaaatgcctgcgaacgggaaaccctggtgcgcgtcctggatggttctgcaccgatggtgtcgaacgggctcgaggcagactggtcgagcgaacctcagcgcaacgcctga

SEQ ID NO: 344959 - DNA, 1080 bp, Pseudomonas aeruginosa
atgcaacgaatcccttgtgtcctgatgcgcggcggtacttccaaaggcccgttcttccatgcccgggacctgcctgccaatatcgctgagcgtgacgagttgttgatcgacctgatgggctcgggccacgagctggaaatcgacggaatcggtggtggcagtccgcaaaccagcaaggtagccatcgtcagcccgtcgccgcaccccgaggccgatgtcgattacctgttcgtccaggtgatggtcggccagcgccgggtcgacaccgcgcccaactgcggcaacatgctttgcgccgtggggccgttcgccatcgagcaaggcctggtcgaggcccaggctggcaagacgctggtgcgtatccgtaatctcaataccaacaccttcgtcaatgcgctggtcgagacccctggaggggtggttcgctacgaaggccgcacggcgatcgatggcgtgccaggcacggccgcccctgtgctgctgaccttccttgatgcggtaggcagcaagacgggcaggctgttccccaccggcagcgcgctggacgtgatcgagggggtggcgatcacgtgcatcgatatggctatgccgatgatgatcgtcgaggctcgccagttgggcgtctcaggctcggaaaccccggcctggctggatgccgacacccgcctgttgcagcgcctggaggcactgcgcctgcgggcgggcagggcaatggggctaggcgatgtcagtggcatggtcattcccaagccggtgctgatttcccctccgcagcacggcggtaccctccaggtgcgctacttcatgccgcacaactgtcatcgtgcgttggccattaccggggccatcggcctggcgaccgcctgcgtcagcccgggaagcgtggccatgcgcatgatcggcgatagggcctgggacctgacagaggttcgcctggaacatccctgtggcgtgatcgacgtggcactttcacgcagcggcacggaaggacagacgatccaggcttcggtcgtgcgtaccgcgcggcgccttttctcgggcttcgtctatgtatcgagccagcgcaagctggctggctga

SEQ ID NO: 344960 - DNA, 894 bp, Pseudomonas aeruginosa
atggaatatgagctgcaagatcttaaatctttcgtgaaaatcgcagaactcggcagctttcatgaagctgccgacgcgcttcacctgtcccaaccggccctgagtcggaggatgaagaaactcgaagaagggctaggcacgcctctcctcgatcgcactacccggcgcgtcagcctgaccagcgtcggccgtgactttctgcccaaggctcgccgcctgctcgacgacttcgaagactcgatcctcagcattcgtgaactcgcggagcgccagacggggcaggtcacccttgcctgcatccccacggcggccttctacttcctgccgtccgtgatccgcctctacaacgagcaatacccgaaaatccgcatccgcctgctggatctgagcgccaacgatggactcgagtccgtattgcgcggcgaggccgacttcggcatcaacatgatgagcggccagcaccctgacatcgaattcgtccccctggtccaggaacacttcgtgctggcctgccgacgggaccacgagctggccgggcgcgcctcggtgacctggaccgaactggccgactatcgcctgatcggcgtaggccggctcagcggcaatcgcatgctgctcgaccacgcgctctccggcctcagttggcgccccaaatggttctacgaggtccagcacctgtccacctcactgggcatggtcgaagctgggttgggcgtctcggcgatgcccagcctggccatgccagcggatgaccacccgaccctggtcagcatcccgctgatcgaaccgcaggtcacacgcaccctcgggatggtctaccgccgtggtgcttcgctctcgcccgccgcggaaaagttcgtttcgattctcctggaaaaatggtccggcgactga

SEQ ID NO: 344961 - DNA, 654 bp, Pseudomonas aeruginosa
atgcaggggagccagcctacccggcggagtgacgttgcgtcgcatgccgctgccgtcgccctggactcgggcaagttccgggaactcctgctgcggtatgaattgcaatgcctggacgatgaatggaaaggctggtcgcgcaagtaccgcttccgttgccggcaaggccatgtcttcgacaggagcgccgatgcgcttgcccgcgccaggaccgacgcctgcccgacctgtgcgacggagctgcgcaaccggcgcctgtccgatgccacccgcgcggcgggaataacctgcctggaagcgggttggcttggaagcaaggcgggccatcgctgtcgatgcccggccgggcaccattggttgcggacgggcgagcagttgcttcggcgggcgcaatgcccccattgtcatcgccagtccacgcaggaccacaggttgcagcagctcgaggcccaggctgcccgccacggcggggagtgcctggtcgacagcttcgccgggctgaactggcgctattcgttccgctgtcgccagggccatgaatggaaagccatgggcgcggcggtgttgcgcgggtcctggtgcccggtgtgcgccagggagcagcggctgctgaaggcgagtgggacgcggaagaggaaagcgtcctccgcataa

SEQ ID NO: 344962 - DNA, 378 bp, Pseudomonas aeruginosa
atgacaaggacaggatgttcggaatatgcatggggcttctgtattgcgctgttcagccagctttgctgggccgattcttcgttcgacctgggggaattcagtgcgcaggctaccttgggaacgacattcgttccgcccttgttgacgacgatggggtccggctatgtgagcgatacccggccgttcgaaggaatgttcgtattcaagaaatacgcgtatgcccgcgaggacgccgccgccttcgtggcttcggcgggtgttatcgacggcgcgcagttggagcgtgcctggcgcgactatcttgccggtgtccctggacccaggctggaacggaaagctttcgcggcgggcgtgctggcctggagcgcagcggagtga

SEQ ID NO: 344963 - DNA, 558 bp, Pseudomonas aeruginosa
atgcgaggttggatagtggcggcttgcatgctgctcgcggcgctgggagcccaggccgaaggcagccggccagtggcgtcggggcccgaggtggaggcgcggttgctcgattacctcttcgacgccgcccggcgtggcgaccaggccatgctgaaggagttcgtcgaggccggtttcgatctcgatgcgcgggacgccaagggttataccgcgctgatcctggccgcctaccacggccatggcgaggtggtggagcagttgctggaggccggcgccgatccctgcgcccaggacaagcgcggcaataccgccctgatgggcgcgatcttcaagggtgagatgcgcatcgcccggcgcctgatcggcgccgagtgcagcccggaccagcgcaacggcgcgggccagaccgcggcgatgtacgccgcgctgttccagcgcgaggagctgctccaggcgttgtcggcgcgcggcgccgaccttggcgcccgcgatgccctgggcaacagcgtggaaagcctgcgacgcggcgagctgaacggtactgcgccagcgaagtga

SEQ ID NO: 344964 - DNA, 480 bp, Pseudomonas aeruginosa
atgcgggaactggcggagctggcgggagtgagcagggcaaccctgaaccggcattgcggaacccgcaaacgactcagacggcgcctggaaagccatgccaggagcaccctcgagcgcctcatccgcgacgccgcccagccccgactggagccgcgggcagcgctacgcgaactgatccgggaacacctcgcgcaccgcgacctgctggcgctgctgatgtgcgagcagaacccgggacaccaggccgggaatgaagacgccggttggcaggcgcatatcgaggccctggatgctttcttcctgcgcggccagcaggcgggcgtgttccgcatcgacatcagcgcggcggtcttcagcgaactgttcatcaatctggtctacgccatggtcgatgccgagcgccgtggtcgcgcggccggcgccggattgtccggcagcctggagcaactgttcatgcacggcgcctcgcgcgtcccctag

SEQ ID NO: 344965 - DNA, 1374 bp, Pseudomonas aeruginosa
atgcaacgcttgaaactctggctgcagcggcaacggcaggcgccgttcacggacacctggaccgagcgtcaccgccgcgaggcgctggggctggtcgaacggcgcctgtgggaaaacgacgtcgactgggtcgaactcagccgctcatgcaatggcttcgtgcgcgaggccgcggtgctcgggctcagcgcgagcaacgacgcggaggcgctggcggcgctgatcgagcgggccaacgactgggtcggtccggtccgcgccgcggcccgggagggcctggaacgctacctggtcagcgagtgcgtgccggccctgctcggcgcgctgccgcagtgggttgccctgggccggaagaaccgggtcgaccatggcgacctgctggatcggctggccgtcctgctggcaggtgccgaacaccgtggacaggtcctggaggccctgcttcgacagcgctccgccagcgcgcgcttccttctggaggtcctgctgcggcctggacagagcggccggttcgaggtgctcgagcgggcgctgtccagcccggatccgagcgtgcgccgccaggccctgcacgaggccgcggcgctgccgccggacagcgcgatccgcctgctggaaagcggactccgtgaccacggcgccagcctccgggcccaggcgctgcacctctatgaccgggccctgggagccgagccgctgcctgcggcggtccaggcccgggcgctgctcgatgcgtcgcccagtgtgcgcaacctggcgctgtacctggcgaaagccgccggaaccgacgtcgacgccatcctggccgaacggctcgcctggatgccaacgaccaaggccgagtggctcggcctgctcggtctggcccgcgaccgccaggcccaggcggtcgcgccgctggcccggcaggcattgcgtcatcccgcgcagcaggtgcgtggcgcagcgctggacacccttgccgcgctgccggccgaggacctcgccgacgcctgcctgcaggccctgcgcgatccgtccggcaaggtcttcgccaaggccgcgcagtgcctgcgcagcgccgcgccagggatatgcccgcaacgtctggacgaggtcctgcggcagctgctcgaggacgcggcgtacgggcgggccgatcgcttgctcgcgctcaagccttactggcagcaactcgactacctgctgcagacgcgcccggagctggccgcggacgcctggcaacctctgctgttcgcctggcgcgagcggcgcagcggcgccatcgactacgccacgtcgccggctcgacgcgaagagctgctggaacatctccaggcattgcaggaacaggggctgctctcccggcagatcgtcatcgatgcgctgcgctga

SEQ ID NO: 344966 - DNA, 300 bp, Pseudomonas aeruginosa
atgaacatgcaggatctcgccggccgggtccaggccggacatatcgacgccttgcacctggtttcgctggagggcggcatctacgtgctggaggcgcagatgggcgaccgtgcctatccggtggaagacgagtccggccggccgctcagcctgcgttcggtggagcatgcgcggcaggtgctgcgcgggatggcgcgggtaccggtggagctggtgcgtgccgacgtccacgacgagatgtgtggcttgctggtcgagccgggcgctctcggctggctgccgctgtcgatccgtcactga

SEQ ID NO: 344967 - DNA, 348 bp, Pseudomonas aeruginosa
atgaaaacgctgtctctgctgctggccctggcgctgcccggcctgagctgggccgaagagcccaggaccttcgaaggcgccggcgtggtcctcgatgtacaggtcgagaagaacctggtggacattgatcacagtttctaccgcctgcccaacagcaccgctcagaacggcatgcccagcctgttccaggtcaagccgggctcggtggtgtcctactcgggcgtcgtcagccagccgttgtccaccatcaccagtatctacatccacagacagatgagcgaacaggagctggccgagatgattcagaaggaaaagcccctccaggccggcgaggagcaatcccgatga

SEQ ID NO: 344968 - DNA, 507 bp, Pseudomonas aeruginosa
atgtcataccgttccagctcggccggcttcaccctgatcgagctgctgatcatcgtcgtcctgctggccatcatggcgagcttcgccatccccaacttcaagcagttgaccgagcgcaacgaactgcagagtgccagcgaggaactcaacgcgatgctgcagtacgcccgcagcgaagccgtctcccagcgccgcgcgatcagcatccaggcgctgaaggaccacgactggggcaagggcctgagcatcggcgtcctcgactccggcacgatcgccgcaccgctgcgcaagcacgacggctttcgcggcgccacgctgacagccagggaagagagcgccatagccgaactgaccttcacgcccaacgggaccctgctgccgcccacggagcggaccttcgccatctgccagaacggcaaggccgagggcggccgcctgctgcgcatcagccaggccggacggatccaactcgaaccttcctccaaggcaccgccgtcatgctattga

SEQ ID NO: 344969 - DNA, 510 bp, Pseudomonas aeruginosa
atggtcgaaaggtcgcagagtgcgttcaccctccccgagctgctgctcacgctgacgctactgggaatcttggcaagccttgcgctgcccgggttggagggctggctggctggaaaccgccagcaggccctgctgcacgaactgagcgcgagcattcagctgggccgcgcgcatgccgtcacccatcgacgcccggtggcgctctgtccttcgagcgatggccggggttgcggcggcgactggggacaaggctggctgctcgccgaagaggacgctggcctggtgctcgcccggcgccagttgccgacgccggaagcgatccgctggaaccgttcgaataccctgcgcttcctccccagcggccagctcaacgtacacaacggccggtttctgctctgcgggagaaacggcgtcgcctggcaactggtcctcaatcgccagggtcgcctccgcgccgcgaccgcgcaggagaaccgggagaaacgtgagctatgcggcacttcggaatga

SEQ ID NO: 344970 - DNA, 729 bp, Pseudomonas aeruginosa
atgagcggctggctgagccccgactggccggcgccggccaatgtccgcgcctgcgtgaccacgcgcggcggcgggatcagccaggcgccgttcgacagcctgaacctgggtgcccatgtcgacgacgatcctcgggccgtggcggagaatcgccggcgcctcagcgaacgcctggcctgccggccgagctggctcgagcaggtgcacgggaccacggtggtggaggccgacccgggccggctaccgaccgcggatgccagctggagcgcgacgcctggcaccgcctgtacgatcatgaccgccgattgcctgccgacgctgttctgcgaccgcgccggcacccgcgtggccgccgcccatgccggctggcgcgggctggcggcgggcgtgctggaggcgacggtggacagcctgggcgtgcccggcgacgagctactggtctggctcggcccggcgatcggcccgcgggccttcgaggtcggcggcgaggtgcgcgacgccttcatcggcgcgcacgccgaggcgcaggcggcattcctgccgagtgccaaccccgggcgcttcatggccgacatctaccacctggctcgcatccgcctggccgcccatggcgtcaccgccgtgcatggcggcggtttctgcaccttcagcgatagcgagcgcttctattcctatcgccgctcgtcgcgtaccggccgtttcgccagcctggtctggctccagggctag

SEQ ID NO: 344971 - DNA, 2040 bp, Pseudomonas aeruginosa
gtgcgcgtgaccctttccggcgccggcgccggctaccgtgccaacggcgaggactaccgggtgatccagaacctcgcgcagctgcgcgagatcgaagccgacatggacggtcgctacgtgctcggcaaccagatcaaggggggcaacacccgcttccgctccctgggcaacggccaatccttcaacggcaccttcgacggcctgggcaacagcatcagcgacctctccgtctacgacaccagcgcctatgtcggtctgttcagcgtcaacaacggcatcatccgcaacctcaatctggaccatgtctgggccagcggggcgcaatccagccactacaatacccaggtcggcaccctggcgggcctgaacaacggcatcatctccaacgtcaaggccagcaacatccgggtcaccggagcctcgcacctcaacagcctgggcggtctggtcgctctcaacctgggtagcatcgacggctcctcggccagcggccaggtcatcggtgacggcaacacctacgccatgggcggcctggtcggcgaaaacatcagcgaacggcgtgtcgccaccatcaccaacagccgagccgatgtcgccatgagcggacggctgctcgacaattacggctaccacggagccggcggcctggtcggcaggaacaccggccgcatcgccgacagccagagcgcgggctcgctccgcctggctggcgacaacctgaacctcggtggcctggtggggcgcaacgagggtggcagcctggtcaacgtcgaatcctccgtgaatgtgacgggacagggcaacggcggtctgtacggcggcctggtcggcctcgaccagcacggcgatatcagccgcgccaaggccaccggcaaggtcagcggcaacggtagcgaagcgatcggcggtctggtcggcaagagcctggacagcgccatcgtcgacagcagcgcgacgggcgatgtatccgatctgcgaggccgctacctgggaggcctggttggctacaaccggggaggcagcctgaccagagtcgcagcctatggcaaggtgaccgctggcgccggctcctacgtcggcggattgctcggctacaaccgcgacgcttcgctgaacagcgtccaggcaagcggcagcgtggttgccagcgcctcccaggcgatcggaggactgatcggctggaaccaggacagttccatcaccggcgctcgcgccaccggccatgtgagcgacaagcaaggccaatacctgggcggcctgctcggctacaacaaaggaggcaaccacaccggcctttcggccagcggcaatgtcgatggcggcctcaacagccggatcggcggcctgatcggcagcaaccacaacgccaacctgagcgacgcccacgccgagggtgacgtcagcggcgacggcgcccaggcgatcggcggcctgatcggcctgaacgaaggcggcgagctgcatgacctcaaggccagcggcaatgtgaccggcaagggcgcgcagaacctcggcggcctgatcggcagcagcaaagccgccaggctgcgcaacgtgagcgcaagcggcaatgtctcgggaggtaccacctatggcctgctcggcggcttgatcggcaacagcgaggacgtcctcatcgccgatgccaaggcctccggcaaggtcaagggcgacgcctacacctataccggtggcctggtcggcatgctcggcaggaaaacgaccctggaaaacagctcggccagcggcgaggtggaaggcggctacgccggctatgcgggcggcctggtcggcctgaactcgggcaccatccgcaacagcgcggcatccggcaaggtgcacggtctcagcagagccctgggcggcctggtcggcttcaaccagggatggatctacggttcgtcggccagcggcaggatcgtccccgccttcgaaggacaggcctatggcgggctcatcggcatgaacttcggcacccagtcgcagaacgccctctacggggaggccgccaaggcgccctggatcgggcttggccgctaa

SEQ ID NO: 344972 - DNA, 210 bp, Pseudomonas aeruginosa
atgctcatcttcggtgccgcgccgaggccggcgaccgacgcggtgttgacgatcgcgccgccgccctgggccagcatcagcgggatctggtgcttcatgcacagccagacgcccttcacgttgacccccatgatggcgtcgaactcggcctcgctgccgtcggccagcctgccctgctcgatctcgatgccggcgttgttgaaggcatag

SEQ ID NO: 344973 - DNA, 1737 bp, Pseudomonas aeruginosa
atgccactcgcccgctgggtccccggactcgacagcctgctccactaccgccgcgcctggttccgcccggatctccaggccggcctgtcggtggcggcgatccagatccccaccgccatcgcctacgcccagatcgccggcttcccgccccaggtgggactctacgcgtgcatcctgccgatgctgatctacgccctgatcggcagttcacggcaactgatggtcggtcccgacgcggccaccgcggcgatggtcgccgccgccatcactccgctggcggcgggcgatccccagcgcctggtggacctgtcgatgatcgtcgcgatcatggtcgggctgttctccatcgtcgccggcctggcccgcgccgggttcatcgccagcttcctctcgcgaccgatcctggtcggctacctcaacggtatcggtctgagcctgctggtcggccagctgggcaagctgttcggctacgaggcggccaccagcggcttcgtagccggcatcctggcgctgctggagaacctgctgcacctccactggccgacgctgatcgtcggcagcctctcgctggcggtgatggtgctgctgccgcggcgcttcccgcagttgcccggcgcgctctgcggcgtgctgctggcgaccgtggcgtcagcggcgctggggctcgaccgtttcggcgtcgagctgctcggcgaagtgccggccggactgccgcacctgagctggccgcagaccaacctggaagaactgaaaagcctgttgcgcgatgccaccggcatcaccgtggtcagcttctgcagcgccatgctcaccgcgcgcagcttcgccgcgcgtcatggctacagcgtcaatgccaaccacgaattcgtcgccctcggcctggccaatgtcggcgccggggtttcccagggcttcgccatcagcggcgccgactcgcgcacagcggtgaacgacatggtcggaggcaagacccaactggtcggcatcgtcgccgcgctggtgatcgccgccacgctattgctgctgaacaggccgctgggctgggtgccgatgccggcgctcggcgcggtcctgctgctggccggctggggactgatcgacgtgcaggcgctgaagggcttctggaagctcagccgcttcgagttcagcctgtgcctgctgaccaccgtcggcgtgctcagcgtcggcgtgctgccgggcatcttcgtcgccgtcagcatcgccgtgctgcgcctgctctactacacctatcgtccgagcgatgcggtactcggctggatgcacggcgtcgacggccaggtcgagctggccaagtacccgcaggccagcacccttcccggcctggtcatctaccgcttcgacgcgccgctgctgttcttcaacgccgactatttcaagcagcggctgctcgccgtgctggagcgcaccgagcagccacgcgcggtactgctcaacgccgaggccatgaccaacctggacatcagcggcctgaccaccctccacgaggtacagcagatcctcaaggcccagggcgtgcacctgtcgctggcacgggtcaccggacagaccctggacctcctgcaacgctcgagcatgctcggcaagatcaagccgccgctggtgttcagctcggtgcgttcgggcgtcagcgcctaccgctactggctgcgccagcaggccaagctcgccggcgcgacggcacagccccaaggcgaaacggtttcaccgccggcgtga

SEQ ID NO: 344974 - DNA, 747 bp, Pseudomonas aeruginosa
atgaacatcgaagaggtcctgcgcgccgtttccaccccgctgggcgacggcgccgcatatcccggcgggccgtaccgcttcttccgccgcgaatacctgaacatctactaccgcagcgatcccgcggcgctgcgccgggtggtcccggaaccgttgcgactggacggcgcgctggtgcgcttcgagatcatgctgatgcccgacagcgtcgggctggggcgttatgccgagggtggccaggcgatccgggtgagcctcgatggctgccatggcgagtacctgcatgcgatgtatgtcgacagcctgccggccatcgccgccgggcgcgaggtcagcgcctacccgaagaagctcggcaagccggccctgtacgtggactccgataccctggtcgggagcatcgactatggcagcctgcgcatcgccaccgcgaccatgggctacaagcaccggccgttgcccagggacgaggcgctggcggcgatcggtgtggaaaccttcatgctcaagaccatgcgtggctacgacagccgcccgcggatctgcgagctggtgcggacccggatcagcgacatccggctgcacgaggcctggaccggcccggcgcgcctgcagctgttcgcgcatgccctggcgccgatggcggacctgccggtgctggaagtgctcggcgccagtcacctggtcgccgatctcagcctggagatgcccgccctggtctacgactatctggcgcctccgggctga

SEQ ID NO: 344975 - DNA, 930 bp, Pseudomonas aeruginosa
atgcggcgcctccgtcatccccgccggctgctctcgattctgctcgtgctcctgctctgcgctttcacccacgccagcgaggcggcacaactgatcctcgtcagcgccaaccagggtgccgcgctgggcgcctttcgcgacgccctggcgcagcgccggccgcaggaccgggtcgaactgcgcacgccggccgccttgccggacggcagcgccttcgccagcgacacccgcctgctcctgctcggcccggaagcgctggcctggcgcctgcaccagcggcaggcgccgccgaccctggccttgctgctcagccgggtcgacggccaacgcctgctgcccgcagccaacgaccgtcgcgggcacagcgtggagggcctctgcgtactctggagcgatccgccggcggcgcgccagctgcgcctggcgcgcctgatcctgccgggcatacagcgcatcggcgtgctctacggcaaggacagcgagtttcttctcgaagagctcaggcgcgaggcgcgcagccagggcctgcaactgttcgtcgccagcagcagcggcaacgacgaccctcgcccgctgcagttcctcctcggcaatagtgacctgctgctcggcatcgacgacaaacagctgtacaactcgcagagcatcaagagcctgctgctcggcagctatgccaagaatcgcgcgctgctcggccccacggccgcgttcgtcaaggccggcagcctggcgagcagctacagcgaccaggaggactggctggacaccctcgacgaactgctcggccagcccccccgacgctggcctcccagcctctaccccgggcacttcaaggtgctcggcaatcggcaggtcgcccgctccctgggcatcgatctggccagcgacgccgaactgggccggcgcctcgccgaaggagaagaaccatga

SEQ ID NO: 344976 - DNA, 825 bp, Pseudomonas aeruginosa
ttgctcgccttgctggcgtggcacgccggggccggtgaacggctggtctatccgcgtcactccgaaggacgcaatcccgaaccctatgtcgtcgaactgctgcagctggccctggccaggagcggcggtgactaccgtctggagcccagcccgcaacccatgccgcaatcgcgcgcgcaactgcgcctggagcaggacgacccgagcctgcaggtgatgtgggcgcagacccgcaacgacctggaagacgccctcctgccggtcaggattccgatctatcgcggcctgatcggctggcgcctccccctggtcagcaccgctcacaaggaactcctggcgcccgtgcgaagcctggatgatctccgtcgtttccgcttcggccagcgccaggactgggccgacaccgcgatcctgcgcgccaacggcctggaggtgaagaccagccagaactacgagagcctgttccgcatgctcgacgccggccgtttcgaggtattcccccgcgaggtggtggtggtcgacggcgagctggaagacgcttcccgcgccgggctgcacctggcgatcgacgagcatgtggtcctgcactatcccgccgccttctatttcttcgtgtcccgccagcgcccggaactggccgacgccatccgtcaggggctggagaaagccatcgatgacggcagcttcgagcgcttgttcgagcgccatttcaagacattgctgggcaagcttgccttacagaatcgaagaatcatcgaactggaaaatccttatcttcctaagaaaactccctttcagcgcaaggaactctggtaccgtccatga

SEQ ID NO: 344977 - DNA, 1230 bp, Pseudomonas aeruginosa
atggatgctttgctgatactgggcggcctgctgctgatggtcgccggctatatctgggtcatcgtcctggccttcggcaccggcctgctgtggggctacggcagcctgctgccgccggtggcgctggcctacatcggcgtgcactggcgcaccgcgcgcaagggcgtggggctcgccgcgctgggctgtatcccgctggtggtcggcctggccctgctggccaaccacgacgccgcgcggctggaggctatcctcagcctgcgctggctgaagccggaagccaagccgccggcggaactggccatagtcctgcgcggcgagttcaacgggcgaccgttcatgccgcagagcggcgaactgatcgatggcgtgctcagcctgcgccagggccatgacttctatgcccagcgcgagttgcagatccgcctgccggcccagccgaccggtccgctgcgcctggatgtgctgccggaggacggcggggcgctaccggaaatcgaactgagctggctgctgccggaacaggacctgcccgaagcccgtcgcctcgcccggggctacaccttgcacctggacctcgagccaaaggcgccgaaccgcctggcgggggagttccacctgagcctgccgagcgactaccgcaccaccctcagcggtcatctcgaactgtataccgaccgcctgcgctaccgttacggcaaggtcgacctcggctacgactccgacgataccgtggcgctggtcctgcgcgattacctgcaacgacgcttcgccaatcgcgatgtcagcctcgtccgggccccctcctggcgcgcggccagccgtgcccgtccgctgcgcgtcgaggcgctggtgggcggccggagcgaggtcctggagctgacgctggagcggaacgcccgtcgggaatgggcggtacgcggcgacgacttcgccgaactgccggcggagcaggcgccagcgctcctggtcgctgcgcccgaaccgcaggtgccgccggcgccgcgcaacgcggagctggacctggagacggtgcaggtcgagcccgagcgctatcgccagcgcctggtcaaggccaccaccttgcgcggacgaatcgccgagggccgcttcaccggcctcgacggcgagggacggctggtgatccgccgggaaatgcccggggcgggggaggcgagctacctgttgcgtccggcggagatcgcccgtctcgagctgctcgagcgctag

SEQ ID NO: 344978 - DNA, 255 bp, Pseudomonas aeruginosa
atgcaatgtcgagccggctgcggcgcctgctgcatagccccgtcgatctcctccgcgctgcccggcatgccgggcggcaagcctgccggcgtgcgttgcgtgcacctggacgaggccaatctctgcgagctcttcggccggcccgagcgccccgcggtgtgcggacgtttcgacgccgatccggagctctgcggcgacagccgcgaacaggcgctggcgttgatcgcacaatgggaaatcatcaccgccgcgtga

SEQ ID NO: 344979 - DNA, 756 bp, Pseudomonas aeruginosa
atgtggttgcgcaagcgttcatgggcctggcgcgtcgcgctgggagggatggccgttgtgctggtggggggctggtgggctgtccgggcgttgcgtgagccggcgctgtggagcgagctgtacgttccgccagccttcgccatgccaagggacttcgacctgggcgcctatcgcctgagctggcgcggcaacggcttcgacctatatgccgccggcgccgcccgcgcaccgctctggcgaagcgaagacggcttcctcggtgcgggccgggagcgcgacggaagcctgttgttgcgctgccaggagcagagcctggaaagtttcgagctgatcggccggcggctggccctcaaaggccatctacgctgcgaagatggccgcctgagcgcctacgaaatgtccttcgagccggtccaggacgcggtggcggtgcgtatcgtcctggccgacgcggaactgaaccgggttgctctgtcctggcggcgggaggagggggagcggctttccggcatcgtcgacgacgacgcggagggcagttcccggaccttgccggctggtgtcgcgggctattggagttccaccggtaacgccttcctcggcgcttcgacggcgccgcagtccatcgacctgcgcgagccgggtcgggtgcagtggcgggccgcggcgcagtcggcgagagcctggttgttcgtcgccgctaaccgcgagcaatggcaattgcggcacacccgcctcgaggcggaaacgcgccgctga

SEQ ID NO: 344980 - DNA, 1362 bp, Pseudomonas aeruginosa
atgaaccaacgtcccgggatggcgctgccatcctcccccgcgtccagtttccagcgctggcgcctgcagatattcgcgatcacctggctggcctatgccgccttctacttcacccgcaaggccttttccgtcgccaagctcggcatcgccgaagatccgggtttccagctggacaagatggcgatggccgatctcgacgccatctacctcgccgcctatgccgtcgggcagttcgcctggggcgtgctggccgaccgcttcggcccgcgcatcgtggttttcggcggcctgctgatctccgccctggccgcgttggtcatgggcaccttcgccaccctgccgatcttcgccacctgcatggtggtccagggactggcgcagtccaccggctggtcggggctgtgcaagaacatcggcagcttcttcgccacccacgaacgcggccgggtgcttggcctgtggagcacctgctacgccttcggcggcctggtcgcctcgccgttcgccggctggtgggcctacagcgtgttcggtacctggcacgcggcgttctattccagtgccgcggtggtcggcggcgtggccctgctgttcctgttgttgcagcgcaaccgcccggaagacgtcggccatcctcccgtcgaaccacagctcgcgagcgaagccgtgcgctatgccggcttcaggccgcaaggcagcaacggcggcagtctgcagatgctcgccaaggtggtgcgcaaccgcacggtgctctgcctcgggctggcctacttcctgctcaagccggcgcgctacgcgatcctcctgtgggggccggtgatcgtctacgaacgcatgccggcgctcggcaaggtcggtgccgccatcgtccccaccgccttcgaggtggccggtctgctcggtccgatcctgatcggcttcgcctcggacaagctgttcggcgcccggcgcatgcccgcctgcgtgctcagcctgctggcgctgaccgtctgcctggcgctgttcgtcccggcgatggccaccggcagcattccggtggtggtcggcctgctgttcatgatgggactgagcctgtacggcccggactcgatgatctgtggctccgccgccatcgacttcggcaccggcgaggccgccggcaccgcctccggtttcgtcaacggctgcggttcggtgggtgcgatcctcggtggcctgctgcccggctacttcgacacctacacggtgttcatcggcttcactgtcgccgccctgatcgccaccgcggtgctcgttccacactggaacagccggcccgacggcgcccgcgaaagcctgtgcaagatccccagcctgggggacttccgcccgatccgctcctga

SEQ ID NO: 344981 - DNA, 1398 bp, Pseudomonas aeruginosa
atgaccttccgccccttctggctggaccaggccctgcgctccgaacacgcggccccctgcccgccgctggccggcgacagccgcgccgacgtgtgcattgtcggcggtggctacaccgggctgtggaccgccatcatgctcaaggaacaggatcccgcactcgacgtggtgctggtcgaggccgacctctgcggcgccggcgccagcggccgcaacggcggctgcgcgctgtcctggtcggccaagttcttcaccctggaacggctgttcggcctcaccgaggcgatccgcctggtcaaggcctccgaggacagcatccgggccatcggcgccttctgccagcgctacgccgtggacgccgactaccgcctcgacggcaccctctataccgccaccaaccaggcccaggtcggtggcaccgacgccgtcatcgccgcgctggaacgccacggcatcaactccttcgtcaagcgcccgctggccgacgtacagcgcctggccggctcgcgcaggcacctggagggctggttctcgccggccgccgcgacggtgcagccgggcaagctggtccgcggcctgcgccgggtcgccctgcaactgggggtacgcctgtacgaaggcacgccgatgcggggactggagcacggccgcccggcggaagtggtcaccccccacgggcgggtcgtcgccgaccgcgtggtgctggcgttgaacgcctggatggcgcgggccttcccgcagttcgaacgcagcgtggcgatcgtctccagcgacatgctcatcaccgagccacgaccggacctgttgcaggagatcggcctgaccagcggggtcagcgtgctcgactcgcggatcttcgtgcactactaccacaacaccccggacggccggctgatgctcggcaagggcggcaacaccttcgcctacggcggccgcatgctaccggtattcgaccgcccctcgccgtacctggaacagctgcacggcagcctgcgggagttcttccccgccctcgccgacgtggccatcgaggccagctggaacggtccatcggaccgctcggtgaccggcctgccgttcttcggccggctcgacggtcgcgacaacgtgttctacggcttcggctactccggcagcggcgtcggcccctgtcacatgggtgggcagatcctctcgtcgctggcgctcggcctggacaatccatggacccgttcgccgctgacccggggaccgctcggccacttcccgccggaaccgatccgctacgtcggttcgctgctggtgcgcaacgcgatccgccgcaaggaacgcgccgaagacggcggccggcgcccacgccatctcgacgtgcgcctggccaggctggctgccgccgcgggcaaggccgacaagggctga

SEQ ID NO: 344982 - DNA, 189 bp, Pseudomonas aeruginosa
atgcatctgccgacgacgcgctccctgccctaccagccttccgccaacccggccggaacgcccgcgcgcctgccccgcaagcacagccgctggctggaactggaaccgctcgccctccctctcgaactggccttctgggcgctctggcattgccgccacgcgcgcccgccggacgctcgtcacgcctga

SEQ ID NO: 344983 - DNA, 363 bp, Pseudomonas aeruginosa
atgaaggtgatacgccgatggcctctggcgctgtggctggcaatgaccggcacgctggccgacgagttgcccgacggttcgttgctgcaacgctacggcgtggcggccgaccagttgccggcgctgacggcggagccgcagccgcgcaaggagaaggtggaagcgccggcgcgcttccgcctggcgccggaacaaccgttggtgacctttggcgtcaaggagccacaggacgcggagcccaccggcaatccgtccatcgacgccatgcatgagcgtgatcggcggctttgccggaggatcaggcaggaagcgttggaaaagggcaaggcgccgccgttcgacagctatatcggctgcccgtga

SEQ ID NO: 344984 - DNA, 1224 bp, Pseudomonas aeruginosa
atgataaaaaaatatacaaataagaaaattgtcattgttctttcggcggctctagtaattctgacggctacctacattggcagcaaaggcgtgaggttttggaaactgcatactttgtttgactcgaataagattaacgaaaacttccgatccatgccggacatgttcgaatccttgccagtcataaagggcagcgagacaaaccaatttcagattgagttagccaatatgcctgtgtcatttagctttcaaggtaggaaaattttatttgacgactggataaagagtagcaataccacaggcataatagtattcagtaacgaccgtatagcctatgagagatactttcaaggaaatagctctcaaagtcttgctataggatggtcattaagcaagtccataatgtcacttttaataggaatggcagttgatgatgggtcaatacatagcttgctagaccctgtaaacctctacgctccacagctatccactagcggatacgcgggtgtttctttgagagatgtgctcgagatgtcttcaggaatagctttcaatgaggactacggagatccggactcagatattaaccaactggggaggaccatcgcacttggtggatcagtaaacgaaacagtcagctcattgagaagaggagatgcaccaggtagagtacaccactatgttagcgcggatactcaggtacttggcatggttctgctaggttcgactggtatggggccatcaaagttcatgagtaaaagactgtggtctaaactgggggctgagtgtaaaggagaatggttaactgatgataaagggacagagctggctttcggcggtgtaaatctttgcctaagggactttgcacgtattggtctactttatcttcggaacggaaaaagcttgaacggaaatcagatcgtaagctccgcgtgggtaacagcatcaaccaagcctcgaagtgatcatttgcgtcctgggcgtttcaaagaaagcggcgagccaaatcttggctatgggtaccaatggtggattcccgaaggaatggaaggggagttcttggctatcggagtatacgggcaattcatatacgtcaatcccaaaagaggcgtggtcattgcaaagacctccgcctatagcaactataatgttgacggaataagcatggaacatgaagccattgctgcatttcgagccatatctaggactgttggagtaaagtga

SEQ ID NO: 344985 - DNA, 984 bp, Pseudomonas aeruginosa
atggacctaacaaccgaacacatactcgattttgaatggagaccactacagaactatcttcgtgaccggggtataccgacaccaaccatagaaacaagccagaaactaagaagtgatagactttataactggatagttagcaaggggtattcaggcgaggaaggtctgaatctaggcacctactatcatatatctgattacggtgttattggtttggcgttgcagtgtgctgagaatgtagtggatcttttgaaggtcattagggcatatgtaaagttgttcaaccgtgatatagctgatgttcgtgtcaatgctggagaacattacgaggtagaagtccatattttggttaactttaaacccgagtggactgccgcatcgcgtcaattccacgtaaacgttatagcttcagcgtcctacaaacttatgatggacttgttggggacggacttccccatcagcgctttgacagtgccggtgtacagctcagataaaacaaactatgaacactttttttctttacctgtaagtcatgaattgagtgagatagtattcaaatttccagctcaacaaatgagtaaaacactagtaactgccaacccagcggtgtttcagtcggctctggctatggccagtgaaaccttcaatgctttgctagaaatagagatgggaggactccgtcagcgaattgaattatttcttgagtccatacctgattgctaccctagtttggtgactaccgcaaagcatctacggatgaatgaacggactatcagacggcgccttgcggacgaaggctgttcctaccgccagattgtagatacggcacgcaaagctcgggcaatttcactacttttgaattcgtcaattccagtagaacgtattagcgatattctgggatactcagagccagcttgctttaggcacgcgtttaggcgttggacggggaagtctactacgtcattcagaaacaaatcacactaa

SEQ ID NO: 344986 - DNA, 792 bp, Pseudomonas aeruginosa
gtgcagttcccctgggaccgggaaggccgccacgacgagcacagctcctgctggatacgggtgtcgcagaaaatcgccggcgcgctctggggccacatggccatcccgcgcatcggccaggaagtcatcatctccaacttcgatagcgacccggaccaaccggtcatcaccggcaggagcttcaatgccaaccagcgcccgccctacgagctaccccggcacaagacgcgcatgcccctcaagagccagacccacaagggcgagggcttcaacgagctgcgcttcgaggacgaggccgggcaggaggaaatcttcatccacgcccaggaggaccagaacaacatcgtcaaccatgacgagaccacctttgtcggccacgaccgcaaagaacaggtcgaccccgacgaagtcatcgacatcgggcatgaccgcacggaaacggtaggcaacgacgagcgggtgaccattggccaggaccggcgccacgacatcgaccgcgacgactacctgaccatcgagcgtaaccacaccattaccaccggcaagaccgcaccgaacaggtgggcaaccaccgccgcgacaagaccgccgccaaccactgggtggagattggcgggcacctggagcaacgggtggagggcaatgcgctgttggaagcgggcaagtcaattatccagcgctcgcgcgttgtcgagctacaggctggcgaagtcttccgcctgtacggccccggcggaaccatcacgctgcacgacggaggcatcacactggaggggatcgccatcgccctga

SEQ ID NO: 344987 - DNA, 729 bp, Pseudomonas aeruginosa
atgtccatccgatgcgatttgcgcttcaccttcaccgccggccccgaggcgttcgaggtcatcgagttccacctcgtcgaaggcctctccgagaccttccacctcgacgtccatctcagctgcgccaaccccgccgtcgacttcggccaggtcctcgaccgccccgcgctgctcaccatttggcagggcggccagcccgtgcgctacgtgcacggctcggtgacctcgttccagcagggcaacaccggctttcgccgcactcgctaccgcgccatcgtcgaaccgcgcctggcccgcctgcagctggcctcggactggcgcatcttccagaccctgtccgtgcccgacatcgccaccgccgtgctcaagaagcacgccatcaccctggactacaagcagaaggtcacccacccccacgccccgcgcgagtactgcgtgcaggccggcgacaccgactaccacttcgtcgagcgcatcatgcgcgaggaaggcttcttctacggcttcctgcacaacgccgaaggccaccgcctcatccactgcgaccgcctgtggattttcggcaaacagcctggcctgccggtggagtacaacccgcaggccggcggcgaccgcccgggcccggcgctgcgcagcttcacttacggcgagaacgtgcgcaccgcgcgccagacccagcgcgactacaacttcaagaacccgctgtacaaccagcagaccaagcgctag

SEQ ID NO: 344988 - DNA, 666 bp, Pseudomonas aeruginosa
atgaacccgcctggcgcgcgatctccctgccccaccgggacaagggacgacgaagccacgcggttgcggcgcttcgtcggcagcgttcccaaccggataggcatcggcgccgcccgtggcgcggcgccgctgtccgccttgctcggcctgctgctgctcggcggcgcctggacgctgcgcgaccaccccgggcgcgaagcgctggcgctgtgcctgctggcgtcggccgcgctcctcctgggcctggcccacctgcagcgcaacgccaggaacgcgccgttcctcgtgctcggcgatggatgcttgcgcgcacgcggcctgtcggcgccgctggacctgctggaggtcgccgacctgcgcctggaggacggcgtctggttctccacgataaccctcgaactgcacggcaaggcgccgccggcgccatccacgcgcccgctcgatccgttcgccgcgcgggccgtcagcgaatgccggggcggcccccaggttcgcctgctgtcccccggctggcggctcaatggtcgcaacctctcgcttctggaagccgcggaggtcatcgacctctacctggacatcgcccgcgcccaggcccggctccgccaactgggcggaacgccgcccagcactccttctttctccccaacgccaaggatatctccatga

SEQ ID NO: 344989 - DNA, 516 bp, Pseudomonas aeruginosa
atggactaccgcatcagaaccagccgcgacgaggacgccgcgctgctcccggccatcgagcgctcggccggggaaagcttccgcctgctgcccgagctggcctggatcgccgacgccggggtcgccggggtggacttccatcgccgcctgatcgaacgcggcagccactggctggcggaagacgccgatggccagccggtgggcttcctcgccgccgaacgctgcgccgacgaattgcacatcgccgagctgtccatcgcccaggcccaccagcagcagggcctgggccgccgcctgctggaacgcgcggtgacctacgcccacgccagccactgccgggcgctgaccctgacgactttctgcgacgtgccctggaacgcgccgttctacgcgcgcctgggcttccagcggctgacctggcaggaagccggcgagcgcctgcgcgcgatcctcggccacgagcaggagatcggcttcgccgccgacagccgctgcgcgatgcgcctggtgctctag

SEQ ID NO: 344990 - DNA, 1206 bp, Pseudomonas aeruginosa
atgagcaatccctatctcgaactgttttccgcgcctggcgccaagggcttttccgccgccggcctgctggcgcggatgccgctgtcgatgaccggcctgggcatcgtcaccatgctttcccaggtacatgccgactactggctggccggcaccgtggcggccaccttcgtgttctgcaatgcgctgctcgcgccgcaggtatcgcgcctggtggaccgcttcggccagggccgggtgctgctcccggcggcgctggccagcgccctggcgatggccgcgctgctgctctgcacgcactatcgcgcgccgaacgcctggctctacctgttcgccctgctggccggggtgatgccgagcatgccggccatggtgcgggcgcgctggagcgagctgtaccggggttcgccgaagctgcatacggcgttctccttcgaatcggtgatggacgaggtctgctacatcatcgggccggtgctggcggtgagcctcagcgtcggctggttcgccgaggcggggccgctgctggcgacgctgttcctggtcgccggggtgagcctgttcagcctgcaacgcggcaccgaaccgccgttgcatgcccagccgcggcgccgcgccggcagtgcgctggcctatccggcggtgcgcgtgctggcgctggtgctggctgccatcggggtgatcttcggcgcggtggaggtggtcagcgtggccttcgccgagacccacggcaacaaggcggcggcaagcctggtgttgtcggtctatgccgtcggctcatgtctcgcgggattgctgttcgggctgctgcgctggcgcctggcgctttcccggcaactgctctgcatgattacgctgatggccctgagcctggtgccgctgctcggggtggacagcatcctcgcgcttgccctgaccgtgctggtggccggtttcagcgtggcgccgacgatgatcctggccatgggcctggtcgagcgcgcggtggacccggcgcgcctcaccgaaggcctgacctgggccatcaccgggctgggcatcggcatggccctgggctcggcgctggccggctgggtggtggaaggctacggcgccgccagcggtttcctcgtcgcggtcggcgccggctggctggcctggttgctggccctggcctgcttccgggtgctggctcaggacgaggccggagactgcgcggtgcccggttga

SEQ ID NO: 344991 - DNA, 1446 bp, Pseudomonas aeruginosa
atgcttgaaatgctcaacgattttctctccggaaaagtcctcatcgtcctgatcgtcggcctgggtgcctacttcacgatccgttcgcgcttcgtccagttccgccacttcggccacatgttcggcgtgttccgcgaatcgctgcgcggccaggccggccagctcagttcgttccaggctctgatgctgagcctcgccggccgggtcggcgccggcaatatcgccggggtcggcatcgccgtgaccctcggcggtccgggcgcggtgttctggatgtgggtgaccgcgctggtcggcatgtccagcagcttcttcgagtgcaccctggcccaggtctacaagcgcagcgacggcgacgggctgtatcgcggcggcccctcctactacatccagcacggcctgaagctgcgctcgatggcggtggtcttcgcgatcctgctgctgatcacctacggcttcgccttcaacggcctgcagtcctacaccgtcacccactcgctgcagaacgccttcggcttcgccccgcagcacaccgggatcgccctggcggtgctgctcggcgtggtcttcatcggcggcatcaagcgcatcgccgcggtctccgacctgctggtaccgatcaagaccctggcctacatcggcgtcaccctgtacgtcatcgccagccagatcgagcacgtcccggcgatgctggaaaccatcgtcaagagcgccttcggcctcgacccggcgttcgccggcctgctcggcagcgccatagtgatgggcgtcaagcgcggcgtgttcgccaacgaggccggcctgggcagcgcgccgaacgtcgccgcggtcgccgccgtgcgccatccggcggcgcagggcgtggtccaggccttcagcgtgttcctcgacaccttcgtgatctgcacctgcaccgccctgctgatcctgctctcgggcttctacaccccgggcttcgagggcgacggcatcgtccttacccagaactccctggcggcggtggtcggcgactggggccgggtgttcgtcagcgtggccctgtcgctgttcgtcttcacctgcatcctctacaacttctacctgggcgagaacagcctgcagttcctcagccgcaaccgcctggtgctgatcggctaccgcgcgctggtgctggccctggtggtctggggctcggtgcaggacctgtcgaccgtgttcgccttcgccgacatcaccatgacctgcctggccttcgtcaacctgatggccctggccctgctgttcaaggtcggcctgcgggtgatgcgcgactacgacgtgcagcgtcgcgccggtatcaagcaaccggtgttcgactcggcgcagttcgccgacctcgacctggaccgcgaagcctggcccgccggccagcgcgccgaaagcccgacgcaagcgggcaccgagccgctgcccagcggcaaccgctga

SEQ ID NO: 344992 - DNA, 924 bp, Pseudomonas aeruginosa
atgaacaagttcgtggatatggccagtttcgtcactgtggtggaagcgggcagcttctccgaggccgcgcgtcggctgggaaccgccaagtcggtggtcagccagcgcatccagcagctggagcggcacctgggggtggtgctgatcgagcgcggacgggtgttccgggtcacccagctggggcgccactatcatgacttctgcgtgcaggtgctcggcgacgtgcgcgacatggaagagtccatccagtccttcgacggtggcttgcatggggtgctgcggatcgccgtgccggtggcgttcgtcgcccacctggcgccgctgatcgccgaattctcgctgatctaccccgagctcaagatggacatcgacgccgacgaccgccatgtcgacctcaacctggggcgctacgacgccgcggtccgggtcggggtcctggaagactccgcgctggtggcccggcgcatcaccgcgaaccgccacgtcatctgcggcagtcctggctacctggacaggaaaggccgccccgcgtccgcggaggagctgcgcgaacacgacggcctgctttccatgcgccgcgcccaccatggcatgtggaggctgggcgtggagggccgggagcagtccttccggatccgcagcaagatgcgctccgacaacgcggacatcctcctgggcgcgaccctcgccggtgtcggcctgagcatcatgcccaccttcctcgccggcgcgtacctgctggccgggcaactggagatcgtcctgcccggctgcgtgcctccgggcggcgagatctcggtggtgtaccggcgagcgcagcgcgcctcgccgaagatcaatgcgttcgtcgagttcctcgcgcagcggatcggccagccaccggcatgggaccggcagcttggcgagctgctgggagagctttga

SEQ ID NO: 344993 - DNA, 630 bp, Pseudomonas aeruginosa
atgcgctacatcggactcgaggcactcctgacccccgaagagtgcgtcatgctgctgatcgaccaccagccctatcaactgatgaacctgcacagccatgaaccgagcatggtcatcaacaacgtcaccggcctggccaagaccgccagggcgttcggcattccggtgatactcaccacggtcgtcgaggatcgcggcggccacctgatcgcccagttgcaggaggtcttcccggagcaacgacccatcgacaggaccttcatcaacacctggcaggatgcgcgcgtggtggacgcggtgcggaagaccgggcggaagaagctggtgatggccggcctgtggaccgagatctgcctggcgatgccggtcatccaggccctggccgagggctatgaggtctacttcgtgaccgacgcttccggcggggtgagcccggaggcccacgaaatggcggtgcgccgcatgatccaggccggcgccacgcccatcacctggatggccgtgcagggcgagctgcagcgggactgggcgcgcgaggacacggccggcgccgtcaacgcggtgaatgccgagcatggtggcgccaccggtgtggccttcgcctgggaaacccagcttctggacagctga

SEQ ID NO: 344994 - DNA, 2808 bp, Pseudomonas aeruginosa
atgaagttgcagaatttcctacagcctttggatagcgggttttccactccgagtgccgcgctcaagctgctgcgcatgctcggtggcgcattgatgctgagcctgctgtgtggcctggcgttcaccgtgaacatggctttcaaccaccaggtgtcgctcgctcgacgcgcgatgaacgcggcgatgtacgaggcgcagctctatctcggccagcgtgaagcgttgctcgatcatctgagcggcagtgtcgtgcccctggcggcaggcagggcgctggtcagcgaagcgtcgaacgatggccaggcgctcccgccgtccatactgccgctgggtggcagcggacaagggctcctgctgtctgcccgcgagcttgccgaactcggggacaagcgcctggggctgctgtatgccgtcgatgccggaaacggaccggcgatccacaggctggtctccggggttggctccgaatcgccgattaccgccgcgctggccgaggcgctgtaccgagcctcgcaggcggcgccggcggcgcgcatccactggctggccgagggcggagagcgccggcgcctgttcctcttcgaggccctggacggcgggcatggaggtggctggttgggtctggagatccatggcgagatactcgacgcgatgctgcgcagggctggcgcaggcagctatctgctattggacgggcacgggcaggtagccttcgccgaggaggatggaagcctgcgcgcggaggagctgcgcgcgctcgcgcagggagacggcttcggcttcatcggttccgctcccatgccgcagcacgtggcactgctcaaacacataggttcctcgaactgggtgctggtctattgcatcggtatcgaacggctgctgttggcgctgtggcagccgctactgctggcgttctcgctggccatcggcgtgggtacgctgctccgtcggctgggcaggcgtatcgaagagcgcctgatgaagccggcggcgcagcgtctcgaggcgctcaaggaaagcgaggctttctcccgggcggtcatccaggctgctcccgtggccctttgcgtattgcgccgcgccgacgccgcggtggtcctggagaatccgcaggcgcggcaatggctgggcggcgaggtggtccgccgcgcggcgccgggctggattgcccgggccttcgccgaaggcggcgagcctgccggggaggagctggaaaccgaggccgggttgcacctgtacctcagttacaccatcacccgctacaagggtgaagacgtactgttctgcgccttcagcgacatcagcgcacgcaagcagatcgaggcggaactggcccgggccaagctgctggcggacgcggccaacgaagccaagacgctgtttctcgccaccatgagccatgaaatccgtacaccgctctatggtgtgctcggtaccctggaactgctggggcgcaccgagctgagccgccagcaggccggctacctgcaggcgatccagcgctcttcggcgaccttgttgcaactgatcagcgatgtactcgacgtatccaagatcgaggccggccaactggacctggagtccatggagttctccccggtcgagctgaccgaagaggtcgtgcagtcgttcgccgccgctgcgcatgccaagggcttgcaactgtatgcctgtctttcgccggagctgccggagcgcatgcgtggggctgcggcttccatccggcagatactcaacaatctgctgagcaatgcggtgaagttcaccgacaacgggcatatcagcgtgcgcctgaaggccagcgtggtcgatgccgaatgcgtgatgctgacctggcaggtcaacgataccgggacgggtgtcgccgccgaggaccagcaccgcctgttcgacccgttctaccaggtgcgtcgctccgaacagctggtggccggcacggggttgggcctgtccatcagccagcgcctggcgcaactgatgaacggcaacctgaggctggtcagcgaactggggctgggcagcagtttcagcctgaggctgccactcgagcgcatcgcggtacaggcggaaccgcaggaactggccgggcgggacatccgggtgatggcgccagcccgtgacctggcggaaaacctgtgcggctggatcgcccgctggggaggccgggcccacctcgccacgccgtcgaccctcgacgaggcggacgccagcagcgtgctggtcgaagtgttgctgccgggtacggcggcgatgcaggcgcgatggccgggatgcagggtggtgctttccccggaggggagcgtagagccccaggcccagggctgtgactggctggtgggcctgaacagccttggcggcttgcgtcgcgcgttgggccttgcccaaggctgcgtcagcgagagcgcggttgtccacggacagatcgcgcccctgagcaacctggggatacgcatcctggtggcggaagacaatgcgatcaaccagttgatcctgcgcgatcagctggaagcgctgggttgtgtcgtggaactggctttcgatggccggcaggcgctgcagcgatgcctgtcgggtgacttcgacgtggtgctcaccgatatcaacatgccgaacatgaacggctatcaactggcgacggagctccgccggcgcggctaccgacggcccatcgtcggcgcaaccgcgaatgccatgcgcgaggagcgcgagcgttgcctcgccgccggcatgagcgattgcctggtcaaaccggtggatctggattcgctccagaactgcctgatcgatatcctcaaggtggatcgatga

SEQ ID NO: 344995 - DNA, 1200 bp, Pseudomonas aeruginosa
atgaacttgaaatcctatcgggtgctggtcgtcgaggaccagccgttccagcgcgagtacctgctcaacctgcttcgcgaacggggcgtgcagagcccgatgggggccggcgacggtgccgaagcattgctttgcctgaagcgggagaggttcgacctggtcctcagcgacctgatgatgccgggcatggatggcatccagatgatccagcaactgccgtatctcaagcatcgtcccaaactggcgctgatgagttcctcgtcccagcgcatgctgctcagcgccagccgggtcgcccagagcctcgggctttcggtgatcgacctgctgcccaagccgaccttgcccaaggccatcggccagctccttgaacagctggagaaatgcctgaggcaggacctggagcctgaggccgatgacctgccccatggtcggacggcgctgctggacgccctgcacaacgagcaactggtgacctggttccaggccaagaagtccctccacaccggacgcatggtcggggcggaggcattgatacgctggaaccacccgcagcgggggctgctgctgccaggatgcttcatgagcgatatcgatgcctcggggttgcacgaggcactgctctggcgcgtactcgaacagacgctgcgggcccaggcctcgtggcgcagggcgggctacgagattcccgtctcggtgaacctgccgccgcacctgctcgacagccaggaccttccggaccggctctgcgagttcgtcggcagtcgcggcgccagcgccggctcgctgtgtttcgagttgaccgagagcagtgtcgccaccctgtcgagcaattactatgccggtgcctgccgtttgcgcatgaaggggttcgggttggcccaggacgacttcggtcagggctacagctcattcttcaacctggtcacgacccctttcacggagctgaagatcgatcgctccctcatacatggatgcgtggaagacaacggcctcaatgcagccgtcaccagttgcatcgagctcggccatcgtctgaatctcgacgtggtggccgagggggtggagacctgcgaggagttgaatcttcttcgtcgccttggctgcgaccgggcgcagggtttcctcatctcggaggcggtgccggcgcacgtgttcgagcagcaactgcgggaggacggacccagcccccttgcctga

SEQ ID NO: 344996 - DNA, 3252 bp, Pseudomonas aeruginosa
gtgaagtccgtccgtatcctggaacatgacaacaagctgctgctcaagtgggcgagcgtctcgcggagcctgaacatcgggctgctctgcgtggcggtattgaccgtattgctgttcagcatctgctactggtcgttggggcgactgctccaggaagaagaggacaaggtttccttccacttcacccggctgatcggcgacatacgggaacacgaggccttcctcgtgcgcatcgcacgcaaaagcgacaaggccacgcagaagcacgaccatgacgtggtgcccctgcaacggcggctcctggccagggaagaaggtgtcgaggtctatgaggggcgggaattttcctttgccatgccgttcctcctggccactcgccacggggtcgacaggaatgcgtcgtgggggccgttctccctgggcgtcctgctcgccaacttctacggcggcttctggagcctttcggcataccccgcgccacaattgctgatctacgatctttccggcagtacccgcctggccgtgccggcgatccacgccatggcggaacgcgagaggctgcgcgagaaccagccgatgatggtcgaccgcatgctggcgcgcctgcgcgaaacgccgccgggcgccgccgaccacccggtgcattgggtgcgcgcggaccgctatcgggggcaggcgcccgaactgctgggaatcgtcaggatcgatctgccggaagccctgtggtggcgggatgagccgaaccacctgatcgttgccgcgagtctgttcgacctgcggaggatcaacgatttcgagcaattgatggagcgtccggtgttcgactcgtacagcctggtttcgccggagggcgatctgctggtgggcgagacgccggccgaagggcttggcgacggcctgaacttcacccgccacggggtggcgattcaactgcgcagccaacccgcaggcggctggctcgcggtctaccgtatcggttatgccagtttctttcgccatgcccaatggctgctggccggcctgctgctggttccggcgctcgtcctgggcggctggctcggcctgcgctggtacgcgcgcagcgtcgtccatcccgcgcatcgggcgcaccagcaactcgtcgagagcgacacgttcagccggaccctgatccagaccgcgccggtggcgctggtggtactcagccaggatggtcggcaactggtgacctgcaaccagctggccggccagtggctgggcggggccgcggagatcctcgccctgacgtcccgctggaaactgctcgacgcccaggggcaggtggcgggaggcatctgtgtgcaggtcggcgggcgctacctgcaggcggctttcgccgcgacccgctatgccggcacggaggcggtgctgtgcgtgttcaacgacattaccgtgcattgcgaggcggaggcggcgctggccagcgccaagcgggcggctgacgctgccagccaggccaagacgttgttcctggccagcatgagccatgagatccgtactcccctgtacggtgtcctcggcaccctcgaactgctcgatctcaccgagctgaacgagaggcagcgcgcgtatctgcggaccatccagggcgcctccgggacgctcatgcaactgatcagcgatgtactggacgtctcgaagatcgaggcggggcagatggccttggcgcctgtcgtcttcgatccactggaactcacgcaggaagtgctcggcagcttttccgccagcgccatggccaaggggttgcaattctatgcctgcatcgaccccgacgtacccgcgcagttgatcggcgacgtggcgcggatccgccaggtcctcgccaacctggtgagcaacgcagtgaagttcaccgatatcggtcgtgtggtcctgcgcctgaaattgctgtcacgggaggacgggcgggccgccttgcagtggcaggttgccgataccggcatcggtatcgcgatcgaacagcagaaacgcctgttcgaggctttctaccaggtgcccggaatgccccatgccggcggcacggggctgggcctgtcgatctgctggcatctcgcggagatgatgggtggcacgctgcgtgtcgtcagcgaagcggggctgggcagcagcttcagcctggtgctggatctgcccgagaccgaaccggagggactggcccgccaaccggaacgctggctacagggaactgttctggtgcgttcgccggtgcgcgaactggccgacagcctgagcggctggctggcgcgctggggctgtaccgtgcccggcggcgcgtcctgccccgcggagcccggccagacggtgctgctggatctgctgccggcgccgaacgcgaccctatgctggtccgggccgcgggtctgtgcctcgccgacggcgccgagccagccggaattccgtgaagacggctggcatgtcagcctgcacgatctggcgggcatcggccgggccgtggccctggccctggggaaggagataccgcaggcggtggcgccagaccccgcgctgcgctcgcggaagctcgaactgcgggtactggtcgccgaggacaacccggtcaaccaggcgctgcttcgcgagcagctcgaggaactgggctgccacgtgagtctggccagcgatgggcggcaggcgctgcaactgttcgaccaccagcgcttcgacctgctgctcagcgacgtcaacatgccgaacatgaccggctacgaactgacccaggccctgcgcgaacgcggagaaaccctgccgatcatcggtgtcaccgccaacgccctgcgcgaagaaggcgagcgctgccgggcggtgggcatgaacgcctggctggtgaagccgatcaccctgcatacgctgcacgaacagctcggcgcgttcggcgccaggggcatgtcgccagccgccgacgcgccagcgagcgccaggccagaccaagcctgcgacgagggtctggcgccgcgggtgcctgaacgcatgcgtgggcttttcctggcgaccatgagcaaggacctggacgcggcccgggaggcgctccgccggggcgacccggaagggttgcggcaggggctgcatcgcatggccggctccctggcggtcacccgtgcgcgggcgctggtcgcgctgtgccagcgggtggaggagggcctggtggaaggaacgctcgactgcgccgccggagaggtcgccgaagtgctcgcccatctcgcgcgggcgctggaacaggtgagacggaccggctga

SEQ ID NO: 344997 - DNA, 651 bp, Pseudomonas aeruginosa
atgagtaaattgaagatagtactggccgatgaccatccgatcgtgcgcatgggcgtatgcgacatgctcgagcgcgatccccgcttcgaggtggtgggcgaggcgtccaaccccagcgaactggtatcgctgtaccggcaggccgatccgcacatcgccattaccgactacagcatgccgggggatgagcgctatggcgacgggctgaagctgatcgactacctgttgcgcaattttcctcgtacccgggtgctgatcttcaccatggtcagtaatcgcctgatcctcgacagcctctacgaccatggcgtcgccggcgtggtgctgaagagcggtgagctcgacgaattgctcctggcgctcgacgtcgtgctgcagaaccggatctaccgcggcgcgcacatgatcgacccggccaacgtactgaccagtcgcgacgaggtggaaaaccgcttcgcccgcctgtcgatgaaggaattcgaggtgctgcgtcacttcgtgtccggaaacaacgtctgcgacatcgcgcgcctgctgaagcgcagcgtcaagaccgtgagcacgcagaagatctcggccatgcgcaagctggaagtgaacagcgaccaggcgctgatgaccttctgcgtaagggccaacctgttccattga

SEQ ID NO: 344998 - DNA, 717 bp, Pseudomonas aeruginosa
gtgtccagtgagcgcggactgcgcggcgcactgttcggcctggcgctgctgctcgggctggacgcccaggccggagtcaccgccgagcgcacccgcgtggtgatcgccgaaggccagcgcgaagcctcgctgctgctggtcaatcagaatgcctacccggtcatcgtgcaggcctggatcgacgatggcgacctggattcgacgccgcagaccgcccgcgcgccgttcatgccgctgccgccggtgttccgcctggatcccggaaagcagcgcagcctgcgcctgctgcgcaccggccaggccttgccgggggaccgcgaagcgctgtactggctgaacatctacgagatcccgccgcgccccggggaaccgccggccgaaggacagtcccggctgaccgtcaccctgcgcacccagatgaaggtcatccaccgtccccgtgcccttgccagggcggccgaggaggctccgcgccagctccgcttccagcgccagggaaaagcgctgctggtggaaaaccccaccgcctacttcgtcagcctcgccggcgccgaacaggaggacggtgccccgctgctctccgccctgctgctggcgcccttctcccggcagatgcaggctcccggccagacgctgccgagcgggaagcaggcgatccgcttccactggctggacgacggcggcaacctccggcagggacggaccaccctgcgctga

SEQ ID NO: 344999 - DNA, 1347 bp, Pseudomonas aeruginosa
atgaagacagccttgcatctcctggcgctgctcgcgcccttgctcgccgccccggcctgggcgacctgctacaaggtcacggccgtgggcagcgccaccaccaccgtcacgacacagatccgtcccggcgaaggtacggccggcacctgggccggtgcctgcgacacctgcaacggctctctcggcctgccgagcgtgatcaacgtcagcgatgccagtttccagcccgacggcacgctgatcgccagctcggtggcgccgctgactcagtacggcgacagcgccggctacgaccccgaacgcgtgttcttccgctgcgcgccggaggaccaggtgtacgagatgttctcgaccaacgccgacaacctctacagcggctggtaccagggcggcgacagcgtgggtacttccattggcctgcagtccgcctaccgtaccgcctggcgcaatgtgctgctgcgcctgacccatgtcgaaaccggcctgtacttcaccgatgtctggcgcgagcgcctgctcaccgggctggacatcgactcgcgcggctaccagttggtcaaggcgaagaatctcagcgccatacgcgccgagctgttccgggcgccgctggaaaccacaggctattactcgcagaacatcgcctcgcagttgtatgggtacacccagcccaatggctacattgccatcaaggggccgggcctgctctatccccgggtgggcgagacccactatggcaactactccggctggcacggcaactggccgggtgccatcggcctgtacaacgacgtgacgctcaagcgctatcccacctgcgccgttaccaatgtcaccccgcatgtcgtgttcccctcgatctcgctcggtgagatcaaggccggcgccagccgcgagatgcccttcgaagtggccttcaaatgtgaaaccggggtgctcaacagcactgccgccaacggcacggcgctaggaatcaaggcgtctcccggcgccctggcggcggccgcttcgctgggcctggtgaatgccagcggcggcctctcctacctgctgtccgaccgctatggccagcccggcatggcccagggcgtaggcatccgcctgctgcgcgacggcagcgcgatgaacctgctggcgaacgaggattcagccatgggcagcaacgccgaggcgcgtggttggtatccggtgatcggcggcgcttcgaacctggccggcgaagtgggcggcgtcagccagtacagcgagaccttccgcgcgcgcctggagaaacttgccctgggcagcatgcccggtgtcaccccgggacgcgtcgaggccaccgctcaggtggtgatccgtgtccagtga

SEQ ID NO: 345000 - DNA, 2607 bp, Pseudomonas aeruginosa
atgttctgccgcgttgacttccgccgcgcccacatggcgccgctggcactgggcagcctggcgctggccgtcaccggcctggccagcgcggagcaatatcgcttcgacgacaacctgctgctgggctcgggcctggccggcggcagcctggagcgcttcaaccgcgccaaccaggtggaccccggcagctaccacgtcgacatctacctcaacggcagctacgccagccgcgccagggtcgaattccgcagccacaacgatggcgtcgaaccctgcttcagcgagcgcttcctgcgccagacgctcggcgcccacgcggcccccactaccgacgaggtcgataggcaagcctgccagggcctgctggaacgcctgcccggctcgtccttcaccctcgacaccgcccgcctgcgcctggacctctcggtcccccaggccctgctggacctcaagccgcgcggctacgtaagccccgacgagtgggacgccggcagcaccatgggcttcgtcaactacgacgccagcctgtaccgctccagcttcgacggagcgggcaatggccactcggactacggctacctggggttgagcggcgggatcaatctcggcctctggcgcctgcgccaccagtccaactacacctattccagctatgccggcaatacccgcagcgactggaacagcatccgtacctacgtgcagcgcgcggtgcccagcctgcgcagcgagctgaccctgggcgaaagctataccgaaggcaacctgttcggcagcctgggctaccgtggcgtgcgcctggccagcgacgaccgcatgctgccggagtcgcagcgccgctacgcgccgcaggtgcgcggcacggccaacagcaatgcgcgggtggtcatcagccagaacggcaagaagatccacgaggccgtcgtcgcccccggcccgttcgtcatcgacgacctctacggcaccgcctacgacggcgacctggatgtccaggtgatcgaggccgacggcagcgtatcgcgcttttccgtgcccttttccgcggttcccgagtccatgcgccccggtatctcgcgctatgccgccaccctcggccaggcgcgccagtatggcgacggcaacgacctgttcggcgacttcacctaccagcgcggcctgaccaacgccctgaccgccaaccttggcgcgcgcatggccgaggactacctggcgctgctcggcggcggcgtgttcgccacgcgctacggcgccttcggcctgaacaccaccttttccagcgccacggtggaaaacggccagcgcaagcagggctggcgtgtcggcctgaactacagccgcaccttccagccgacccagaccaccctcaccctcgccggctaccggtactccaccgagggctatcgcgacctgggcgacgcgctgtcggcacgccacgcggaccagcgccacgacacctggaactccgccagctacaagcagcgcaaccagttcaccgtgctggtcaaccagggcctgggcgaatacggcaacctctacctgtccggcgccaccagcgactactacgacggcaagagccgcgacacccagttgcaattcggctacagcaacacctggcgccggctcagctacaacctggcctactcgcgccagcagaccacctggtatcgcgacctggacaacgactacgacccgtcgctgccgccgcagtacaacctgcgccgcggcagcgagcgcaacgataccctgaccctgacgctgtccctgccgctgggttcctccagccgcgcgccgaacctcagcgcgatggcctcgcggcgctcgggcgacagccgtggcagcagttaccagaccggtctcaacggtactctcggggaggaccgcagcctgagctatgccatcaacgccggacgcgacagccaggcccgcggcaccgatttcaacggcagcctgcagaaacagaccgccgtggccacggtcaacgccggctacgccgagagcgccagctaccggcagttgaatgccggtttgcgcggcgccgccgtgctgcatcgcggcggcctgaccctggggccctatgtcggcgacaccttcgccctgatcgaggccaagggcgccagcggcgcgggcgttcgcggcggccagggcgcgcgggtggacggcaacggctatgccgtggtgccctcgctctcgccctaccgctacaacccggtcagcctcgacccccagggcatgggcgaaacggccgaactggtggagaccgaacgcaagatagcgccctacgccggcgccgccgttcacgtgaggttcaagacgctgaccggccacccgctgctgatccaggcgcagcttcccgacggcggcgcgctgcccctgggcgccgacgtactcgacaggcgcggcgtgaccatcggcatggtcggccagggcggccaggtctatgcccgcgccgaaggcgaccagggccgcctgcgcgtgcaatggggcgagcgcccggaagacgcctgcctgctggactacgacctcgacgccagccctcgcgaggccggcgcatccgaccaggcggtgatccgcctggatggcatctgcacgcccgaaccggaggcaccatga

SEQ ID NO: 345001 - DNA, 747 bp, Pseudomonas aeruginosa
atgaagagttttccactacgcccgcttcaggcggcgacgctcgcgctcgccctggcgctggccacccttccggtccagggcagcgtggtgatcaccggcacccgcgtgatctatcccggcgacgcccgggaaaagaccgtacagatgaccaaccaggacccgtttcccaatgtgatccaggcgtggatcgacatcgacgaccccgcctcgtctccggagagcgccgacgctcccttcctggtcaatccggcggtggcgcgaatggcgcccggcagcggccagaccctgcgcatcgtccataccgggccggccctgccccaggatcgcgaatcgctgttccacctgaacgtcctgcagatcccgccacgcaatgccgccaaggcgaaccgaaaccagatgctgctgttgcagcgcaaccgcctgaagctgttctaccgccccgccccgctggccggcggttcggattcgctggccgagaaattgcgtttcagcctgcgccaggagcacggcgcctggcgtgtgcgggtagagaaccccagcggctaccatgcctccttcgcggcggcgacgctccgcgttggcgagcgccagtggaaacttcgctcgagcatggtcccgcccatgggccaggcggaatgggtcgcggaacacccctcggcgctcccgccgggtgcggtccggctgaatgccctgctgatcaacgactacggcgcccggctggatgttcgccatgttctgccgcgttga

SEQ ID NO: 345002 - DNA, 549 bp, Pseudomonas aeruginosa
atgaaacttcaagcatctgccctggctatcgctacgctgctcgcggtgccggccatcgcatcggcggccaataccatcaccttcaatggcgaagtgaccgaccagacctgctcggccatcgtcgatggcaacaccgaccccaccgtgatgctcaacagcgtgccggtcagcgccctgaacggtacggtcggcaagacagccggcgaaaccagcttcaccctgcaactgaccggctgcgccgcgccgggcaccggtgaagaggaacacttctcggcgctgttccaggccaccaacgcgaccaccgccggcaacctgaccaataccgccagcggcggcgccaccggcgtggccctgcaactgctcacggcgccgggcggtaccgcggtcaacctggctggcggcgcggccgtggccgccggcgacatcgtgctcgccgaaggccagaccagcaccagctacgactacgccgtccagtacgtttccgaggcggctaccgtcacccccgggccggtgctcggctcgctcacctacaccctgcgctacgagtga

SEQ ID NO: 345003 - DNA, 453 bp, Pseudomonas aeruginosa
atgtccgggcacccccgacgcgcgctggtgctatgcgccaatccaggtcgcctgctcaggtacggagcattgttcaaccaccttggctactaccatctgagcctctgcctggatcgccaggagctgcgcgcctccctgcagtcgggctatcgctacgactattgtgtgcatgacgatttccggctgaatgccaccgacaagggaacgctcaggttgctcgcgcgcagtggctgcgtccggcatttcgttctgataagcgacatggactgccgggaacggcgaatactccatgaatgggcaacgcggcactcgatcatcatccgggagatatacgaccctcctctggacagcagcacgatgtcagcccttgtcgggcaggaaacgacttcctgtgcggcctgcgaggctcccgcgagcaaagacccgacatatcgatccgagaggcaccgatga

SEQ ID NO: 345004 - DNA, 927 bp, Pseudomonas aeruginosa
atgagccggattaacgtacgtaatatcgcgcggatagacctcaatcttctgctcaccttccattgcctgatgagcgaacgcagcgccacccgcgcggcggtcgtcctgcacgtgacccagggcgccgtaagcgcggcgctgcgccggttgcgcgagcatttcggcgacgagctgttcatccgcagcgcctcgggcatgcagccgacgcgcaaggccatggagctggcgccgcggatcgccgaggccctgacctcgatctccggggtgctcgccgcggaaccggaattctcgccgcgcgactccagctacgtgttcaacatcgcgctctcggacgacatcgagtcctacctggcgccctgcatcgtcaatgccgcggcggccgaggggctcggcgtgagcttcgccttccaccagagcaacagctcgctgtggaaacagtccctgctggacccggacatggacctggtgatctgcagcgagcccaaggatttcaacaccagctattcgtcccaggtgctgttctcctcgtcctactcctgcctgttccgcccgcgcgggagcatggccggcgcggcgatcggcctggacgactatttcgcggcgaaccatgtgcgcatctcctatgacggtcgtcgcggcttcatcgacgacctgttcgagagcgccggctacgcccgccgggtcaccgcctccttcacccatttcgccggcgccctctcgaccctgatgagcggcgaggtgatcgccaccctccccaccttcgccgccgagacctacagccgcatgatggaactgcactgctgcccggtgcctttgccggtgccgtccttccgctgcttcatggtctgggacgtggccaagcacaacaagacccaccacgactggctgcggcgcttcgtcggcgagatcgcgcagcgtctcggctag

SEQ ID NO: 345005 - DNA, 1323 bp, Pseudomonas aeruginosa
gtggacatcattcagcaacgcgtcgccgcgagcgacctccaggcccggggagggcggtcggacctgcgcacgcgggcgatcgcggtgggcatcggcaacttcatggaatggttcgacttcgccatctacggctatttcgccgcgatcatcggcacgctgttctttccttccgccgcgccggggatctcgctgctctcctcgctggcggtcttcgccgtgggctttctctcgcgcccgttcggcgcgctgctcctcggccccatcggcgaccgcctgggccgtcgcgcggtgctgatcgtcacggtgttcggcatgggcttgtgcaccacgatcatcggcctgctgccgtcctacgcggcgatcggtatcgccgcgccgatcctgctgatcgtcatgcgtttcatccagggcatgatggtcggcggcgaatggtccagcgccggcatctacatcgtcgaaagcgcgccggccgaccgccgcgccacggcggccagcgtgatcaccggtacggccggcctggcgttcctgttcggcaccttcaccgcggcggccatctccagcgggctcagcgaggagcaactgcatgcctgggggtggcgcctgccgttcgtggcctccatcgtcatgaccggcatcgccgtgttcatccgccgccggctcggcgacacgccggtctacgaggcgctgcaacggcagcgccgcgagcagcgggtccgggagccgagccgcgcggtgcgccggcgggcgttcgtcaccagcttcgcgttctccgcgctgttcggcgtgtcgctctactacttcatcacctacgccaacaaccacctggtcgcgactgtcggcctgccgcgcagcagcgcgctctggctgtgcagcctggcgctggtggtgtactgcatcgccaacccgctggtcggtcgcttcagcgaccgcttcggccgccgccgcctgctgctcgcggccgccgccgcgctgaccctgctggcctatccggtcttcctgttgctcaacagcggccagccgccggcgatcctgctcggactgatcatcctcggcctgctggtggcggttaccgcggtgatggacgtggtgctgctggtggaagtgttcccggcctcgatccgttccagcggcgccgcgctgggccataacgtggcgctggcgctgctcgccggccccgggccgttcatcgccgccgcgctgatccgccagaccggcgacgccaacctgccggcggcctacctggcgctggtttccctggcctgcttgctggtgctgtggaagaccctgccggaaacccgtgacaacgacatcacccagtactag

SEQ ID NO: 345006 - DNA, 933 bp, Pseudomonas aeruginosa
atgacccgtgtagcgatcatccaggccgcatccgtgccctacgaaccgatggccagcgtcgagaaggcctgcgtcatcctgcgccgggtggcgcggcagggtgcccggctcgccgtgtttcccgaagcgttcatcggcggctacccgaaaggcgtgagtttcggcagcgtggtcggcaaccgcagtggcgcaggtcgcgaactctacgagcgctacgtgcgtggcgcggtgaccctggaggggccggaactggcggcactggcggagggcgtcgagcagaccggggtgacggtggtggtcggcgtcatcgagcgcttcggccgcaccctgtattgcacggcggtgaccctggttcccgggcgcggcatcgccggctaccaccgcaagctgatgcccaccggccaggaacggctggtctggggcttcggcgacggctcgaccatcgccgcggtacccagcgacatcggcgtgctgggcagcgtgatctgctgggagaactacatgcctgcgctgcgccaggccatgtacgcccagggcgtgcagctgtattgcgcgccgaccgccgacgaccgcgactcctgggccagctcgatggtgcatgtcgccctggagggacgtgtcttcgtactgtcggcgtgccaggcgatccgcctgtccgagtatccgccggagcaccgcgccgcgttcggcctggattgcccggaggaagggttcgtgatgcgcggcggcagcatgatcgtcagcccgctgggtgaggtcctcgccgggccggtctacgaaagcgagaccgaactctacgccgacctcgacctcagccaactggaaaagggcaatctggatttcgacccatgcgggcattattcgcggccggacgtgttccagctgaaggtcaacaccgcgccgctgcgggcggtgaacttcagcgacgagtag

SEQ ID NO: 345007 - DNA, 312 bp, Pseudomonas aeruginosa
atgagcggaaaagcccttcaccggtgcgccgggctgctgacgctcctggccacgctcggagcgtccgcccatggcgccgacgagatgcgcgacctgctgccgatctgctccagttgccacggcgccgacggccatggcgtcgcgccgaacttcccgaagctggctggccagcacgaggcgtacctgcgcaagcagatgcaggacttccgcagcggggcacgcaaggacccggcgatgtcacccatcgccgccggcctctccgatacgcagatagaggccgcggcgcgctacttcgccggccaggagccctga

SEQ ID NO: 345008 - DNA, 1584 bp, Pseudomonas aeruginosa
atgtacaacgcccgtcccgccttggccttcggcgtcctgccgatggccctctgcgccgcggcctcgctcgcctccgccgcgccgcccgacagctcgcccggcgaagccgagcgcctgttccaggacaactgcaccacctgccacggcgccgaccgcggcggcttcatcgctccggcgctgcacagcgccgcgctgaactccagcgagacggcgctacgctcgatgatcatgttcggcattcccgacaccctcatgccgccctggctgggcgtgctcgaggacgggcagatccgcgccctggcgcacttcatcaagaccaccccgcgcggcaagcccgaatggaccctggaggacatccgcaactcggtcgagatcctcgcggacgagtccacgcttcccgacaagccggtgtacgacggcgacgtgcgcgacctgatggcggtcatggtccgcggccggcacggcaaggcgccggccgcgcgggtggtcttctacgacggcaagagcaaccggcaggtgggcgagatcgccaccgaatatgcgccgcacatcctcgactacgatccggtcaacccgcgctggggctacctgaagaccgacacctcggaggtctacaagatcgatctctactcgctgaaggcggtacgcaaggtaaaggccggcctgagcgggccgtcgatcgcggtatcggcggacggccgctacctgctgtccggctccttcgccccgggaatcgtcaccctgctggacgcacgcaccctggagccgctcagccgcgtcgagctgcgcggcaccgactacgacggcaagcccgtggagtcggcttccagcatggtcatcgccagcccgctggacaacaccttcgccatcgccgtccggcagaccggccaggtctggatactcgacccccggcagccgcaggcgcccatcgtcagccgcatcgaaaaggtcgggcgcttcgttcacgacgccttcctcgccccggatcgccgccacatgttcctcgccgattacgtcggcaacgccttcgcggtggtcgacctgcagcaacgcaggctggtcaagaccctcgagggcggttgccagccccacgtcggctccggcgcggtcacgccgatcggcgggcggatgctggcattcggcaccaatatcggcacctgcgacaagaagagcgtcgtgacggtctgggatgcgaagaccttcgaaatggtcaagcagatcccggtttcaggcgccaccgagtcgccggcggcgcatccggacgcaccctacgtggccgtcgatatcgtcgacaaggaccgccgcgcgcggcatgtcgaactgatcgacaagaacaccctgagcgtggtcaggaccttggaggccgacgggcacctgtacttccccgagtacacccgcgacggcaaatacctctatgtcagcggcggctataccggcgaccgcctgcacatctacgacagccacagcctcgaagaagtggccagctatccgctggagacgccggccgggatcttctcccgtgcccgcaccgagtggggcaccgtgggcctgccgctggccctggaagggagcgtgaagccatga

SEQ ID NO: 345009 - DNA, 1614 bp, Pseudomonas aeruginosa
atgcgcgggatacaccagcttccgctgctgctggaacggggcggcaggcattcgctgcaacaacagctgctcgaacagttgcgcggcaagctgctcactggcgtgttgcggcccggccagcaactgccgccgattcgcgaattcgcccggagcctcggagtggcgcgcaacaccgtgctgcaggtctacgagcacctgagcgccgaaggctacatcctcagccacgggacgcgcggcaccttcgtcgccgatccgctgcccgaccgcagcctctccacctgccaggtacgtcctcgccctgccacgcggagcgcaccgacggccctcctgccggacatgcgccagccgttgcccgagtccccgggggtcaccgccacccgggagtgcgtcgaggcgcccatcgatttcagtctcggccgcccctccgccgagctctttccccaggaaacctggttcaaggcctcggcccggcaggcccggcgcaacccccgctacctgaccgactacgcgccctcggcaggcgatgcgggcctgcgccagtgcctggtggagcatctgggtcggatgcgcgggatcggttgcgacgcggaagacatcgtcatcgtctcgggtatccaggaggcgctcagcctgatcgtctcgctgttgccgcaggacggacgcccggtggtagtggaaagccccggctatgccggcgcctgcaacctgttcgcctatcatcggcgcgaaacgctgccggtggcggtggacgaccagggcctgtgcgtagcgcatttgcccgaacgcgcctgcgccctggcctacgtgacgccctcgcggcactacccgctgggcatgacgctctccctggagcgccgccgcaccctgctggcctgggcgcagcgccagggcgcgtacatcctcgaagacgactacgacggcgacttccgctaccagcgcgtgccgttgccagccctgaaggccttcgaccacgagcgggtgatctacctcgggaccttctccaagagcctcggcgcgggcctgcgcctgggctacgtggtctgcccgcccggcctgcgcgaggccatggtgcgtgccaaggcgctgctcaatcacgcctgcccctggctgccgcaggtagtcctcgccgacttccttcgctgcggtgcctatgccgcgcacttgaggctcattcgtggcgagtaccggcgccggcgcgactgcctgatcgcggcggtcgagcgcctgttaccgggcagcgccttcagcggcgtggactgcggcatgcacctgtgctggcaactgccccccggcctgccctcggcgcatgccctggcgcgggcctgcgccgaggaaggcatccgcgtctatacgctcgaccaggccgccgccatcttccccaaggagggcctggcgagcgaacgcctgctgctgcttggctacgccgcgctttcgctgcagcacatcgcctgcggcatccagcggatcgcccggatcgccgcgcacctcgagcgccgggccgacaaccgcccttccccgcccagcgccccgtcccgcgcctgtacccctgaaccgggcgcaccttgtacccatggccgcccgcatgacgccgctaccctgccggacagtccatag

SEQ ID NO: 345010 - DNA, 741 bp, Pseudomonas aeruginosa
atgagtgaattcaacgagcgcttcgccgtcgtcaccggcgccagctccggcatcggcctgcaactgaccgagacgctgctcgcgcaaggcgcaacggtcctggcgatggccaggcatacgcagccgccggaagcgctgcaggcgcacctgggcgaacgcttgcactggctggcgggcgacgtcacctgcgagcgggacctggctgccctggccgcgcgcgccgcatccatcggggcggtcgattacctggtgccgaatgccggcatcgcccggctcgcggacgggctcgacagccaggccttcgagcagcaatggcgggtcaatggcgccggggcgctgaacaccttcgccgtgctcagccagcagatgcgtacgccggccagcgtggttttcatcggcactttcctgacccaggtgaccttccccggcctcgccgcctacatcgcctccaagaccgcgctgatcgcccaggccaggacgctggcgatggagtgggcgggcaaaggcgtgcggatcaacgtcgtctcccccggccccaccgccaccccgatctggcattcgctggggttgagcggcgaccaggtggagtccgtcacccgcgacatcaacctgcgactggtcgacggcagcttcctcagcccgcaggagatcgtcgatgtcgtgaccttcctgctgtcgacgaagtccgccggcctctatggccaggagctgatcgtcgacaagggctacggactgcgctga

SEQ ID NO: 345011 - DNA, 363 bp, Pseudomonas aeruginosa
atgaaacgcgtatccctgttcgtcgcactgaccctggcaaccgctactcccttttcctacgccaccgaggtggtttccacggagcgtgaccacagcgtcggctacggtgccggcggcgtcgtcggggtcatggtcggcgcggcgctgggcgggccgttcggggcgatcgccggtgccgccctgggcgccctgggcggtggtgccgtccagcaggcgacgggcctgagcgagaacgcctacatcgtacgccacgcggacggctcgaccgaacgcttccgctcccctaacgcagagttcgagaccggcgatccggtgcaggtgcaaggcatccgtctcgtgccggcctcggccagctcccggtag

SEQ ID NO: 345012 - DNA, 264 bp, Pseudomonas aeruginosa
atgatcgaccgcttggagagaatcctaaagggagaattgcagataacagataccgacaaacggttttatactcacgagatcagggagttagagcgctaccggaatctagggattaaggatagggaaataccagagaactatgatgaagtatggaacaatacccactcggcaactttagaagactataagattgatgagagaaagcagccgctgtacacgccagaggctgatgaggcatattttaaatcgcaggagggaaagtga

SEQ ID NO: 345013 - DNA, 882 bp, Pseudomonas aeruginosa
atgcgcattcgcctgttcgccctctgcctgctgctgggcggttgccagtcccagctgccgccgttgcccgagtggcaaggtccggagggacgcgactatccacggaccggacgcatcgtcgacctgcgcagcggtgcgacgttgacccccgggcaactgctcgaacgcctggctgtggcgtcacgggtgatcgttggcgagaagcacgacaaccccgaccatcacgccctcgaactatggctggcgcgggccctgggcgaacgccgggcgcaaggcagcctgctgctggaaatgctcggtcccgaccagcagccgcgtgtcgatgcgatcagggcgcaacgtaaggccggcaagccggtggcgaacctggagcaggccctggactggcggaaaggttgggactggtctcagtacggacccctggtgacctgggcgctcgcgcaacccgcgccattgctcgcggcgaatctcgagcggagcgagatcatgcggatctacaaggaacgcccgctgcccgcgggaacggcttcccggcgcgacagcgtgcgcctgccgctactcgcgcagattcgcgaatcccactgcggcatgcttcccgatgaccaattgccggcaatgctcgccgtccagcagcaacgcgaccggcgcatggccgagcgccttcgcgatgcgccactgccggcgctgctcgtcgccggcgggttccacgcgcggcgcgaccttggcgtgccggtccacctgcgtgaccttggcgtgcaggaggtgcgggtgctgctgctggtcgaagcgcgccaggcggtgacgacgcgcgaggccgactatgcctggtatacgccggcgctgccggagaaggactattgcgcggacatgcaggcgcgctga

SEQ ID NO: 345014 - DNA, 510 bp, Pseudomonas aeruginosa
atgcgccgattcagcctgcgcctcgccctgctgctcctgttcggcctgctgctctacgcctgccgcagcgatccggaccctgtacgcctggccccaggaatagcggcgacgaattaccggaccttcttcatccaggcggtacgcgccgaaggccaccgcatcgacttcgaggagcgcttcgatacagccgtgcgccgagccctggaggccaagggctatcgctaccaggcggaacacggcgacctgcgggtgatctatgccctcggtctgcggcgccagccgggcctggaactgcgccccgtgataacccgggatggcgtcttcacccagacccagttgaccgaagacagcgaggccaggctggccctgcgcatcctcgacgagcgcgacggccggatcctcctggaaagcgtgctcggccgtcggctgcacgatccggcgctgacccaggaagccttcgacagaggcgtggcgcaactgctgaagggtttcccggcacgccagcgctga

SEQ ID NO: 345015 - DNA, 570 bp, Pseudomonas aeruginosa
atggctgacgaacagcagcagaccctggacccgcaagcccccgagcagaccgatgcgccggaagcagccaaggatctgaccgcccgcgtgcaggaactggaagagcaactggccgcggcccaggaccagtccctgcgcctggtcgccgacctgcagaacgtgcgccgccgcgccgagcaggacgtggagaaggcgcacaagttcgccctggagaagttcgccggcgacctgctggcggtggtcgacaccctcgagcgcggcctgcagatgtccaatcccgacgacgaagcgatcaggccgatgcgcgaagggatggagctgaccctgaagatgttcgacgacaccctgcgccgctaccaggtggaggcgatcaaccccgagggcgagcccttcaatcccgagcagcaccaggcgatggtgatggaggagagcgcgaccgccgagcccggcagcgtgctgaaggtgttccaaaagggctacctgatcagcggtcgcctgctgcgcccggcgatggtcgtggtgagcaaggcgccgagcgaaaccccaccgtcgatcgacgaacaggcttga

SEQ ID NO: 345016 - DNA, 303 bp, Pseudomonas aeruginosa
atggctgagatcgccgtcgaggtggtctatgccctgcccgagcgccaggcgctgctgcgcctgagcgtaccggcggggaccagcgcgcgcgaagcggtgcggctctctggtatcgccgaggtttttccggaactggacatacagcgctgtccgctgggtatcttcggcaaggccctggcgaatccggaggagcggccgttggaggccggtgagcgggtggagatctaccggccgttgatcgccgaccccaaggaggtccgcaagcagcgcgccgcgcgggcccgggccgagcgcggcgactga

SEQ ID NO: 345017 - DNA, 537 bp, Pseudomonas aeruginosa
atgcacaggatcgcggtgatcgtgctcggcacgctgtggagcgtcgtcgggctggccggggagggggcgacgccggtgcaggggtgcgcggagctcgccgaggcgacgtccgctcccgaggataatttcaggccgccactggagggcgaagtgatcgacaagggccgcgcctatttccacagcgcgccgcgcgccgattgcgtcaccgggttcttcgtggttcccggcgacttcgtcactgtctacaagccgggcggcgagtggctgaacgtcatgtacgtggcccgggacggcaaggaaaccagcggctggctgctggagaagcgcgtccgcctgcgccaggcctatggcgctcctgacgagccggcgcagccagtccggcctccgaacgcgtcgcgcttccgccggccggcgggcgtcaggcgcagcgcaggcgattgcggccgtcgcgcttggcctcgtagagcgcctcgtcgacccgccgcagcaggtcgtcgctgccttcgccgggccgcaggtcggcacaaccgaggctga

SEQ ID NO: 345018 - DNA, 276 bp, Pseudomonas aeruginosa
atgcttctcaagcgtctggctgtcgctggttttcttttcttactagcgcttattgtcattatcttcgtattggaaaatctggagagtagtcatgtgacgcttttggggaggcagtctccggagcttcctctggcgctcttgcttgtgtcgtcttttatcatgggtggactgcttgtttttcttttgagccttcctggtttcatgcgcacgcgtaacatgctttccggcttgcgatcggagctggcaaagctacgggcaaagatgttggatagctga

SEQ ID NO: 345019 - DNA, 1233 bp, Pseudomonas aeruginosa
ttgagcttggccagaaatactttttggaattttttaggcgtattgattccttccttggcagcgctgcctgccattggttatctggccagagtcttaggggttgagagtttcgggcttttgactctctcttttgccatcattggatatgccagcatatttgacttgggtttgtcgagggccgtcatcagagaggtggctctgaacacaggtagcgattcggaaatcaacaaggtcgttgggacttctaccttagttgttgctgtcgcaggtttcatctgctcgttgctcttgtatctcaatagtgaacacctggcctcgtcgttgggtgtgactgcagagaactgggcagatgtggtcgtagggcttaaatacctgagttttgctatagttcccttgttgctgagcacggtctggtttgcctttttggaagggtgtggaaatttcaggagcctgaatttcctgaagattatttctggcttggctgtggctattgtccctgctgcttgggtttgggtcagtggggaggaacgattttctgtagcgatgctggggcttgttgcctcgcgcatattcgccatggcgctggcatatgtattttgcgtgtttccttcccggctcagagtgcatgtgtttgattatcttactttcaaacggctaattaactacggaggatggatcactgttagtaattttattagccctgtaatggtttattttgacaggttctttatatccagttatttgggggcggccaccgtcgccttgtattctgctccttctgaagtggtcggtcggattgctttcattcccacctccatttctcgcgtcatatttcagcgtttgagtctgggcacgtctgatgaaatgcaaaccagaattgcctacaggatgaccttcgttatgtgtggtttgtcctcgactctcatattctttggtagtgatataattctttctgtgtggttgggtgacaagtatcttggggatgcttctaatgtactcaagattcttgctatcggctttttcttcaattccttggcgcagattccttttgccaagattcaagcgaagggaaattccaggctgacggcgatgttacatctttccgaagttgttccatatttggctttgttatattttcttgttctgaatttttccattgtgggggcggcaatagcctggaccgtcagggtctctgtcgattttttactattggaatacttctccagaaattag

SEQ ID NO: 345020 - DNA, 1200 bp, Pseudomonas aeruginosa
gtgggaggtagtggtttttggagtgaaaagctgattggttttccacttcgtaagtttttctttgtattgatttcacttttcttgattcttatctttctgttggagcgaaagagtctttctgtaattctttgtctttctctggtttcagttttctttatcgtttggggcggtgttcttccttatcttaatgattactggggaagtaattttcaggatgcttcatcgctctttggtttgatgatgctttgtattctttcaactattggttcagatagggtcttgcattccatagtttctgtcgccttctgtttttcctttgtcctggccgcgatacattgtgttttgtattttggatttgctgtaggagcgatagatacctcatgggttaatgacttcttttaccagaatctcgctaggaaaggagagatcttcatattcacgaaagaacccagtatcagggtcttctgggccagcacttcctttattttggtcggttatacaatcgctctttttgggtatttggcttcgcgtggcttctttcgccggttgctggtcctggttgcgctctctatatttatatttgcggcttatgcgtccgatacgagagctttattgggatacatggtgtttgtaccttgtttctatattttctttagagcggctgctgctctgctttatccgttttcttccgggatcaaggtcgcactgtatattgtcggcatgattttgctggaattgcttgtgctgcttgcagttactccctccattctgatgctgtttgggttgaacaaagagggagaagggagtgaacgagcagatcagattgctgccatatatcatactttgtctgaaaatattttctggggtatcggtcttggtggtaactccgaatacctgattagatcggaacaggccccttggtcctatgagatgtcactttgggcgttggtgatgaaacttggattcattggcagcgctgtattgctcagtattctatatttatctctggcgatccctcaggccggtccccctccttcgcttgaaaggtgtaggcttgtcaggtttctgtgtgcagctggttatgggtatcttatagtagtaagcaccaatcctttcctgttcagtcttattggctttgcaacagtcatggttttttattcgtggtacgtatatgcggggcgaaagaatgtcgggtcttga

SEQ ID NO: 345021 - DNA, 888 bp, Pseudomonas aeruginosa
atgtcgggtcttgaaggtctaaatctgtacgctgtaatagttgcttacttcccagaggagcatgctttatcctgcctggtcaggtcgttgacctctcaggggtgcaagggcgttgtggtctttcagaattcgctgctttcctccaccttcttagatgaacatacggctgagtgtgtatttttgggtgaaggaaaaaaccttgggctgggggccgcgataaatcaatcgtttgattatctaaaaacaaagggggccgatgctgtattcaccttcgatcaggactccagtcttcacgatggatttgtccagcatatgcgtgatatgtaccagggtttaattgataagcacgtacctttctcagctgttgttccgaaaatagtggacaggcgttccacaagttttgaatatatgctgccagaggttcagcaaaacgaccttccgcaagacctgaagtttttaagggtcgggctgcagtctgggatgttgataaattgcgagatgtggcaggaaaataagttcgatgatggactcttcatcgagtatgttgatactgagtggtgctatcgtctcggatatgaaggaaaatatctttgcttagccgaaaaggctattatgtatcatgaagtctcggatgaattgcctagaaaggtactggggttctacttccttaagtactcgccgatacggcgatattatttctttcgtaattcaatatttcttctgcggcaaaagtatgtgccgatctattttaaaataaggattttgacagcctttggtaatcgtattgtatctatgattttcttttcggatgacaggcgtcggtcttttaccatgaccatgaaaggcattcttcatggcctcggttctgtgaaagggcctttgctctag

SEQ ID NO: 345022 - DNA, 1305 bp, Pseudomonas aeruginosa
atgggaaagagagtcctgataataagtaataatgctttgtctttttcggcgaataatggaagaaccctgaattctttcttttccgattatgatggtgagaaactggcccagcttttctttaactctgaaatacctcagtccaaggtcgttaagcgctttttcaatgtaagggcatttgatcagttgcgccagcttttcttcaagggggccgaagcggggagtgaggtgacgtcatttatcaattatgtcggcgcggcagcaagcgggtccgtctctggatctgtaaaagttcgacttatcggcttcttgaattcctatcttgaatccctgaaactgtatttgcgcgatctgggctacaagtgtggcttgcaaaagaacaagcgattgatgtcctgggttgaagcgttttctcctcaatgtattttctttgtggctgggaactgcaagttttccatcgactatgcactttttctcagcactagattaggtatccctttgtatacctacatcacggatgactatgttatctcgaactatccggtcggtccgttcggtaaggtttatcatcgtggactccatagtcgttacgccgagcttctgcggcattcgagaaagactttctttattggggactctatgaaggccgcgtttgagagctcctatggttcgagcggtgatactctcataaactgcaacctgattgatcaacctgtaccgtctgggcgcgaactcgtagtgcctggtcatgtcagagtggtttttgcgggtgggctccatttgggtagagattccagtatagtatcgttcgctacgcttatgtctgaagcatgtagtcaagttggtatttcgtatactatcgatctttattcaggtcaaaatatttctgctgccatgctttcccgcttcgagtcttcaggcatacattatcgaggatctgtttcctgggatgatttgcagattgagctcaagaaggcagattttctacttcatgtagagagttttgcggaaaagtattctgacaagaccaaatattccctttctaccaagctaccggagtatctatccagtggcgtctgcgtgattggttttggtccagagtctgttgcttccatcaggctcctaagggatcacaaaataggtttggcattgtcgggagatgctactgacgtgggcgtactaagcgaagccatacaggaaactttcataagaagttccttcggagaaaagggtgtgtcatttgcacgggcacacttttctcctgggctgattaagaagaagctatatgattcactacaggaggtttga

SEQ ID NO: 345023 - DNA, 3648 bp, Pseudomonas aeruginosa
atgcgatcgaaactactcctgctgttcatttgcctgttgctgccggcggtaccgctggccgccacccaggcgggtgcttccatgaccctgttcagccagatgcacgtcgagcacgaggacatggtgatcggcgaggacgactgggcctgggtgcgtcacaagggaaccctgcgggtcggcgtggccctcgacgaaacggcgccgttcaacgtgcgcctcgacgacgagaactacgaaggcatcaccgccgatgtcaccgcgctggtcgggcaattgctcggcatgcgcatcaagctggtggcgtacgccacccatgcggcggcgatcgaggcgctcggcgccgggcagatcgacctgctgggcagtcactacagcgcgctggagcagcccgcgctggtttccagccgaccctacgcccgggatcggctggccgtgttcaagcgggtcggcgagccgcgcaattcatcggcggacctcgccggtttgcgcgtggccgtggccagggagcacgacgaggaactgcgccagcgcttcccgcgtgcccgcttcgtggtgttcgacaatcacgacgaagcgatcgcggcggtagccttcggccacaccgacctttacatcgacgacgtgctcagcgcctaccagcggatcaatcgttccttctacggctacgtgaagttcgagcgtttcgccgatacccgcagcgacggagggtacggctacctcctgcgcagcgacgagacgcgcctgttgcgggtggtcaacgccgccatcggcgccatcgaccaggatcgcctggagtacatcgcccggcgctgggtcggcggcggctccctgccgaccggcgagcgtatcgcgctgacgcccgaggaacgtcgctgggtcgcccggcatccggtggtacgcctggtgataaacgacgacctggcgccgctggccttcttcaactccaacgacgtgttttccgggatcacctccgacctgctggaaatgatctcccggcgcaccggcctgcatttccaggtttcctcccgcagtggcggctttccggaacagatcgccgcattgcagaaaggccaggccgacctggcgatcatgagccgcagcagccggcgcgaggagacgctgcgcttcacccgctccttcctgtcgacctccttcgtgctgatcgcccgggccgacgagaagggccgggcggaaagggtggggaacctggatggcaagcgcctggcgattccctcgggccacgtgggaatccagggggtgcgcgatcgttatccgcaggctgccgtcgtcgaggtcgagaccaccctcgacgcgatgaacctggtctacgaagggcgtgccgaagcggcggtggtgccgctggtttccgcccgttactacatcgtccgcctgttccacgagagactggcggtggccgaccaggttgccctcggcccggcgaccgccaactttgccgtgcgccgtggcgacacggagttgcagaccatcctcgacaaggccctgttgagcatttcccccggcgacctgagcgatgtcgtcaaccgctggcgctcgccgccaggcatgagtgggcagacctgggtcgactatacccggctgatcgcggaaatcgtcgcggcggcggcgggcctgctgctgctgagcctgggctgggtcacctaccagcgtcggcagattcgcgaccggctgcgcgtcgagcaggcgctcaacgaccagttgcagttcgtcgaggccctcaccgattccatgccgcccccgctctacgtgcgtgacgccaatgggcggatgctctcctgcaaccgcagctacctgagcagcgttggcctcgctgccgaacaggtgctgaaccggacggtgctcgaactgcccatggaaaacttcgagaccggcccccagttccatcgcaattacctcgaggccatgcgtgacggccggaccatcgagtcggtgcacgaggtggtcctgggtggcaggaaatgctggatcgaccactggatccagccgttccgcgacgccaacggtaccgtgcggggcgtcatctgcggctggctggacatttccgaacaccgcaaactggtcgctgaactcaaggaagcgaagaacctggcggacgaggcgagccgggccaagaccaccttcctggcgaccatgagccacgagatccgcacgccgatgaatgcggtgatcggcattctcgagctggcgctcaagcgcgccgataccggccgggtggaccgctccagcatcgagatcgcctatgcctcggcgaagagcctgctggaactgatcggcgatatcctcgacatcgcccgcatcgagtccggacgtctcggcctgtcgccgaagcgggccaatctgcgcgaactggtggagtcggtggcgcgggtgttcgaagggctggcccggcagaagcgcctgagcctgattctcgacatcgacgcgagcatcaatggcgacgtgctgctcgacgccatgcgtttcaagcagatcctgtccaacctggtcagcaacgcgatcaagttcaccgacgaaggctcgatcagcatccgcatcgacggtcacctggtggagccctcgctgctgcaggtcaacctctgcgtggaggataccggcatcggcatttccctgggcgaccagcagcaactgttccgtccgttcgcccaggtcgagcgcaatgtgcagaacaccgaaggaatcggactgggtctggtgatctgccgttcgctgtgcgagatgatgggtgggcgcctggtcatgagcagcgcgctcggacagggtacgcgggtcgacgtcgagctgcgcctgcaagtgctcgaaccggtcagcgtcagcgagcgtccggtccaggtcggcaaccgccaggcgcggcgcctgcaggtgctggtggtcgacgaccacgcggtcaaccggcagatcctccaccagcaactgagcttcctcggccatgacgtgcaggaggcggaaaacggcctggctgcgctcaatctgtggcacgagcagccgttcgacatggtcatcaccgactgccacatgccgttgatgaacggttccgacctggcccgctcgattcgccaggaagagcgcgagaacaaccaggagccggtggtcatcctcggcctcaccgcggatgcccagccggaggagatcgaacggtgcatccaggccgggatgaacgagtgcctgatcaagccgatcggtctcgacgtgctggaggagcgtctgctggccctcggcttcgccgaggagcaggaggagacctcgccggtgtccctcgatgccgagcccgtcgcggcgccgccgttgccgcttctgtacgacctggagtcgctgcatgcgctgacgggcggcgagccgagcatgcttcgtcgcctgctcgacgagttgctcaccagcaaccgcaaggatctggaagccctcgaaattctggtacaacgccaggagaccggcgaactggccgaactggcgcaccggatcaagggcgcggcgcgggtggtgcgcggcgagcaactggtggacagttgccggcgcctggaagaggcctgcctcaaccccaacgccgcgttttcccgggtggaggagtgcgccgtcggcgtgaagctggcgctcctcgccctggacgagggcctgctcggggaactggccgaatga

SEQ ID NO: 345024 - DNA, 618 bp, Pseudomonas aeruginosa
atgaatgacgccgccacgccttccccgcagccgccgatcgccctgctggtcgtcgacctgcaacgcggcatgcagcgcagcgacctgccgccacgcaacaaccccgacgccgaggcgcgcatcgccgagctgctcgccgcctggcgcgccaccggctggccggtggtgcacatccggcacatttcccggcagcccgcctcgccgttcgctcccggccagccgggcgtggagttccagccggcgctggcgccacgcgacgacgaagcggtgttcgagaagaacgtccccgacgccttcgtcaacagcggcctgcaacgctggctgcacgcccgcgacatccgccacctggcgatcgccggcgtggccacggagaattcggtggaagccagcgcgcgtagcgccggcaacctcggcttccacacctgggtggtcgcggacgcctgcttcaccttcgccaaaaccgacttccacggcattccgcgcagcgccgacgatgtgcacgccatggcgctggccaacctgcacggcgaatatgccgaggtgctgcatgccggcgaactgttgcagcgccttcggcgacgcggtgaagccggccggcaagacctcgccggagggtga

SEQ ID NO: 345025 - DNA, 1089 bp, Pseudomonas aeruginosa
atgccctccctgcgtcccacctggctgatcagcctgctgaccctggccggctgcaccggcagcgcccaccagggcccaccctcggatcatttcgacggcgagcgtttccgcaacatccagcccaccgagcagaagagcctgcgcgacctgctcaagtggcaatggaaccgtccgccgcagcgcccctggatcgccctgccgcccacggaaaccccggccagggtggacgaacgcgcatacggcgacgaattgcgggtcacctacatcaaccacgccaccctgctgatccagcaccgtggcctgaacatcctcaccgacccggtctggtcgcagcgagtcagcccgctccccttcatcggcccgaagcgccaccacccacccggactgaccctcgaccagttgccgccgatcgacctgatcctggtcagccacaaccactacgatcacctcgacctggaaagcctgcgccagctccaccggcgctggccggcggccaaggtggtcagcggcctgggcaacgccgggctgatccgccggaccggcttcgtcgatgtcgaggaaatcgactggtggcaggagctggcgctgggcgagggcatgaccctccacggcgtaccggtgcagcactggtcgtcgcgcacccgcagcgacaccaaccgcacgctctggctcggcttcgtcatcgactcgccggacggcccgttgctgttccccggcgataccgggctcggcccggagttcgagctgatccgccggcgcttcggcccgctgcgcttcgccgccctgccgatcggcgcctacgcgccgcgctggttcatgcgcaaccaccacatgaaccccgaggacgcggtgcaggcccatcgcacgctgcaggcgcaaaccagcatggccatccacttcggcaccttcaatctcaccgacgaagagcaggacgacccgccccgggcgctccgggcggcgctgctcgcccagggcgtggacgccaccagcttccgggcgccgaagccgggcgaacagtggcgcgtcgcgccgcgcgccgagcaggttcaggaggtcgaggacaccaggcgcgtgcagcaattgcggtag

SEQ ID NO: 345026 - DNA, 603 bp, Pseudomonas aeruginosa
atgagccgctatgccttcgcttccaccgacgacctggaaatcgcctacctggagtggagtccccagggcgaacgcaacgccgtcctgctccacggctggccggacagcccgcatggctggaaggccgtggcggaaaccctggcgagcgccggctaccgggtactggcgccggcccgcttcaggcatgccgcgacgccgcgcagcgggcaactggcggcgctgggttgtgacctgctggggctcatcgacagcctggcgctacgccgtcctctgctggtgggcatgactggggcgctcgcgcggtggccaatgctcgcggcctgcgcgagggcgttggctcaccgggaggcacagctgctgccgcgccgcgcctggctgtgccgaccctggtcctgcacggcggcgcggacgcctgtacccatcctgacggctcccgcggccgcgaacagtatttcagcggacgctaccggcgcctgctgctggatggtgtcggccacttcccgccgcgcgaggcggccctgcgaggcgctgcggaagcgctcgccggtagggcgaataaccgcatcgcggttatccgccgatgcggggcggggcggtggataa

SEQ ID NO: 345027 - DNA, 750 bp, Pseudomonas aeruginosa
atgccccaccgcgtaactttcggcgatacctttccggctgagcaacaggctgcgctgctggcgctggtcgagcaggcctacagccgcttcaccgcgcagttcgccagcgccgatgccgcccgcctgccgctgctggtacaggtggagccgagcacggacggccatgctggcgaggcccggaacggatgcgtgaggctgcggatcgcggcgtcctacgaagcggacgatctggcccgcatgatccatcacgaaatggtccacgcgctccagcagcacctgctccgtcccctcggtccctatgccctgccgacctggttcgccgaagggatggcggtcgcctgctccggccagggcattaccttctcgaaccgggacgaggagggattcggctggctggacatccatgaagccctcgagcaatccggccatgtggatgttccgctgatggacaggcactccgaggttccccagagctatccctgcaacgagcgctaccagctctggggctgtctgttcctctacgcctgcggcgatggtccgcgcctggatgaacgctacaagaaggacgacggcccgttcctccgcgccagcgagctcgagcgcgccctggccgtcatacggcactatgtcgaagcccggcaggcggatacagccgccggtttccaggccagcctcgccagcctctgccccaacccgccgcccacctacgccgacctggcggcccaactggcgcggtttctccaggattga

SEQ ID NO: 345028 - DNA, 2139 bp, Pseudomonas aeruginosa
atgcaaagtaaacgatacgttctgtgcggcaacgcgtccgccaaaggcatcagcgaagatccttcgcgcgatctgcggctgcggctctcgggcaaggccgggcacggcaacatcaccctgcggatcgaggatgtccacaccaaaatgtttcgtggcgtgccaccgctgttccatgacctgctggagatcgccacctacgtctacagcgccgatcaggtggtcagacgaggcgcggacgatgtcgacacctttggtgatgggtggcggcgcgacctgcactttgtggtaccggtgcgcaatcctgacttctggaacagcgcggaggtacaggagacgctgtgctcgacgctcagcttcctgtccgacgaccagtaccagtttgatttcgtcaaactcgaccaggatcatcagttccaggagtacctcgagttcaacgacacccagcatatatacgggatgccggagcaggtggtgatgttctccggcggcctggattctttggcgggagccatcgatgaggttgtaaaccagaagcggcgcgtgctcctggtcacccacaagtcaacctccaagctcaacaaacgtcaccgcaccctggaagagatgctggcccagaaagcgggcgacaacgtgccgcaccgcattaccgttcgggtccacaagaccaaagagctgaaccacgagtacacccagcgcagccggtcattcctgtatgtctccatcggcgcgacgattgcccggatgctcaacctcaagagcgtgcgcttctacgagaacggcgtgatcagcctgaacctgccggtgtgcgcccaagtggtcggtggccgcgcaacccggacgacgcatcccagggtgatgaggggcttccaggacatcgtctcgctggtagcgggcgagcctttcaccatcgagaacccgtacatctggaaaaccaaggctgacgtcgtcaaggtcatcacggatgctggttgccacgacctgatcaagcattcgatgacctgcacccacacctgggagatgacgaaccagcacacccactgcgggggctgctcgcaatgcatcgaccgtcgattcgcagttctcgccgccaaggctgatcaacacgatccgaccgaacactacaagttcgacgtgttcacccagagccgtgatgcccaagatcagaagaagaacgtggacaagatcatggccgcagcctatctggagcgggccaatcaggtgaatggcctcacggacgtggcgcagttcgtcagcagttaccccgacgtgggccgggtctttaagtatctgaactacaacagcgccgggcaggcagcgcagcgggtgttcgatctctacaagcggcacgccaatgaggtgatgggggcattggatgagctgcttagtcgtcacagcaaggagattcgggagcggacgcttcccggagattgcctgcttcaaacggcttatcaggcgaactccgtgatctcaatgcccgccgtggtgtcggcagaaaagctgccggacaacattttccgaaagcgcggtggtgtctgggaggcacggttccaaggtcggggacgacacaccatcctgatccagggcgtggacaagggggctgagtacatcaacctgttgctggcgttcccggatcgtgaaacctcggtttttgaaatcgtctgcggcagcgaaatcggggccgttgaatcggcagcgaacaccgggttggatcacgatgacatcgaagaggggtatcaagtgtctaacggcgtgccgctgggggatgctggcgtggtggcggacagaaaagcgatccagcagtaccgtggcagatacaacgatctgatcagtgaaaaggcggatgcggaggcagacggtgaccacgagcggcttgaagaaattcaaatcgaaatggctcaacttgtggctgctgtgacgggggcacagggaaaggggggcaagctacgcagggtcgctgacaggagaaagaacgtccgggacgccttccgcaacgcggttgaccgagccatcaagcaaatcgagaagtacgacaagccgctggctgagcacctgaaagccagtatcaagcacggcaacgaggtggtctaccggccggaaatgtcgatcacttgggacgtccgtccaatcgcgaacacctag

SEQ ID NO: 345029 - DNA, 789 bp, Pseudomonas aeruginosa
atggggcatgttcggctcggggtactgccaagaacgaaggcgtggaaggaggtcgtcgaactgatcgccgccggtgctgacgtctcccagatcgccaatgcgaccatcacggcggcggaaaaggccttctccttcgtgatggacgatgtgggctacaccgaggctgtctggttgatgacacagatggcgattgctgccaagaaaccggacatcaaccagcatctcgcggtagcgggcatccatctgcctgccgacccctccctcatcgatgtaaccacggcgatcacggaggccctagatcggcgggtggagagcaatggccagcgctccgacctcggcggcctcgccaaccgggctatcgtcggtgctgtaaacgatgtcctcgcccccaagttgcaatcacttttttcgtccgatccggacacgatgcgggccgccctcgcggacttgggaaagccgaaggagttcggcgaattttcccgacgcttctttgcccgactggccaatgaggcgctgcagtatttcctgagcaaggtcgtcaacacccagcttggcgatggaatgcgctttgccacgatgaatcagtccgcccagttcaatgcggcgctggaaacgcatacccgagaggcgtcggtcatcgtcgagaagttttcaagcgagtggttctcaaagcaccggtttcatgagggcggtgatatttccagaaaatcgtcggacggattcgcaggctatgcgctgaaaaagatgaaggacgagttgaaagcaggggcgcgcagcgatgcaaagtaa

SEQ ID NO: 345030 - DNA, 234 bp, Pseudomonas aeruginosa
atgagcaaaaaaaaggtcgtgagcattacgcagccgcaggcaagaacgctaaacgtcatctgccaaatcctagacagcacgggcctgccgcccaccgtcaaggaattagccgaggcgttggggattagtcatgccagcgcgcatgaacagatcagccagctggtacgcaaggggtatttgaagaaagaagaaaaaaaggcacggagcatcgtcgtcatcaagcgcaacgaatga

SEQ ID NO: 345031 - DNA, 462 bp, Pseudomonas aeruginosa
atgaatgcaccacaagttggcccgtctctggcggcgcaaattgccaaccttcccaaactggcaatgaacgatctttgggcaatttgggacaagtacttcccccaccgtccgccccaccacaaccgggcctacgtcgaaggccgcgtcgcctacaagattcaagaggaagctctgggtgccaagctgctcgtacagacgcagatggcgcggatcggcgaagcccaatccgccatcaaaactcagcgcggcgttgacgtgcaggtagtacccggcacggtgctggtgcgcgagttcgacaaccgcgagcaccgcgttaccgcgcaggccgatggctcttttgaatatgaaggccgccgtttcaagagcctgtccggggtcgcccgccacatcaccggcacccagtggtcggggccgctctttttcgggattaccaagaacaagccgaagcgaggtgacaaatga

SEQ ID NO: 345032 - DNA, 1365 bp, Pseudomonas aeruginosa
atgaacgccgttgtgaccaaaaaacgctgtgccgtctacacccgcgtctcgacggacgaacgccttgaccagtccttcaactcccttgatgcccagcgcgaggcgggccaagcctatatcgtgagccagcgcgctgagggctggctgccggtcggtgacgattacgacgatggtggttactccggcggcaacatggagcgcccggcgctgaaacgcctgatggccgacatcatggccgaccagatcgatattgtggtggtctacaagatcgaccgcttgacgcgcagcctgactgattttgccaagctggtggacattttcgagcgccacaaggtgtcgtttgtgtcggtcacgcagcagttcaacaccaccacgtcgatgggcaggctgatgctcaacatcctactgtccttcgcgcaattcgagcgcgaggtcaccggcgagcgcatccgcgacaaaatcgccgccagcaagcgcaagggactgtggatgggtggttacacgccgttgggctatgagatcaaagaccgcaggcttgtcatcgtagagaaagatgccgagatcatccggcgcattttcactcgattcaccgagacccgctgcatcgtcgacatcatccgcgagatggccctggaggggatcacgaccaaacccaaccgcctcaaggacggtagtgtgcgcaatggcacgccgatggacaaaaagtatctctccaagttgctgcgcaatccgatctatgtgggcgaaattcgccacaagggggcggtgtatgccggacagcacgaaccgatcatcacccgtcagttgtgggatcgggtgcaggcgattctgggcgaggatgcccatcagcgtatgggcaagacgcagacccggcacaagaccgacgcgctgctacgcggactgatgttcgggccggatggcggcaagtaccacatcacctatagcaagaagccctccgggaagaagtaccgttactacatccccaaggcggacagcaggtacggttaccgtagcagcaccaccgggatgattcccgccgaccagatcgaggaagtggtcgtaaacctgctggtcggtgcacttcagtcgcccgaaagcatccagggcgtctggaacaccgtgcgccacaagtacccggagatcgacgaaccgaccaccgttctggcgatgcgccgcctcggcgatgtctggaagcaactgtttcctgccgagcaggtacggctggtcaacctgctgatcgaacgtgtccagctcctctcggacggagttgacatcgtctggcgcgaatccggctggcaggaactggctggtgagctgcggccggacaccattggcggtgagatgttggaaatggaggtggtgtga

SEQ ID NO: 345033 - DNA, 477 bp, Pseudomonas aeruginosa
atgaatcggtcttccaaaaagctcattggcgacggcaaacctcacgaacgccgccacccgctggagggcggcggtgtacggatcaccacctttgttcctttccactttaagaaacgcggcatcaagaaggtgatcgtcgggccggaaggcgtcagccagccggttgccgtcaccgataccccggtgcttacccccgagcaggatcgtccgctgctcaaggcaatggggcgtggcatttactggcagcagttgatcgacaacggcacggtggccagcggtactgagattgccgaacgcgagggcatacatcgctccacggtcaacgatctgttgcggctggcgcttctcgccccggacattgtgcaggcagcctacgaaggacggcttccccgggcggtatctctggaagccatcctgcgggccaaggtgcccttggactggaatgagcaacgccggttgattgagtcattcggctag

SEQ ID NO: 345034 - DNA, 312 bp, Pseudomonas aeruginosa
atggcctattcaatggcactgtcccctggcttcggtggcaaaccgggccagcattccggcgtcggcttcagtgcgacgcccaccccccaaccgtcggaactgtccgagcgacgcttcctgaacgaagtcgagctggccaatcgctggggcatgtcccccaagacgctcacgcgctggcgcggactcggtcggggccctgtcttcaacaagttttcgaagaaggtggcctatcccttggacggcgagaacggcgtgctcgattacgagaagcgccatctctacgtctccacctctgaacgcgtgccggtttga

SEQ ID NO: 345035 - DNA, 483 bp, Pseudomonas aeruginosa
atgaacgatctgaccatctttcccgccgatctggctgccatgagcaccacccaactggtggcgctaccaatcgccgatttcgtcgatgccgaacgcaatgtcgatgaagccgtcgcctatctcaagcagttacgcagcaaactcgacgccgccaagctgcagcgctttggcgagctggcgcgcgctgcattgcgtgagtctggccgcgacttcggcactgcccacatcaacgacggcccgctacacgtcaagtatgagctccccaagaaagccagctggaatcagtcgctactgaaggagatggccgaacgtatcgtcgcctcgggcgacaaggtcgaggactacatcgacatcaagctgtcggtatccgaatcccgctacaccaactggccgacagcattgcaggagcagttcgccgctgcgcgcacggtcgaggaaggcaagccgaccatcaccctgacgctcgagggaggtgtggcatga

SEQ ID NO: 345036 - DNA, 846 bp, Pseudomonas aeruginosa
atgactcttcccattatctccgcgcagcagcgcatggccgagcgtaagggcgtgaaattgctgatgctgggcaaatccggcatcggcaaaaccacccggctcaaagatctcgaccccaccaccacgctgttcctcgacatcgaggctggtgatctggctgtggccgactgggcgggggacacgatccgcccggcgtcgtggccggagtcacgcgacttctttgtattcctcgcgggcccggacaagtcgctaccgcctgagagtgcgttctcccaggcgcacttcgatcacgtcgtcgagaagtacggggaccctgcacaactgggccgctaccagaccttcttcctcgactcgatcacgcagctgtcgcgccagtgcttcgcgtggtgcaagacgcagccgggcgcggtcagcgaccgcaccggcaagcccgacatgcgtggtgcctacggcctgctcggccaggaaatgatcagcgccttgacccacctgcagcacgcacgcggcaagaacgtcgtgttcgtggccatcctcgatgaacggctcgatgactacaaccgcaaggtgttcgtgccccagatcgagggcagcaaaaccgctctggaattacccggcatcgttgatgaagtcgtgacgctggctgagatcaagaccgacgacggcagcgcctaccgcgccttcatcacgcacaccgtcaatccctacggcttcccggccaaagaccgcagcggtcgcctcgacctgctggagcctccgcatctcggcgcgctgatcgccaagtgcgcgggcgtatctgccaggcctgccgcatcgaccgcccccgcacacatcgaatctcaggagtaa

SEQ ID NO: 345037 - DNA, 648 bp, Pseudomonas aeruginosa
atgaccaatcaatccacgaccagcaacaactggaacgacttcaacgacgccgaatcgcagcagtccggctttgatctgatccccaagggcaccgttgtcccggtgcgcatgaccctcaagcccggcggttacgacgacccgtcacagggttggagcggcggctacgccaccgagtctttcgatactggctccatctatctggccgccgaatttgtggttacggctggcgaccatgccaagcgaaagatgtggtcaaacatcggcctgcactcccagaagggaccgacctggggccagatggggcgcagcttcatccgcgccgcgctcaacagtgcccgcaacgtccacccgcaggacaacggcccacaggctgccgctgcgcgccgcatccagggcttccatgaactggatggcttggaatttctcgcccgcgtggacatcgagaaggacggcaagggtcaggaccgcaacgtggtcaaggtcgcggtcgaacccgatcaccccgactacgccaagctgatgggggttccgcccaaggctccgggcggtggcacttccggcgcaccggcgcaggcagctgcacctgcgtatcaggctccgactccgcaacgtgcacccgtgacgggcaaaccgtcgtgggcccagtga

SEQ ID NO: 345038 - DNA, 855 bp, Pseudomonas aeruginosa
atgaacgcatccatcctcactgccagccactacggcgtcgtgcatttcggcgatctcgactgcgaggcagttgtgctcaccaccggcgagcgcggctacgtccgcaaggaactggccaagttgctcggctttcacgaaaacaacacgggtcaccgatttcggcaaattctggccgatttcgcgcctaactcattgtcagagctggagaaatataactcaccgatttgtcttccgaacggtcgtcgggcgcagttctttcctgcaggagtgattaccaagatcgcgtccggcgtgatcgacgctgcgctcaaccagacactgcaccgtgcccggcagaagctggtgcccaactgcatgaagatcatgcgctcgctggccaccactggcgaggttgcgctgatcgatgaggccacgggctaccagcaccaccgcgcaccggatgcgcttcaggagctgatctccaagttgctgcgccagtcctgcgcatcatgggagcgccgtttccatccggactactaccgcgccatctatcggttgttcggctggaaataccagggccacgaccagaaccctccgcacgtcgtcggccagatcacgctgcgctgggtctacgggccggtgctgccagaggacttgctgggcgagatccgcaatcgcaagggcatctcgcagaagcaccaccagtggctgtccgatcagggactcgcgcatctggaatcgcagattcacgcggtcacggcgattgcgcgcagctcgatgagctatcccgacttcaagcgccgctgcgaggccgcctttgctggcgctgccctgcagttgggcctgctgctcgatgaactcgaggagggggcgtga

SEQ ID NO: 345039 - DNA, 501 bp, Pseudomonas aeruginosa
gtgaaatgctgggtctgcaaacgacaggcccggggctacggccacaccgacaatcgccacggtgtgggcgatccccggcgctatcccatcgactgggtgttctgttcccgtcgctgccaggacgcatttcacgcgctgtacggcaactggcagcgggccaaggaaggtcgcatcgacaagacggaggtcgccatgattgatccgtctgatgtcgaactggccgcaatgcgtcattgcctcaaggccttcggcgaggcagcgggcgagatcggcttcaccaagccgctgggcgattactccgaagccgaggccctgcgggtgatcgacgccatcgtcacttgctggtcggacgaaatggttgcgcaccacgagtccagcaagtttccgcccgttcggggcttgccgcccacgccggatccgctggcacccgatgccgccaatccgttcgcggatctggaggacgacctaccttgggaagaaccgaaggggaagaggccatga

SEQ ID NO: 345040 - DNA, 732 bp, Pseudomonas aeruginosa
atggacttcaattcctcatcgagtatcgcgggtcaggtcaccgccctggtcgacgccgggttgcagcaggcccgcgcccgccagcctgagcgccagtacctcggggcctcgcgcctcggggtggcctgcgagcgcgcgctgcagttcgagtacgccaaggctcccatcgaccacgggcgggacaccccgggtcggatgctgcgcatcttcgagcgtggccatgtcatggaggactgcatggtcgcgtggctgcgggacgcgagtttcgacctgcgcacacgcaagtccgacggcgagcagttcggcttctcggtggccgatggtcgcctgcaaggccacgtcgacggcgtcatcgtcggcggccccgatggcttcgcctttcccgcgctctgggaatgcaaatgtctgggtcacaaatcctggagtgatctggagaaaaagggcttggccatctccaagcccatctacgccgcgcaagtggcgatttaccaggcctatctcgaactgcacgaacacccggcgatcttcacggcgctcaacgccgacacgatggagatctacaccgagctcgtgccctttgacgcggcgctggcccagcgcatgtcggatcgggcggtgaaggtcatcacggcgacggaggcaggagagcttctgccacgggccttcaatgacccgacccacttcgaatgccgtatgtgcgcatggcaagaccgctgctggaggacgcaatga

SEQ ID NO: 345041 - DNA, 597 bp, Pseudomonas aeruginosa
atgagtgactaccgtgttcgcatctccgtgcgcaatgcccgtctactgcgtgccatcgagcgggcgggccacaggccgggcgcaccgttcgctgccgccgccggcatcagctactacggggcgctgttgccatacatcaacctcactcggtcgccgctgacgccggatggtttgctgcgggaatgcgcgtggaacctgtgtgatttcctgaacgcatccccctccgatctgtggtcggatgcccacctccagccgctggaaacgaaccattccagcatcgatctggatgcagacagcgtgcaagccctggcctatggagctgcgtctgccgacccgctgcgactggccagtcacgcgcaggcaggccgcatcattcaggatgccctcgattcgctgacgccgcgtgaggcggatgtgatccgtgagcgcttctttgtcggctcgtcgttcgacgagatcgccgagaagatggaggtcacgcgcgagcgcgtccgccagatcgagggcaaggccctgcgcaagttgcgccacgaatctcgcatcccgcacgagctggccggtatcgccgatgtgatcggaggtgccgccgatgcttga

SEQ ID NO: 345042 - DNA, 2292 bp, Pseudomonas aeruginosa
atgcttgacttcaacgacacccaaaaaccagttgagccccggctcatccttgatgacagcgaacgcgaggaactgcgtgccggactgatcgcgagcctttcctcggtgctggccacgctgtttccagcaggcaagagacgtcgtggcaagttcctgatcggcgacgtgctgggcagccccggcgacagcctcgaggtggtgctggacggcgagaagacggggctgtggacggatcgcgcgacgggcgatggcggcgacatctatgcgttgatcgccgcgcacctcggtatcgacgtgctgagcgactttccgcgcgtgctcgacgccgctgccgatctacttggacggtcgcgttccgcaccggtgcgcaaggccagcaagaaggacgtgccggtcgacgagctcggccccgccaccgcgaagtgggactacctcgatgcggcaggacatctcatcgccgtcgtctaccgctacgacccgcccgggcagaagaagcagttccgaccctgggatgccaagcggcgcaagatggcaccgcccgatccgcgcccgctctacaaccagccggggatgagcagtgccgcgcaggtggtgttggtcgagggcgagaaatgtgcgcaggcgctgatcgacgcgggcatcgtggccaccaccgcgatgcacggcgcgaacgccccggtcgacaagaccgactggtcgccgctgtccggcaaggccgtgttggtctggcccgaccgtgacaagccgggatgggactacgcggcacaagcggcgcaggccatcctgtcggcgggtgccaagtcctgccacatcctctacccgcccgaggaagctgccgagggctgggacgtggctgacgccatcgccgagggtttcgatgtcgccaccttcctcacccacggcccgcgcctgcagatgcacgacgtggccgatgacgtcgatccggtggtcagcagcgacgaatccgtctggggcaccgaggacgcgctggcgctgtccttcactcgccgctaccaccgcgactggcgctacgtggcggcgtggggccgttggctggtgtgggacggccaacgctggcgcaccgaggacacgctggcggctaccgacctgatccgcggcgtctgccgccagacggctgtgcgcgccgacaaccctaaggtcgccgccaagttggccagcgccagtacggtcggtggcgtggaacggctggcgcgcgctgaccgcaggcacgcggccaccacggacgaatgggacgccgatccgtggctgctcaacacgcctagtggcgtggtcgatctcaagaccggtcgcaagcgcgcgaacgaccgcgccgacaggatgaccaagatcaccacggccacgccgggtggcgactgcccgcagtggatggcattcctgtctgacatcgcgggcggcgatgttgatctgcaggcctacctgcagcggatggtcggctattgcctgaccggcgtgaccagcgcccacgcgctgtttttcctgtacggcacgggtgccaacggcaagagcgtgttcgccaacgtcatcagcaccatcctcggcgactacgccgccacggcgtctatggacaccttcgtcgaaacgcgcggcgaccgccatccgaccgatctggcgggcctgcgcggcgcgcgtttcgtgacggccatcgaaaccgagcagggacggcgcttgaacgagtccaaggtcaaggccatcaccggcggcgacaagatttccgcgcgcttcatgcgccaggacttcttcgagtacacgccgcagttcaagccggtgatcgtgggcaaccacaagcccgccatccgcaacattgacgaagcgatgaagcggcggatgcacatgatcccgttcacggtgacgattccgcccgaacggcgagatggccgcctgaccgaaaagctgctggccgagcgtgacgggattctggcgtgggccgtggccgggtgcctcgcatggcagcgggagggtttgaagccgcccgccagcgtggtgtcagcgaccgaggagtacttcgaggccgaggacgcgctggggcgctggcttgatgaacgctgcgtgcgcgaacccaacgccaagtcgctgaccgccgaactgttcaccgactggaagcagtgggcggaaacgtcgggcgagttcattggttcgcagcgacgcttctccgatctgctcatcacgcggggattggagaagtggcgcaacagcgtaggtgtgcggggattccaaggtatcggcctcaaacacccgcccatgcccgcttacaccccctatgcggacaactga

SEQ ID NO: 345043 - DNA, 465 bp, Pseudomonas aeruginosa
atgaccaccaccatcctcgccatcgatctgggcaccaccactggctgggcgctgcgcggcagcgacggccacatcaccagcggttccgagagcttccggccgcagcgtttcgaaggcggcggaatgcgcttcctgcgattcaaacgctggctcaccgagatcaagcaatcctgcgacagcatcgactgcctgcacttcgaggaggtgcgacgccacgtctccacggatgctgcccacgcttacggcgggttcctcgccacgcttacggcgtggtgcgagcaccaccagatcccgtaccagggcgttccagtcggcacgatcaagaagcacgccactggcaaaggcaacgccagcaaggatgagatggtggcgtccgcccgtgcccgtggtcatgccccggccgacgacaacgaggctgacgcgctggcgctgctgcactgggcagtcgagacgcaggaggagtga

SEQ ID NO: 345044 - DNA, 225 bp, Pseudomonas aeruginosa
atgacaacgctcgccaccgaacgcgagcaggcggtgcgttggctgattgccaaccggcggccagacgtctccatcgagcaggccgtgcgcgtcatgtgcatggcactgccgcgcgatctcaccaccctacaaatcctgcggcgcatcgccgaggaagaagaggccaagcagcatggccagccattcaactggcgcacacttcctggtctgccgcctcgcggatag

SEQ ID NO: 345045 - DNA, 378 bp, Pseudomonas aeruginosa
atgcccactgtctctcaacccaagaatctcggcgacctgctgaagtacgaagcgccgaacctctactcgcgtgaccaggacaccgtcgctgccgcgcagaacctgtcgctgggcaccgtggtgggccgcgaaacagccacgtccaagctcaaggccattgacccgagcgccacggacggcacggaaaccgccgttggcgtgctcggcaatgacgtcgatgcgacgctgatcgaccgcgaggacgcgatcttgatcgcccgacacgccatcgtctcgcgcggcgcattggtctggccgaccggcatcagcactgcgcacaaagtggccgccatcaagcaactcgcagaacgtggagtcctggcccgcgatagcgcctga

SEQ ID NO: 345046 - DNA, 390 bp, Pseudomonas aeruginosa
atggacgcgttcaacacctttccaccatcgccggtggtggtgacgctgtccggcggcgcactggaactgacgccgatccggctgggcgaattgccacggctgttggccgtgatgcgcccgctggcgtccgagctgagcgccgatcccgactggctggcactgctgggtcagcacggcgaggccgtgcttgatctgctggccatcaccacccgacgtgagcgcgcgtggatcaacgatctgccgttggacgacgcagtgcaactggccgccgccgtattcgaggtcaacgcggattttttcgtgggccgggtggtgccgggcatccagcgctcggcagacaagctggccccgctgatccgcagccttgggactgcgccgtcgcccgcctga

SEQ ID NO: 345047 - DNA, 216 bp, Pseudomonas aeruginosa
atgaccaagcagaccgtcatcaccatcgaccacgtgcgcgcagtgggcctgtgcgtgaacggtacgcgcacatggtttctgcgtcacgatctggatttccgcgccttcctgcgcgttggctgtgacgcagaaaccttgctggccaccggcgatgcaatggcgcagcgggtggtcgagcacgcacgcaatcagtccagccagcgggagcacggctga

SEQ ID NO: 345048 - DNA, 228 bp, Pseudomonas aeruginosa
atgagcgccactcgcaagatctgtctgctcgacgactggcgaaagatcgcgcgccgtgcctggagcattcgcctgtccatcgtcgcggccatcttcactgccgcagaagtggtggtgccgctgttcggggatgtactgccgcgcggggcgttcgtgctgctggctttcgccgcgagcgtgggcgcggccatcgcccgattggtggcgcagccggagatgcaccgatga

SEQ ID NO: 345049 - DNA, 501 bp, Pseudomonas aeruginosa
atgatccggccgccgcaacgtatgactgtggccgcattaacgctgtccgccgccgcgatggtcggcatcgtgctgcacgagggctacaccgaccgcgcagtgattccggtcaagggcgatgtgccgactattggtttcggcactaccaccggggtgaagttgggcgacacaaccacgcctcaaaaggcactggcccgtgcgctcacggatgtgcagcaattcgagggagcgctgaaaaactgtgtgactgtaccgctggcccaacatgagtacgacgcgctggtgagcttttcctacaacgtcggcagccgggcgttctgccagtccacgctggtcaggaaactgaacgccgaggactacgcaggggcctgcgccgagcttctgcgctggcgcttcttccagggcaaggactgcgcgctacccaccaacgcgcggctgtgcggcgggctggctacacggcgagaagctgaataccggcagtgcatcggggaacgaccatga

SEQ ID NO: 345050 - DNA, 516 bp, Pseudomonas aeruginosa
atgagtctgattccgtggccgtaccgctggctggccgccgccgtactggccactgccttgatcggcttcggctgggtcaagggcgcgggccacgttcaggcgcaatgggatgccgccgtgcaacaacaaaccctgcaagccgccgccgtccgtgagcggcaggcgcaagccacagtcaaggtcgtcaacgagtacgtcgaccgcgtccgcatcgtccgcgagaagggcgacaccatcatcaaggaggttccgatctatgtgcccgttcaagccgatgctgcttgcactatcaaccgtggctttgtgcgcctgcacgacgctgccgccgccggtgaactgcccaagcccgcccgagatgctgatgcggccgccacgggccttgcgctctctgccgtcgccggaacctttgccgccaactaccagacctgccacgaaaacgccgagcaactgagggcgttgcaagcgtggctcaaggagatgcaggcgaaagagaaagactcctcgcccagcccttga

SEQ ID NO: 345051 - DNA, 1836 bp, Pseudomonas aeruginosa
atggcccgcatcgaaaaccacaaatacagcatcgaggaggcgttccgagaatgcttctacatcgtccctgactaccagcgcgagtacgtctggacggacaaggaggtaaatcagctgcttgaggacatcggcgagcagatcgatgcgggcacgacgcgggaatacttcatcggcacggtgctggtgtcgccgaccgatcagaagagccactacgaggtcatcgacggccagcagcgcctgaccacgtttttcctgctgttgtgcgcgctcaagcatctgttccacggagagccgcaacgacaaatgattgccggactgatctcgaccagctacgtggacagcgacggcgaggtgcgcaccaacctgaagctggagccgcgttacgagagcgcaggcgaagtgatggccaaactggtggagctggacgccgaacctatggccgtgcgcgcaggcatccaggctgcgggcatcgccagcttcggctcgctggaaaatctggtcaacgcctacagcacgctgtaccgctatctgaaggacaactacgacgacgtcgcgaagctgaagaagtattggggctatctggccaacaacgtcgttttcatccagatctccaccgacgtcagtagcgcgctgaagattttcgagacgatcaacgagcgcggcgtgggcctgaacccgatggatttgctcaagaacctgttgttcacgcaggtcaagcaaacgcagttcacccagctcaaggacgaatggaaaaagatcaccaagccgctggagaaggagaaggaaaagccgctgcgcttcctgcgctacttcttgatggccaactacgcgatcaagaacgagcgcggcgatgcggtggttcgtgaggacgagatctacgactggttcattgccaaggacaacgcggcgctatgcgactaccaaggcaagcccttcgagttcgtccgcaaggtgatccgtaacgtcgaacactacctggcctttgccaacgggctgggcaacgacggaaagcccagtctggcgatggacagtctgaagcgcctgaccggtggcgcgttcagcttgcactacgtcttgctactggctgcggccaacttccccaaggcgctgttcgaccacttcgtagcgcagctcgagagcttcctcttttactacatcttcaccaagaccccgaccaaggatctggagcgcagtttctcccaatgggccgatgagctgcgcgcgattgcggagacgactgatgcggtgaagcagaaagttcagctcaacgcattcgtcgccgaccgttttgagaagaacatggcgggcaagtcacaggaattggccgatgccctaaaacgcttcaccttgtattcgatgcagcagtaccgcacacgctacttgctcgcgcgactgacccagcacgtcgaaatggcgttcagtgggctgaagaccccgggcagtctggagccgttcaccaatctggaaatcgagcacattctgcccaacaaaccagaggccgatctgcatgccaagtgggccaccgagaatcctgggaaggtctacgacgactacaagaatcggctgggcaacctgacattgctggagaaacccatcaacatcgtcgcgggcaatgacttttacgcggccaagcaggtcgagtacagcaagagtggcaactacctgacccgcagtctggtggcgttgaccgacgttgggcagaacacatccatttcccggatcaacaccaaactgacagcttttcctgcgtggaatgccgcgtccattgagaagcgccacgcattgctcattactctggcacaagaggtctggaagaccacggccatcgacgtctga

SEQ ID NO: 345052 - DNA, 1302 bp, Pseudomonas aeruginosa
atgttggacgaatactccatcgagcagcgcgcgacgcagattttcgatgcgcgcagcaaggaatatttctctgaggtgttgagctgctattcagcaggaaaccataggtcagcggtcgtgatgctctggtcggtcgtggtttgtgacctgctgttcaaacttcaacatttggttgatctctacggggatgccaaggccaagagcattctggccgatattggacagatgcagcaggataacgagcggtcgcccgtgtgggaaacgaagctggtggaatcggtggccgagcagacccaattactggacattgccgagcgtgagaatcttctccacctgcaacggcagcgacatcttgcagcgcacccggtggtcaacgcgaattttcagttgcatcggccaaaccgggacacagcccgcgccctgattcgcaacgcacttgacggtctgctcacgaaggctccgatcctttcgaagcagattgtgggtgatctggtcgacgaccttgaacaggcatcaggcatcctgatcgatgacaaaaagctgaaggcgtacttggagagcaagtatttctcacgcttcaatccggaggtcgaaaaggccgtattcaaagccctctggaaattcgtattccggttgacagacgaaaaatgcgagaagaaccgcgccatcaattacagcgcactgaacctgctctatagccgcaaccccggccagtttcgggcgcagatcgaagccgacagggattacttcagcacgatagcgactggcggcacagcgctggttttcttgatccactttctatcgcggtcgggccctatctacgaactgttggcagatcacgccaaaaccgcgattcagcatgtcgtggacaacgacgtagcgtcccgatgcttggcgtggttcacagcagcgtccttgccggagcacgccgagcgcttgcgtgaatggcttgttggcgaagcgtatccggagatcgggcgagaaatctgggatgctttgcgggaaatatcggactcaccggaatgggagaaaaccgtagtgcgtcttgcgagcgcgtactacgtggccagcaccagctacgacggtgcggacaagcgcttcaatgaggcgatccgacctctgctgccgaaatttgatctggacgactgcattgagctgattcgaggcatcgaacaaaacgggcagacgtgggagcgacgcggagcctacagagaccatagggaacttcgtgcccgtgcgttggagataaaccctgcggctgatttgaccgggtaccaagtgttcaatcgtcacctcggctga

SEQ ID NO: 345053 - DNA, 513 bp, Pseudomonas aeruginosa
atgaggcaggtgctcgatacggtatggcaacggcgcggcaccagctggctgtgggatgaggaagcacgcaatacagtctgtgcggctggcgaggtttggagtctgcggcagttcttgcaggccgccgtcccaaatgggaatgggtggccagaagatctgcccagcaacgacaaccagacgctggtggtggccgggctggaaggcagccttgatttgctggctcccgatcaggcagaaatttggcttggggacacgatcaaacgcgccattctttcgttccaggatgcctacgcgggcgaggctgcgctgatcttctggttgccacagggagatagtcgtctcagggtgcaggcgtccaccgacgcggtatcgtggttgtgcgaagcgccacaccgaggccagcagctcgacttcggccgtttgctctggggcgaggccaacgagtacccgcaggaaattctgctgcgcgaaggtgcaaaagcggcaggtctcttccacttgcgaattacgtga

SEQ ID NO: 345054 - DNA, 3210 bp, Pseudomonas aeruginosa
atggccaccaaaaaagaactactcgctcaggaagtcgccaaggccgtcggcgcaggcaagacggtcgcgttggaaaccgtcgatttcaacgatccgaaccgtcccaagacttgcctggaggtggacttcccgatcctacccgtcaatcaggtggcgatcattgaaggcaacgcgggcaagccgatctaccaaatgtcgaagtggtgggcacggcggcgttccagtgtgttccgctcgatgttgatcgcggcggccaccaaggccccggaagacaagtcgcacgcggccaagctggtgtgggacaactattacgccaaccaccagaagaaaggcgcgttcaagcacctgaaggtggccgacatcttcatgggcggcggcaccacactggtggaaggctcacgcctcggcatgcagatggtcggtaacgacctcaacccggtcgcatggtttgtagtcaagcaggaactggccaatgtcgacctggagcaagtgaaaaagctgctcgccgacatcgaggccgaggtcaagccgcagatcatgccgtactactactgcgacggcccggaaggtgaaaaaggaacgtggacgcacctgccgaccaagaaggtgatgcctgccgatttcgacccgctgaccatcccgcgcgacgagcgcaaggactaccgttacgaaggcccggagatcatctacaccttctgggccaagcacggcccttgtcaggtgacgggctgcggccatcgtacgccgatcatgaccagcccggtgatggcaataaagacactcacggtgaagcactgggagcattcgtgcagtaagtgcggcggcgaattccatgtagaggaggaatccgcgcggatggacccggatgcgccactgtatgtagcaccgtccgaacatccgttttccgtgctcgaccgccggaagggcgtgatctgcccgcattgcggtcatacggcaatggtcaatctcggcaagggcaagaacaagaaggtcgagttgagcctgctagtgcatccgcaatggctggccgggtcgcccaagcaggatgcacaaggccagccctatggcggctcggcgcaggacgacgtggccgcgaccacgcgttgggacagcgagcgcgcatccaagattcgcctgctggaggtgcgtggcgcattgccggacgaagtgacctgccctgaaacgaagatcacctttgcgccggaaatcggcacggtgccaaaaaaatcgcactacgcctgcgcagcctgcggcacggtgcaggatgtgctgacgaccatcaaggcgacgggcaagactgggccgatggctgcttacgcggtgcaaggctacgcgcccaagcgcgatgctgcaggcaaaccctacagcggtcgcttcttcgcggcctatggctcagcgcacgccaaacaatacgacaccgcgttcgctgaatgggaagcgcgtaaagatgccgacctgaaggactactggccgcgctccgaacttccctacggcttcatgacccaccacctgcaaggtggcgtaccgaatcacggcttcacccactggtggacgatgtacaacccgcgccagttattggtgcacgcacaactgctcaaggccattgttgaagtcggcgactacgactggaaggtgcgtgagtacgtgctcggtgctttccagaatttcttgcgcaatcaaaactcgctcgctttctggcacatgaaactcgacaagctggctcctgccatgtcgaacagcaatttccatccgaagaacaatgtggttgaagtcggtgtgttcccgccaatgggctatggaccgtggtcgtccacctatgaagttttattcaaaggtggggaatgggcgcaaacgccgtgggaggcagtgagtgcggagtacctaaatcggcacgcaccgagcatcgctggtgaagtgaccggtaaaagcgaaaaggtttacccaggtgacccgttgctaggcgcaacgacgtatcagggctcgtccaccgatcttgcgcagcttgaaagcggcagccttgatctggtcatcaccgatccaccgttcggcggactgttgcattactcggagctggccgattttttctacgtctggctgcgtttggcactcaagggcaagtacccacagattttcggcgcggaatacacgccgaaatcactggaggctgtggccaaccgggcacgcgagccggaagacccggatggtttctaccaacgcctgctcacccagtgctggcgcgaggcgcatcgcctattgaagcctagcggcatactggccttcaccttccaccacagcgaggacgaaccgtgggtggcggtgctggaatcgttgtttgacgccgggtactacctcgaagcgacgtatccgatacgctccgatgaaaccaagggcgaaggcgagttcggctccaagaccatcgaatacgacatcatccacgtttgccgcaagcgcacggaagaacccaagcccgtgagctggggccggatgcgccgagaagtgatggccgatgtacgccaactgcaggccatgttggaaaaccacgccaaggagggtctgcccgccgccgacatccaggtgatccggcgcggcaaagcactggaatatttctctcgccactacggcaaggtctatgtcgacgaggggcgcaccatctcggtcaaggatgcgctggtcggtatcaaccagctcatcgacgaagacgccgataaaggcaaggagccgccgcctgtgaatgccgagccgatgacgcgccagttcctgcgtacctttggcgcggccaccgaaatgaagcgtgaccagttgcagaaatttctgcgcggcaccatcaccacgccggatgactttgtgcagcgtggttggtgtagcgaagaaaaaaaagtgttcacacgcacgaatccgctcgatttcgcccgcgattggtcacgcaagcaccgcagtcgcctgacggctgatctggatcaggcactggtgctgattggtgcttgtttcgatggcagcggcatcaatgcctcggacacgctgaagaacgataacttcaaaccgcacgtggcgctcaagccgctgctggagtggctgcagaagaatggcccggatcaaactacccgcaacgcggcttcgcgcgcggtgtcgatcttcaccacctggcaagccagccaggcacccaagccgcagcagggttcgctgtttgatgacgatggggagtatgcgtaa

SEQ ID NO: 345055 - DNA, 2805 bp, Pseudomonas aeruginosa
gtgagttcaatatggccgtatccgggctcacgctggtggaagtttgatttccatacgcatacccctgcatcgaaggacacgccttggcatgacctaattggaagcgagggggccctgacgcccgaggactggctgctcaaatatatggcagccgggatcgattgcgttgcggttaccgatcacaacagcggcgcttggattgatcaactaaaagcggcatatgccgcaatgcaagcaaatccacctgctggatttcgtgagttgcatctgtttcccggtgttgagatttcagttaacggcggctttcatttgcttgctatcttcggcgctcaaaccacaacgagtgatatcgatacgctactcggtgcggtcaagtaccaaggcaccaagggagatagcgacggggtgacgcgcgaagctgcttccgaagtgatacaggccatcgtggcggcgggtggcttacccatccctgctcacgctgattgtgcaaaagggctactgcagcttgaagccgagggaggcgtgaagccgaaatttgatgccaatacggtcgctcaagttttggagtcgaacgacatccttgcgatggagttcgtgaatgcagatacatccaagcctgccatctacacccaacgaaagttgaaatgggcagaggtgcttggctcggattgccataattttcgtccaccctatccgaacgttccagggtcacgctacacctgggtcaagatggcaacaccgtcattggagggcctgcgacttgctctgctcgatggaaatggcgtctcgattcgtcgtagcgacgaggatgcatttgaccccttcaagacaccagagcacttcatcacgtcgatcacggtcaaggatgctcgtgcgatggggcgcaataacgcgtcagttttaaatttcagcccctacttcaatgctctggtcggtgggcgaggcacaggcaagtcaaccgtcattcatgcacttcgcttggcatccggtcgaaccggagaaatcaatcgccttgatgaaaagagcgagccccggcaaaccttcgaacagttcgtgaaggtttcaaagaatcgtgatgaccgaggtggtttgcttgaacaaacggcagtcgcgctggagttacatcgagatgcggtgccacaccgtctgacgtggcaacaaagttttgcgcagacggtcattgtcgaggagcatgagaatggtgaatggaagcgctccattagccaagaagtgtctccgcaacgattccctttgcggattttcagccaaggccagattgcggcgctggctggggagaatactcttgccctgctcggtgtaattgatgaggcagccgaaacgcaatctgcaaaaaattcctttgaggaagcgaagcgaaattatcttgctcagcgtgccaggctgcgtgagctggacgggcgactcaaagcaaatgctgagattcagcggcagtttcacgacgtggagcgcaaactaaaaaccttcgagcaagccgatcatgccgatgtgctgaaggcatatcagcgggcgcggcagcaaaatcaagcagtccaagaacagtttcaggcggcagatgacattgcgcaaaaaatccagagccttgctcaggaaatggctatcgaagtgctccaacaagaatctttcgatgcccaagcggatgctgacgtccttgcagcaattgcagccctgaacgaacgtgttttggttgcgcagaaggctgtggatactgcggcaatccagctctcaacatcacttaatgctctgcgccaagatgcaggcttgtcgtcctggaagcagcgaattgaagcggctaaacaggcttacgagaagctcaaagcggatttgctggcccagggtgtaaatgacccgaacgagtacgcccgattggtgcaggaaaagcagcggcttgaaggtgagagcaagaaaatggatctccttcagcaggagcgtgcccacctcgtcattgaatgcgaagcgctctggttgaatctttttaatgcacggaagaacatcagtgagacacgtcaggactttctcggccaagtgctcgcacagaatgatttcgtgcgtatcgacctggttccgtttggcaaggatgcgcgcaccgtagaacgctccttgcgcgaaatgttggatgtcttggatgagcgcttcgtgtcagacatccttgatatggacggcgatatcgtaagtagtggtcttgttgccgattggcttgtagctgccgatagcgaggtcggcctttcggcgctcaaggatcggctggtcgaggcgtgtggcggtggtggcgcgctgggaggcaaattcaagaactaccttcaacgcaaaagcgaagcccacccggagttcatcgaccatattcgctgctggtttcccgaggatagcctgctcgtcaactacagccgtaaaggcgacggcacagatttccagcctatcggtcaagcgtccgcagggcaacgagcggcagcgatgctggcatttttgctggcacaaggtgcagagccgctggtgctcgaccaaccagaagatgatctcgacaatcatctgatttacgaactggttgttcgccagatccgagaaaacaagctgcgtcgtcagctcattatcgtcacccacaacccgaacattgtggttaatggtgacgcagagatgctttttgcgcttgatttcaatggtcaatgcttcgtcaaaaccgaaggtgcattgcagcagcaaaacgtgcgtgacgaagtatgccgaattatggaaggcggtcgggaggctttctcacgccgctggcatcgactgggtcgaggattgtcatga

SEQ ID NO: 345056 - DNA, 879 bp, Pseudomonas aeruginosa
atgagccaacctgcgctgggcttcgttctggagccgctaattctctccctctcggctgtcctgccatcgcgcaaaacaccggacgggctgcttgcctcccgaaaattcaaacagatcaccgcgtccatcgaggcggttggcctgatcgagcccttgtcggtaggaaaggctgatcgcgaggggcagcatatcttgctggatgggcacacacgattggtggcgctgaagcagttgggcttcgacaaggcaccctgcctcgtggccaccgatgatgaaagctacacctacaacaaccggatcaatcgcctctccagcattcaggaacatctgatgatccgccgcgccgtcgagcggggtgtcacccccgaaaagctcgcgaaggctctggatgtggatatcagccacatcatcaagaaactgaacctgctcgacggcatctgcccagaggctgccgagttgctgcgtgaccaaaccttctccgccaaccttggcgctgtgctgcgcaagatgaaaccaacacggcaggtcgaatgcgtcgaactgatggtcagcgccaacaacatcacggtggcctacgcacaggccttggtggctgccacacccagcaatctgctggtcggcgagaccaagcccaagaaaatgaccggcgtcagcgccgatcagatggctaagatggagcgggaaatgggcaatctccaagagcagttcaagctggcggagcagacctatggccaggacattctcaacctcgtgctggccaagggctatctcgccaagctgatggccaacgaagccattcttcgccacctgacacggaatcaccccgacgtgctgaacgagtttgacagcatcgttcgcatggtggcgctggacaaataa

SEQ ID NO: 345057 - DNA, 912 bp, Pseudomonas aeruginosa
atgaatcaggacaaagagcatcgccacgcagaattgcggatgatcccgctgagccagatcgaggttctgaatcctcgcgaacgcaacagccgcgtgttcgaacagatcgtcggcaacatccagagtatcggcctgaaaaagcccatcatcgtgacgccacgcccggggaatgatagtgagcatttcctgctcatctgcggtgaggggcgtctcaaggccttcaagacactcggccaccaggaaatcccggcaatggtgatgaacgtcgacgacgaatcggccttcatcatgagcctgacggagaacatcgcacggcgcaaattcagtccgctggagctgttggctggcatcgagcaactgcgggatcagggttacgacaagaaaagcatcgcccagaaaacgggcctgagcccggagtacgtccaaggcatcctgtatctgctcaagaacggagaggagcgcctgttgatggcagtcggcagcggacgcatcccgctcaacgcggcgatcaccattgcgggcgctggcacggacgacaaagcgatccaggccgcgctacaggaagcctatgaatccggcaagctgcgtggcagtcaactgatccaagcacgacgggtcatcgaacgtcgccgcacgcaaggccgggccgtcggcggcaagatgtcatcccgcaaacccaatgcggacgtgaccacgtcgagtctggtgcgcaactaccagcgtgaagtcgagcgccagaagcagttggtcagaaaggcagagaccgcccagcgcaacctgctgttcatcgtcggcgcactgcgtcagttgctggcagacgaaaatttcaccaacctgctgcgcgcggaggggctggatacgctgccacagtatctggcggatcgtgtctgggcgcgagggagcggagcatga

SEQ ID NO: 345058 - DNA, 1494 bp, Pseudomonas aeruginosa
atgtcgaccgagcaccagcagtattcgacggaaaaccaagcggacaagatccgcgaatacgctgcccggcgcaacatcgagatcgttcgcacttatgccgacgagggcaagagcggcttgcgcatcgatgggcggcgagcgctgcagcagctgatcaaggacgtcgaggcaggcagcgcggacttccagatcatcctggtctacgacgtcagccgctggggccggtttcaggatgccgacgagagcgcttactacgaatacatctgccgccgcgccggaatccaggtcgcgtactgcgccgaacagttcgaaaacgacgggtcgcctgtgtccaccatcgtcaagggcgtcaagcgtgcgatggcgggcgaatacagtcgggagttgtcggcgaaggtgtttgctgggcagtgccgcctgatcgagttgggctttcggcaaggcgggcccgctggctatggtctgcgacgcgtgctggtcgatcagtccggcacgctcaaaggtgaattggctcgcggcgagcacaagagcctgcaaaccgaccgcgtcatccttcagccggggccggatgatgaggttgccgtggtcaaccagatctatcgctggtttgtcgctgacaacctgacggaactggacatcgccgaacggctgaacgcacaaggaacgtgcactgaccttgggcgggattggacacgagcgaccatccgcgaagtgttgtccaacgagaaatacatcggcaacaacatctacaaccggcgatccttcaaactcaagaagcaccgggtggtcaaccgccccgagatgtggatcaagaaggaaggcgcgttcgagggcatcgtgccaccggagctcttctacacggcgcagggcatcttgcgcgcaagggcacatcgctacagcgacgaggagttgatcgagaagctgcgcaatctttacctgcgccacggctacctgtctggcctgatcatcgatgaagctgaaggcatgccctcgtcagcggcctacgcgcatcgtttcggcagtctgatccgcgcgtaccaagccgtaggtttcactccggatcgagactaccagtatctggaagcgaatcagctcctgcgccgactacacccggaaatagtcggccagaccgaacgaatgatcgccgaggtcggcggcacggttgaacgcgacccggccaccgatctcctcaccgtgaatcgcgagttcaccgtctcgctggtgctggcccgttgccagatgctcgacaacgggcgacgtcgctggaaggtgcgcttcgacaccagtctcgcacccgacatcacggttgccgtgcggctcgatgaaaccaatcaggcggcactggattactacctgttgccacgactggacttcggccaaccccgcatccagttggccgatcacaacggcatcgagttcgagtgttaccgctttgatagcctggactacctgtatggcatggcccggcgcatccggataaggagggccgcatga

SEQ ID NO: 345059 - DNA, 666 bp, Pseudomonas aeruginosa
atgaaatccgacttcagttccctcgcgtttgtcgctcgccaaaacctcgtggcgtccggtgtttccatttcgcttggccacgcgcaacagttgcttacagcgagccttggatatggcagcctcgccgccatccaggcatccaccgaagaagcgcccggtattgctggggcagactttgtcatcctggacgtggctggcttgtccgcccgggcggcatcccttggctatggggcagcatcggatcaaatcaccgatgcgattgcctccgccatcaagagtgatcctgagccgccagccgttttcctgacaccgctcgacttcatcgaagatgttgcaggccggtttgccaatgacacggtgatggatcacgatgccgtgtccgacgcggccgccaatacgaacgcctatttcgaaggggcctacctcgaggcgactgagcccgaggaggcgctgaaggactgccgcgagttttgggagatcccggtcgaaggcaacgtcggcatggatcaagaccccgaaaagcctttcagtggcgacaacatcctggtcaaaggcgttgtgcgggtctggaaggctggacgggtctgcctcatgaatgacatggagctcgacattggcgctggtgtcgacgacagctactacgaccttgacgaagccgacgcgtag

SEQ ID NO: 345060 - DNA, 267 bp, Pseudomonas aeruginosa
atgctacgttcagacaccctccagatcacccccgagatcctgagcctgattgcccggatcgacgaatttaaaggcgcatggcgggccttaggaacgctcgcgcccgagcgtctttcagcgctgcggcgggtggcgaccatcgaaagcatcggttcaagcacccgtatcgagggcagcaagctgacggaccgagaggtggagcgtttgctctccaatctggccattcagtccttcgacacacgcgacgagcaggaggtggcgggttag

SEQ ID NO: 345061 - DNA, 465 bp, Pseudomonas aeruginosa
atgagcgacacgatacagaggcggcacttcaccttcttccatgccctgcgggtccgctgggcggaagtcgatccccagggaatcgtcttcaacggcaactacctgacctatctcgacgtcgccatcaccgagtactaccgccagctcggcatgacctacccggccgacctgctgcgcggcggcggcgacctgttcgcgctgaagagcaccctggaataccgcgcgccggcgcatttcgacgactggctggagatcggcacccgggtggcgcggctggggcgcagcagcctggtcttcgagctgggcatctggcgcgacgagcagttgctgaccatcggcgagctggtctacgtccatgcggatgcgcgcgagcgacggagccggcccctgccggactggctgcgcgagaagatcagggtgttcgagcggcaggccccagaggaatcaggggctcgtaccgagtag

SEQ ID NO: 345062 - DNA, 384 bp, Pseudomonas aeruginosa
atgccgtccacgtcccgccccgggtcgagtcttccacgcctgcgccacctggggctgctgccgttgtgcctggcgctggtcgcctgcggggattcggcggagccgcctccggccgccgacgtccagcgtgtccccgccgacgccgcgctggcgcaggtctattccgccagctgcaagctctgccacgccgatccggcttccggcgcgccgctgaccggcgccgccgcggcctgggcgccgcgcctggcgcagggcatggacaccctgctggaccacagcatcaacggctacaagggcatgccgcccatgggcatgtgcatgcagtgctcggaagagcagttccgcgcgttgatcgaattcatgtccgccgcacaagaccgataa

SEQ ID NO: 345063 - DNA, 195 bp, Pseudomonas aeruginosa
atggatctcgaccagcattacctgccgcgctaccagttcagcgaacgccaccagcggctgatcgccgcgccagccgccgccgtgcccgatgcggtggaagacctggtgcgcttcgacgacccgctggtacgcccccttctcgccctgcgcgaggctcctgggcggctggcctgctgggccggcacaacgacctga

SEQ ID NO: 345064 - DNA, 936 bp, Pseudomonas aeruginosa
atgttcatggccaacctggcctggacgaatgctttcgccgcatgttcgcacaatatcgatcgcggactgaatgccagtttcacactgcccgctcagatcaacctgaaaggcgcagccatcggcgatgagctggctacattcacctaccccctgtccacggcgggaggcagttactactgtaccagcgaggagctgtggcagatctcgctcaatgggctggaggcctcgacccaacccaaagtgtaccggaccaatatcaaaggcatcgggatcagggtcggacttaatctggatgcgagtagcgctttctggagccctcctttcagctggaggacgttgactggctatgccccgaaggaggtgaagatcagccttgtacgcaccgatatcggcgtcgcttccggaaagcttgccacccctttcaatgtgaccctgtccggtggcgggcttacctataccatccgaccgacaaacagcagcacgcacataaacaatgaagtgctgttcgcgggctgcacttccgtcaatagcgtgaccaatgtaccaatgggtctgcagactatcgataatctgcaagccggaaaggccgaaaacagacccttcaacttcgacatacgctgcgaagggttgaaccccaacacctccgtcccggtaaaggtctattttgaagggaactccagtgccgacggcttgctggctctttcgggatcgggtcaaccgtccgtggccagcggggtaggcatcgccctggtcagcgataagggcgtcaagctgccattcgccaaggcgcgctcgatacggatcgaacaccatcggtcggaagcggaaggcgaaatctatcggttctcgggcatcgctagctacgtacggttggcagacgaaatcaagccaggcaaggcggatgccagcatgacctatgtaatcgactacaactga

SEQ ID NO: 345065 - DNA, 561 bp, Pseudomonas aeruginosa
atggaggtgggccgcggaacggtcgcaccattcgatctcgccaccgagttttatcttggcaccaccccgatgacgcatatcccgatcaccggcagcagcctgcggactaccctggttcagaacatctacttcaccagttgccacaacccctattccgacccgaccgtcgacatgggccgtccctacgccgccctggtcaaacagggccaggtggaagaacgcccattctcgctgaccatccgctgcgacggcatgaacgccaccaccaagccgccggtgaagatctatttcgaaggcaataccgtgcgcgacggcctgctgcgcctgagcgacgagggccaggacggcgtggccaagggggtcgctatcgagctgaagaacgacaacggcgtggccctgcccttcgccaaggaacgcgcggtgtcgctggcctggcgcaacagcgcacccgacgccgagatctacggtttttccggcaaggcgaagtacgtcgcgaccggcggcgaggtcatcccgggcaaggccgacgccgtcctgacctacgtgctggaatacaactga

SEQ ID NO: 345066 - DNA, 1764 bp, Pseudomonas aeruginosa
atgaagagatttctgctcacgtggtatggaatcaccgattttcgcgcgtctctggggtttgagaataccgacggccctattgcgagcgcccttgcgggcgcgtcctactcggacatcattatcctgggttacacccggacggataatgatgccagcgaattgatcgaggcacagaagacgttcacgcttgaattggcgtcaatacgaagcatggggcaagagaaagactggaagcttactaatcagtttgtctccaggttcgccaatacctctgtcgcacatgaacattttgaagcctggctgaaaaagaaagccgccgccctgggctgcaacgcaaggatccgtttaaatagcgagaaactttaccagctcaacgacaccgaaggtatttacgctagcgcaatgcgggcgctggatggggttgaacaggagccaggtgaaaagctcgtcacgctctatctcagcccaggaactccggtgatggcctttgtctgggcgctcgcggcgctgagctaccctgagctcaaaaaaagactcatagcatcgtccatcattggcaaagcacctgaagtcatagcgttgcctgctgagtggcttgagcgacacagctcaaaacaggctgcgatccgaggcatctccaacgggttcgatgtgacattccatctttttggtgagcaacggatgcctgccttgttgagcatccggcaatttgagtcggcgcatcacatttttgtcaactcaaaagacttccctgctgcatgtatgcaaacctttattggctctcgggacctgcatgaacttaccgttgacccctgggatgatcgcgctgttcacgaacaaatcaccgagctggcaaagcaatttccagaaaaaacacgaattggaatcaatttaactggcggcacaaaattgatgtttgctggcgcgctctctgctgcacgtgaactgggcgctgttccgttttattttgacagcaagaatcgtcgcgtcatattcattgacagtgttcggcgcgaaaaaatcaggcagattgattcaatcgagacatttttgcacctgaatagcgatggtttggagattgcaggcagttccttcatgaaggatatatcgccaagtcgccaacttctgaccgagaccctttggctgcatcgtgacaaggtgcgtagattttatagagaactgaccgactataacaatgcattcaggccattcgagatttgtcgtgacggcttcaatttcaagctggatgacatggaggcagtatccgtccagggctacggattggatctgagatttgagaaatggcctgatttcgccaaatacctatctggcggctggttcgaggagtttgtttatttgcagtgcaaaccctacgaggatgctggcgtcattcaagacttgcgcatcaatgtcaagctgaacttgaatttagaagagtcaaaaggctattcgagcttcggtgttgaatacaacgagctggacatcacattcaccgacggttattcgctttatatcgtggaatgcaaggcgggcaatgtaacgcaagagcagattatgaagctgcagaaccttgtgcgcttctacggaggaattgaaggtcgcggtatcgttgcctgctgtgttccgccaaatactgagtcggccaagaaaaaaataaaagatgccagactgatgctttggagtggtgcatcactttctgagcagataacggcaatgatgaacagcatcactgagcgggctgaagcgagtgaggcaacgccatga

SEQ ID NO: 345067 - DNA, 804 bp, Pseudomonas aeruginosa
atgacaatggcaacatcacgcgcgcttcttgatgctttacaactgcccgacagcgcacgggtagaccagcgggttcccaagaagctgttgctggagaacggtgcgcccacggcatccgacaagcgcctgatcacggacgccattgaagaaatccagtggcttgccgcactcaagcccaacaccattggcgtacccagctaccgggacgcgcagcgtgaatacctggaagtcaccgtgcttggcttgaccctgcgtggcaccgtcaagcccgccagtctcgctcgccttgccgaattgatgcatcgggccgtgccgtatcccgtgttgctgcttgtgcaaggccaggcactgaccctctcgctggcgcacaaacgctgggcgcagaacgaggcaggtaaggtcgtgctcgacggcgaccccgtgttggcctcgctgccccacgcaaccgaagataccgccgcagtggaagacgcaatagcccccgaaatcgagcgcgccttcgtgcagtccctgtcgattgcacgccaaccccagaccacgctgcatgccctttatcagggttggatggagcgcgtgtgggccttgcaggcggcacggctgacgggaacctaccaggctgacacaaccccggaacaagcggctgcccgctggcaggcgctggctgattgtgagcggctggagaacgagatcggccgcctgcgagcgcaagccaccaaggaaaaacaactggcgcgccaggtagaactgaacctgacgctcaagcgcatccaggccgaactggccgctgcgcgccgacaactttga

SEQ ID NO: 345068 - DNA, 279 bp, Pseudomonas aeruginosa
atgaacaaagcctatccccttgccttctctctcttctgcctgatgacggcgagtgtccaggcggataatggttacgaagaatacagagaggcagaaaaacgctactgggaataccagaaagagcgaagcaaggaccgcatggaagcccgcaaggaacatcgcaaattccacgaagagcaagaacgcgaaagccgcaagcactacgaggaaatggaacgagaagacgcgaagcgtcgagcggagtactaccgcgaacgggagaaggcctaccatgaataa

SEQ ID NO: 345069 - DNA, 423 bp, Pseudomonas aeruginosa
atgggagcgcccggcgaggcggacgggtatttcgccgccgaggaagctggttccggagcgagcctcgaagagaagcgggacgaagaggcacaagaggtcagcgaagccccggtccatcggatcgatgacctgaccctgatgtacctgacccacgaggtctacctggatccctacgtttcctgtcggccgaaggtcctgggcgaacgttcgtacgtcgcctgctggaacgaaacctactcgggccgttccccgctgaatttctgggaatacgccgaaggcgacttcctggccctcaacgatcccgcgcgggcattggcgcaggggaagttcgccagagagaagcatatcggcgaagtgccgttgccgctgcccctggatatcgacctggaccagctggagcgggtgtatttgctgatgatgtag

SEQ ID NO: 345070 - DNA, 507 bp, Pseudomonas aeruginosa
atgaacatctccatccgtgcggagaccaccgccgacatcgatgccatcgcccgcctgaccgaagccgcgttccgccgggctgtgcatgccagccataccgagcagttcatcgtcgccgccctccgtcgtgccggctcgctgacactatcgctggtcgccgagggcaacggcgaactgttcggccatgtcgccgcctcaccggtgaccatcgacggcgcaccgggcggctggtacggcctcgcaccggtctcggtagagcccgaatggcaaggacgcggcatcggctcccggctgatccgccagttgctggccgaactgcgctcgctgggcgcggaaggttgcgtggtgctgggtgaaccggcctactacagccgcttcggcttccgcgcggaaagcggcctggtgctacctggcgttcccgctgctttcttccaggcacagtccttcgctggagcggcggcccggggaacggtcgccttccatcccgccttcgacgctaccaggtga

SEQ ID NO: 345071 - DNA, 225 bp, Pseudomonas aeruginosa
gtgttgcgggggaaaccgggcgacgaagcctcccggcgcgcaggcgaagagatcgccagggcgctgggcccgcgtgccggggcgatgaggcacggacaccgcgtgaacgcctttctgggggcggctggctacgggatcgaactggtccaggagggcccctgttcgattgaacgccgcgacaggcacccggtgacccgggcgctggcgcttcggttcacctggtag

SEQ ID NO: 345072 - DNA, 705 bp, Pseudomonas aeruginosa
atgggcaattatttcgcgagtagcttcaggggcaagctgctctcggagcaagtcagcaatccgaacattcgggcggggcgctacagctactatcacgggcattccttcgacgactgtgcgcgctacctgatgccggaccgcgacgacgtggacaggctggtcatcggcagcttctgttcgatcggcagcggcgccaccttcatcatggccggcaaccagggacagcgcgccgggtgggcgtcgacctttcccttccatttcatgcacgaggagccggccttcgccaacgccgagaacggtcacctgccggcgggcgacacggcgaccgggcacgacgtctggatcggcgccgaggcgatgttcatgccgggcgtgcgggtcggccacggggcgatcatcggcagccgcgcgctggtgacccgcgacgtggcccctatgccatcgtcggcggcaacccggcgcggacgcttcgtaaacgctttttcgatagcgatatccggcacctcctggcaatggcctggtggaactggccgctggaggagatcgaggcggcgattccgctgctctgcgccgcggatatcccggccccgtaccagcactggcaacggctgcgagcagagacccgatgcccgcaagcatgatccggagggtttttctcggctccacaggcatatcctccaggctccaggcggtatattgtcgtga

SEQ ID NO: 345073 - DNA, 150 bp, Pseudomonas aeruginosa
atgcatgccagagcctttccgacgccagcgcgcctccgctggaagggtccgctgatttctcggaagcgccccgaagaccgcccgctggaacattcgcaggacttcatgaccggcgcgtcgcccggggcggtcgccgtgcaagacgagtga

SEQ ID NO: 345074 - DNA, 426 bp, Pseudomonas aeruginosa
atggagcgcgcgccggagaccggtcgagcgccgcgcggtagtcgctggcggcacctgcgtagttggttgttcggcgaacccgagcgggttcgcgacgagcgccagcggctatggatcgcctatgccgcctggctcggcgagcaggtacagcagcgtctcggcgaggacgccgaggtcgcgccacggttgcaagcctacctggagtcgcggcgcgcggcggggcaattgccgaataccgacatcgacctgcaagtctggctcgacgccagcggctggatcgtcggcctggcctgcctgcgcgccgatgccgaaccgatcgacgccgaactgcggcgggccctgatggatcgctcgttgcgtctgccgccgccggaccacatgccgcagccgatcgagctgcggatccgcctcatgcctggacgctag

SEQ ID NO: 345075 - DNA, 567 bp, Pseudomonas aeruginosa
atgaataggcgcctggcgggcttcctgacggctccggcgcagcgctggaatcccctgctgcggcgggcgcaggcctactggcggcaactggctccgcgcgagcgcaggaccgtcgccggcggtggcctggcgctgggcctggcgctgacctggcaactcttcgtcgagccgccgctggcgcgcatcgagcactggcaggccgagctgccccgcctgcgttcgcaggcggcggcggtggacgctgtgctgggcgaagtcgaggcgctgcgcggcccgctcctggatggtacggcggatgcccaggcgatcggccgcagcctgcgcgaccagggcctggatggtttccagttggaggcgatgggccccggccagtggcaactggacttcgccagcgcttccggcgaggccttgctgcgctggctggcgcgcagcccgacagcattgcgcctgagcgtcgaccaggcacgggtgacgcgcctcgaagcgcccgccgaggagcaagccggcgggctggtgtccgcctcgatccatttgcagtcgacttccgctcccaaggattccccatga

SEQ ID NO: 345076 - DNA, 1200 bp, Pseudomonas aeruginosa
gtgaaggccgcctggcgttgcctgctgccgccgctggccgagttcgccgaggcggcgtcgctggattgcctgcgcctggatgcacggggagtgctcctggagcgttgccaactgtctctcggggagctggcgcagcggcgccagggcctgcccgtggaactctacctgcatccgcgcgattgccgcctggctgctctcgagctgccggcgctgcccgcggcgaagctcgccgccgcggtgaactgcgcggccgaggcgctggtcctcggcgatccggcgcaactgcgcctggcccatgggccgcgcggcgccgacgggggcctgaccctgggctggctggaggcgtcggccctggctccgctggagcaggccctgcagcgcctgcggctcgatgtgcgacaggtgcaggccgcgccgttcctgctgccgttgcgcgaagacggctgggtggccggcgagtgggatggccatctcctgctgcgccgctcgctggccgatgccgcggtccatcccttgccggaacaagggctgggcgagttgccggaggatttgcgcctgtactggctgggcgaacggccaacgtggagctgcgccaccctggcgcggaccgaggcgctggacgaggcgttgcgctggagcgggcccgtctgcccctggggactcgcgctgaaacagccgatggcgggtgccggtcgtggctcctggaagctccccctgacctgcgccgccctcgccctgctggtgtgggtcgccggcctgaacctgtatgccgggcaactggcggggcagggtcaggccctgcagcggcagggtatccagcgcgtacagcaggcgtttcccgaactgccggtggtgctcgatccgctgcgccaggctcgcgagcgccgcgacgcctacctggccggcaaggccgatggcgatgccgcgccgggactggccgcgctgctgcatggcaccggcgaggcgatgccgttcctcgccgggcgcctgcagcgcctggactaccgcgacggcgaactggacctggccctgttgccggggcccgccatcaccgatgccgccacctggcagggagagttgggcaagcatggcctgcaggccgacgtctccgacaggggctggcaggtgcgtgccgcggaaacgccgctggcgccgggcgcggcggatggtggcgataccggggggggcggcgatgaatag

SEQ ID NO: 345077 - DNA, 966 bp, Pseudomonas aeruginosa
atgaacggccgtcaccagcgcggcatggcgatcatcagcgcgctgctgatcgtcaccgtggtcgcggtcatcgccgccggcctgatcgcccgccagggtgcgtatatccgcggtctggagagcgagcaactgcgcatccgcgccagttggatgctgcgcggcggcctggagtggagtcgccagctgctgctcgaggacagccgccgcgacccgctgacccgcctcgaccagcgttgggcgcgaccgatgcgcgatctgcgcctgagcgacgccgagttgctgttcaacggccggatggaagatgaacagggcaagttcaacctgcgcaacctgttggtcgaccagcgtcccgatgcgcaggaacaggccaatttcgaacgcctcgccgggctgctcggcgtgcgcccggaggacgcgcggctgatcgtcgagcgagtgctcgcctcctatgcgcggctacccgccgaggcgccactggccgatacgcgtcccccgggtttcgacagcgctcgcgaaacctcgccgggcgccgcgcggcgagcgcttgcggcacgccggccgccgctccggcggttcgacgacctggcgcggctggggattccggcggcgaccctggagcggttgcgaccctacgtcaccatcctgcccgaaagcacctgggtcaacggcaacaccgcgcgtgccgaagtgctcgccgcctgcgttcccgggctcggcctggagcaggcgcggcgggtggtcggcgagcgcgaccagggccgctggttcctaaaccgcggcgacttcgtcaaccgcctgaacatgccgcagttgcaggcgcagtcggtgaaggtcgggatcaccagcgactggttcctgctcgatgcctacgcccagcgcgagcagcaacaggtgcgtctgcaggccctgctgcagcggcaggtcggcgagcgcaccacggtgaactggttgagggtgggcccgtga

SEQ ID NO: 345078 - DNA, 369 bp, Pseudomonas aeruginosa
atgccctcttcttcccgcggtttcaccctgatcgaggtgctggtggccctggccatcgtcgccatcgccctggccgcagcgatccgcgcggtgggcctgatgaccgatggcaacggcctgctgcgcgacaagtcgctggccctgctgacggcgcaaagccgtctcgccgaactgcgcctggatggggccgtgcgtcccggcgagagcgctttcgaatgctcccaggggcgcctgcggctgtactgcgagcagcgcgtccaggccaccgccgacccggccctgctgtgggtggagatccgcgtgcgcgcgcagcgcgaacaggccgtcccgctggcacgcctgaataccctgctgagccgcgtgccctga

SEQ ID NO: 345079 - DNA, 432 bp, Pseudomonas aeruginosa
atgccggccataccccgtatcgacccgccccgcctggtccagctcgccgccgttctggcgcttctcgccggcctgctgttctggggctacctgctgctggcgccgattcccggcgtggtccaggccgaagtcggcgccgctccgccagtgtccagtgaggagcccgcgcagcgctggttcgcggcaccttccagcgagatcgaggtgtccctggccgggctgatcggtggggggccggcggcgatcgccatcctttcggtgaatggcgcgccactccaggcctaccgcgagggcgaggcgctggggcgtgcggcgaaggtacggcggatcgaggccgacgcggtgctcatcgagcagaacggcgaggttcgccgggtggtcatgccgcggctcgccgagccgccgccactggccaccctcaagcgcggctga

SEQ ID NO: 345080 - DNA, 642 bp, Pseudomonas aeruginosa
atgtgcgggtgcgctgagcgcgcctcggcagcgcgccggcaaggcggcttcacgctcatcgaggtgatggtcgcgatcatgctcatggccatcgtcagcctgatggcctggcgcggcctggacagcatcacccgggccagcgcgcacctggaggcgactaccgagcagagcgccgcgctgctccgcgcgctgaaccagctggaacgcgacatcgccctgcacgcccccagccgggaagaaccctcccccatcgatggcgaggagcctgcgcagccgcgcgaccggctgccgcctggtctcgaactcaagcggctcggcgaaatcccgctgcgcctggacatcgtccgcgccagcgccgaacccggcgcgccgctgcaacgagtgcgctggtggcgccagggcaagatcctctaccgcgccgcctcgcccagcggcgatcgcttgccgctgccggcgctggcggagcgggtggcggtgctggaggacgtgacccgcttcgagatccgcgcctgggtgccgggcaagggctggacacgcctgccggcgcgcggcaaggtgcgcgccagcgggttggagatcagcctggcgcgggtcaccggcaatggcgtggagcgttaccggcgggtggtggctttgccgtga

SEQ ID NO: 345081 - DNA, 717 bp, Pseudomonas aeruginosa
atgtcgatcctcggggtggcaaggtcgtgtgcagtgtcgttgctcggcctcggcatggtgttgccggcgcccggcgctgtgccgggtgaaagtggcaggccgacgttgcgcctggcggtgcatgaattcgatattcccccgcagggcctggcagcggcgctggtgacctacagcggagtgacgggaatggcggttctggtggatggcgaactggcccgcgggcggcgttcggcacgattgcagggccgcttcaccgccagtgacgccctggcccggctgctcgacggcaccggtctgatggcgcgctataccagccaggaggcgttcaccctgctgccggcgcaagccgccaggagcgtcgttgcgtcgccgatctcctcgtcgcgggccgcgcagcccctggatcgtggctacgccggagcgctccaggcggccctggaggaacagctgtgtcgttcgccacacacccgtcctggcacctaccgggcggtgttgcagctctggatcggacgccatggcgaggtacgccacagccgcctgctcggctcgaccggcgatgcccggcgcgacggcgccctggtcgagagcctgcgcggagtgagggtgatgcgcgcgacgccggccacgctggcccagccgctgaccatcctgttgctgccgaaggcgacggacagggccatggagtgcacgttgagggagggagtgggagggtcatga

SEQ ID NO: 345082 - DNA, 1416 bp, Pseudomonas aeruginosa
atgctctgggcttgcattctcctgccgcagctggccatggacagcgccttgcgccaacggtcggatcccggggcgccgctggcgttgctcgggggaccgccgcaacgccgcctgctgcgggcggtcaacccggcggcgcgcgccctcggcctgaagcccgggcagtcgctgatcgccgcccaggccctgagccgggacttcgccacggcagagtacgacctcgtcgccatcgaacgctggcaggcctttctcgccgcctgggcctatggcttcagttcgcaggtcagcctgcactatccacgcgcgctgctgctggaggtacagtcgagccttgccctgttcggtccctggccgcgcttcgaggcccgcctgcgcagggagctgacggccctgggtttcagccaccgcctgtgcctggcgccgaacccggcggcggccagggtgctggtggacagccaggacgggctggccatcgaggacgacgacgcgctgcgtcgccacctggccagccttccgctcgaccggctgggactgtcccgggacctgacgaccgccctcgggcgcatggggctgcgccacctgcgacaggtcctcgacctgccgcgcgcggccctggcccgccgcttccctgccgaactgctgctgcagatcgatcgcatcggcggacgcatccccctggccctggagcactaccggccgccggacgtattcgatctgcgcatcgagctcaacttcgacgtggaatcccaccaggccctgctcttccccctgcgccggctgaccgccgacctcgcggcctttctcgccgggcgcgacagcggcgtgcagcgcttcagcctgcgcctggagcatcacggacgcgccgacagcctggtcacgatcggcctgctcggcgccgagcgcgaggcggccatgctgttcgaactgacccgcggccgcctcgaacaactgcaattgcccgcgccggtgcatgccgtgcgcctgctggccgacgaactgccccccttcaccccgcggcacagggaactgttcgacgagcgtccgcagcagttcctcgcctgggaccagttgcgggaacgcctgcgggcacgtctgggcgacgaggcagtacacggcctgagcgctgtcgccgaacatcgtccggagcgcagctggcggctggagacctgcgacaggtccgtgccgctggctcccgccggcctccgccccggttggctgctgatggagccccggcccctcggcgaggcgctgccgaccgtgctggccggccccgagcgcatcgagtcgggctggtgggacggcgaagacatccgtcgcgactactacctggtggaaacccgttccggccaacgcgcctgggtctaccgcgaggtcggcagcgaagggccgctgtggctgcatggctggttcgcatga

SEQ ID NO: 345083 - DNA, 1224 bp, Pseudomonas aeruginosa
atgagcggttgcggctgcgacggcggacaactgcgtccgctggacgaggcgctggccgagctactggcgcgcgccccatgcccgccggcctgcgaaaccctgcccctggagcgggcgctggggcgggtgctcggcgacgacctgccggcgccgatggacctgccgccctgggacaacagcgcgatggacggctacgccctgtgctccgccgaccttccgcgcagcggcggcagcctgacggtcggcgcgcggatcgccgccggcgatacccgtggcatgagcctgccgctgggccaggcggcgcggatcttcaccggcgcgccgctgccgaccggcgccgattgcgtggtgccgcaggaactctgcacggtcgacggcgagcgcgtgcagttgccgccggtgagcgccggccagcacgtgcgtcggcgcggcgaggagttgcggcgtggcgcgccggtgctgcgcgccgggcagcgattgcgcccgcaggaactcggcctgctggcgagtctcggcgtcgccacggtgtcggtgcgccggcgcctgcgcatcggcctgctgagcagcggcgacgaattgcgcgagcctggccagccgctgttggccgggcagatctacaacgccaaccgttactgcatcggcgcgctgctgcgcggcctcggcttcgaggtgcacgacgaggaagtgctcgccgacgagctggtggccagccgcgacgccctcagcctggcggcctccgaatgggatgcgctggtcaccagcggcggcgtctcggtgggcgaggaagaccatctcaagcgtgccatcgccgaactcggcgaggtcaacctgtggcgcctggcgatccagccgggcaagccgttcgccttcggtacggtggccggcaaaccctggctgggcctgccgggcaatccggcggcggcgctggtcaccgcgctgctgctggcgcggccgttcctgctgcgccagcaggggctgctcgacgtgctgccacggccgctggcgctgccggcggcgttcgactgggcgcagccgtggacgcgccgccagtacctgcgggcgcggctcgacgaacgggggcgggtggcgatccacccgcagcagggctcggcgatgctgctcgccgccagttgggcggacgggctggcggtgatcgagcgcggcgcgaccctggcggcgggtgacaggatcgactttctgccgttctccgcgctgctggcctga

SEQ ID NO: 345084 - DNA, 315 bp, Pseudomonas aeruginosa
atggctaagccgaatgatacgtccaagcccccggtaacagaaccgtccccccgcttcatccccctgttgcccacctcgcaggccaaccgcttcccgcacaacgccacgctgtacctcgacactcaggcaccgcccggccagttgttcgagagcgcgaaagcgcgcctgaagtcggcgatcaatgtcctcgccatgacttgcctgctcgacgagaacgaagaacccggcgacaccctcgcctacatcaacggcgccttgctgaagctggtcagcgatgccctctccgagatcgacgcggcccacccacgccagtag

SEQ ID NO: 345085 - DNA, 462 bp, Pseudomonas aeruginosa
atgaacggaatatccagactgctctcgctggccctgctcggcgcctcgctgcatgcggtggcagtccaggccgaggagcagccgcggctgttcgagctgctcggccagcctggctacaaggccacctggcacgccatgttcaagggcgagaacgaggtaccgaagtgggtttccgaggccagcggcccgagttctccgtccaccagcctgagcctggacggccagccctacgtgctggccgacagctgcaagccgcatgattgcggcaacaaccgcctgctggtcgccttccgcggcgacaagagcgccgcctatggcttgcaggtcaaccttccggacgagcccgccgaggtcatggagaaacccagcgcgtatgccacctaccgctggtacggcaagccgtccaagccggtccgcgagctgctgatgaagcagctggagagcgatccgaactggaagtga

SEQ ID NO: 345086 - DNA, 954 bp, Pseudomonas aeruginosa
atgagcctgcccgccgcgcccaaggtgccgccgcaggtggccgagcaggcggtgcgctggctggtcgagttgcagggcggcgccgacgacgaacgcctgcgccaggcctggcagcgctggcgccaggcggcgccggaacacgagcaggcctggcgtcacatcgaagcggtcaaccagcgcctggccgggatcggcacgccgctggccctggccgtcgtcaacgcaccgcgctcggcacagcgccggcgcgcgctgaagaccctgctggtcatgctggccgccggtggcggcgcctggggcctgcgcgagaacggcagcctgcagcgctggagcgccgactatgccaccggcgtcggcgaacgccggcgcctgaccctggccgacggcagtcgcgtcgagctgaacagcgacacggccatcgacgtgcgtttcgacgccggcgaacgacgcctgctcctgctgcgcggcgagatccagctcagcaccggccaggatccgcgcccgctgcgggtgtacagcgcggaaggccggctgcgcccggtgggtacccgtttcgacgtgcgccagttcgccgggcgcacccgcgtcgccgtccacgagggcgcggtacaggtggagaaccgcgccggccagggcctgctgttgcccagcggccggcaactggatttcgaccgcgagcgactcggcgctccgcagccgctgccggtcggcagcggcgcctggaccgacggcatgctggtggccgccggcatgcgcctggacgagttcctcgccgaagtctcgcgctatcgccccggacggctgggctgcgacccgcgcatcggcggcctgcggatttccggcagctatccgctggacgacagcgagcggatcctcgccaccctgccgacggtactgccggtggaggtgcggcgggtcacccgctactgggtcggcgtgcacccgcgcgaatga

SEQ ID NO: 345087 - DNA, 1563 bp, Pseudomonas aeruginosa
atgctacagaacaaccccgaactcaaaagcaaaatcgaccagctctggaataaattttggagcggcggtattagcaatccgctcactgcaattgagcagatcacctacctgctgttcatgaaaagactggatgagcttgatctcaagcgacagtctgacgccgaatggacaaatgaggagtacacatcaaagtttgatggcgtctgggttccaccggaacaccgaacaaagctcagcggtcgtgaaagcgccgtggaattagtcgagatcctcgctcacgaccggcgccagtacggcatcgataaacgtactctgcgctggaacgaatttaaacgcatgcaggctgaggagatgctgcagcatgtgcagggcaaagtatttccctttctcaaagacctgaatggtgccgagtccaacttcacccaccacatgaagaacgcggtgttcatcatccccaagccagccctgttggtggaggctgtgaagaccatcgacgagatcttcgaggtgatggagcgagactcgcgcgagaatggtcaggcatttcaggatatccagggcgatgtctacgagttccttctctcggaaatcgccaccgcaggcaagaacggccagttccgcaccccgcgccacatcatcaagctgatggccgatctggtgcagccgcaactggggcacaagattgctgacccggcctgcggttcaggtggctttctgctcggcgcgtaccagtacatcgtcaccgaactggcgaaaaaagcgggcgcccaagacctcaagcctgatgaagacggcttcacccgcacctcggtggccgctgcactcaccgaaaaggcgcaagccattttggccagctcactgtggggctatgacatcgaccagaccatggtgcgccttggtctgatgaacctgatgatgcacggcatcgacgagccgcacatcgactacaaggacaccctcagcaagagctataccgaggaggctgagtacgacatcgtgatggccaacccgcccttcaccggaagcatcgataagggcgacatcaacgagaacctcaccctcggcactaccaagaccgagttgctctttgtcgagaacatctatcgcctgctcaaaaaaggcggcactgcaggtgtcatcgtgccgcagggcgtgctgttcggctccggtaaggcattcaaggatctgcgccaaaagctagtggagcgttgcgacctcaaggccgtgatcaccctgcccagcggtgtgttcaaaccctatgctggggtcagcaccgccattctgctgttcaccaaggtctgggggccaaaagacaaggtaagcaaacctgccaccgaacacgtctggttttacgaaatggctgccgatggctattcgctggacgacaagcgtagcaagcaggaaggccatggcgacctgcaagacatcatcgccagatatcattcacgcaatcccgccactgacaccgaccgctccgccaaatgcttcatggtgccgcgcggcgagattgccgaagagaagaacaacttcgacctctcgctctcgcgatacaaacaagtgtag

SEQ ID NO: 345088 - DNA, 522 bp, Pseudomonas aeruginosa
atgatcttccgtaccctcgccctgctgccgctctgcgccatgctgctggcgttctccgtcgacgccgaggaacgccgcttcgactgcacggtggtggcggtgcacgacgacgccagcctgggctgccgcccgcccggcgcggacaaggcgctgagcgttcgcctcaacgccatcgagctgcccgccgcgcaaccgtggcggcaacgcgcccggcaagccctggagggaatgctgctgggcaagccggcgaccatccgcgagcagggccgcgacgcgcgcttccgcatcctcggcgcggcctgggtcaccccggccgactgccccgcctgcgggcataccctggatgccgggctggccctgctgaccattggcctggccagttggcgcgacgcgccggatagcggccagacgcccgaggcgcgcggccagtaccagttcgccgaggaagaagcgcgggcgcgcaaggctggccagtggggcccgcgcgaccatgcgcctagagatggatctcggcgaacttga

SEQ ID NO: 345089 - DNA, 888 bp, Pseudomonas aeruginosa
atgaacttttccagcgataccatccaactctttctcgccgtgctcgagcgcggctccttttccgccgccgcccgcgccctgggcaaggtgccctcggcggtgagcatgggcatcgccaacctggaggccgagctgggcttcgccctcttcgagcgcacccatcgcgaggtccgccccacgccgctggcccaggcgctggcgccacaggcgcggaagatcgccgagcaactcacccagttgcaggtgcatgcggtggaactctcgcagggactggaaagccgcctgtcgctcggcgtggtgccggacatcgccaccgaccggctgttcggcgccatccgcaccctggcggagcgctatccgttgctcgacatcgaggtgctcaacgcgccccgggacgatgtcctggcgctcctccatgccggccgcgtcagcctgtgcctggcgttcgccggggtcagcgtgaacccgcaggagcgcttccagtacgtcggcgcggagtcactggtggcgaccatctcgccacgccacccggccctgcagagaccggaccgtgcgttgtacctggaggaactggtgaacctccggcagatcctggtggccagctgcgacctgccgctggccgacacccgcccgctgatctccgccacctgctggcgtaccgacagcctggccacggcgctggaaatggtcgaggccgggatcggctggggcaacttcccgttgtcccgggtcgcgcccttgctcgcggagggaaggctggtccggctggatttcaggaataccaagaacgagctgaagctgccggtccacgccatctggttgaagaaccagccattgcggaaggccgccctggaattggtgggaatgctcgccacccgccccgcatga

SEQ ID NO: 345090 - DNA, 321 bp, Pseudomonas aeruginosa
atgaaactcctcatcgcagtattcgcggccctggcgctgagcgcctgcgcgacgccgcaacaacccggaagcgaggccgcggcgctgtccgcccatagcgcaaaggcgccgcaggaatacgccgcctgcgtgttgcccaagtggcagcgccaggcgcccggcgtgacgctggtggaggagggtggcggctatcgcctggccgatgccggccagtggctggaagtgcggccggcggagcggggcagcctggtcaaggtccacgaccggcaggcctgggtgacccgtggcgccttcatcgatgcggccaggagttgctcctga

SEQ ID NO: 345091 - DNA, 189 bp, Pseudomonas aeruginosa
atgccacgcctcgccctgttcctgggtgtgctgctgctcagcgcctgcgcacaaccctccgctccgaattcgctggtcgaggaatcgttttcccgcagcgccagcgaacgccagctggaggagctgaaccgccagggcctgccctacgagcagtaccaattgcgccgccagcgcatccgcgggcgctga

SEQ ID NO: 345092 - DNA, 411 bp, Pseudomonas aeruginosa
atggcgacaccgcaagttggcgtgggcgtcctggtcatgcgcggcggccgggtcctgctcggacgccgcaagggcagccatggcgcgggaagctggtcggcgccgggcgggcacctggagttcggcgagacgccggaggactgcgcgcgacgcgaggccctggaagaaaccggcctggcgctgagcgacctgcgccatggtccgttcagcaacgatctgttcgaaggccgtcactacctcaccgtgttcatcctcgccgcctgcgcggaagacgcgcaggcgcaggtcatggaaccggacaagtgcgagggctgggcctggttcgactgggacgacctgccacaaccgctgttcgcgccgctggcgagcctgcgccagcgaggctactcgcccttcgctgcggggcgctga

SEQ ID NO: 345093 - DNA, 780 bp, Pseudomonas aeruginosa
atggaattgacgatcttccaggttgacgccttcgccgaggggcccttccagggcaatccggcggcggtctgcccgctggaggcctggctggacgacgagcgcctgcaggcgatcgccgcagagaacaatctttcggaaaccgcctatgtcgtcggccgcgacggcgactaccagttgcgctggttcaccccgcaggtcgaagtggacctgtgcggccatgcgaccctggccacggcctgggtgctgatccacaagctcggcgacagttccccggtgctgcgcttcgccacccgtagcggcgagctgcgcgtgcgccgcgacggcgagcgcctggcgatggatttcccggccaggcagccacagccctgcgcggcgccggcgggattgctggaggcgctgggcatcgccgaggccgaggtactgaagaccgacgactacctggtggtggtcggcgacgaggacgcggtcgccgcgctggcgcccgacttcgcccgcctgaagggcctgccctgccgtggcgtggcggtcaccgcgcgaagccggcgcttcgatttcgtctcgcgctggttcggtcccaacgtcggcgtaaacgaggaccccgtcaccggttccgcgcacacctcgctggcgccgtactgggcgcagcgactgggcaagacccggctgagcgccgagcagggcggggcacgcaagggccgcctggagtgcgaggcgctcggcgagcgggtggtcatttccggcacggcggcgctgtacatgagcggcacgctctatctctga

SEQ ID NO: 345094 - DNA, 1026 bp, Pseudomonas aeruginosa
atgctcgcctgccccatcccccccgacgaaaccttgcgccagaaggctctggacgacatggcggtggtcgatacgcccgccgaacattacctggatgccctggtggaactggcgcgggaaaccttcgcggtgaagagcgtgttggtcagcctgatcgaccacgaccgccagtggttcaaggcccgcaccggtctggatgtcgagcagacacctcgcgacctgtcgttctgcgcccatgccatcctggccagcgagccgctgatggtgacggacgcctccaaggatccgcgcttccacgacaacccattggtcagcggaccgcccttcatccgcttctatgcaggcgaacccctgcacgccagcaatggccaggccatcggcacgctctgcctgctcgatccggctccgcgcctgctggacctgcgggaaagtcgccagttcaagcgcctgtcgatcctggccgaaggctatctgcagcttcgcagcctcaccgaacatactcgtttcctgcgccaggaaatcggccgagagcaacgcaggtcgctgctcgatccccttacccaactgtggaaccgggccggcttcgatgcattgcatcggcatgaactggaactggcgcaggccaacgagcagaacgccggcatcatctacagcgacatcgaccacttcaaacgcatcaacgacacctacggacacaaagccggcgacaccgtccttcgcgaggcggcctcgcgactgcgcgcggcgctacgcccggaggacctcctggcgcgcttcggcggcgaagagttcgtggcgctggtacgggtccgcgaccacctcgagttgagcgtcgtcgccaatcgcatccgggaactgatggaagcgacgcccatcgattgcgccggcacccctgtaacgatgaccatcagcgccggctgcactctggccaggcacgccgaggaactggagcggtcgctcgcccgcgccgatgcggcgctgtacgaggccaagcgtggcggacgcaaccgggtggtcagcgcctga

SEQ ID NO: 345095 - DNA, 210 bp, Pseudomonas aeruginosa
atgcgcgacgaagacgatatccacgagcccgagcacgatcacctgctggacaacgatcatctggaggatgaacgcgacgtcgatgccgtcggcgcgctagacgagcccgatgcgtgcgtcactcgcctctgcgagtattgcgatgcgctgctggtgccggccgatgccgatggtttccatgtctgcgcggattgcgcagggctggactag

SEQ ID NO: 345096 - DNA, 486 bp, Pseudomonas aeruginosa
atggaaggcatgcgggagaaccctgtgcgcatccgccaggcgcgcgccgaagacgccccggcgctgtccaggctggccttcgccgccaagtcggtatggggttaccgccaggcccagctggaggcctggcgtgaggaattgcatgtttcgccggaagctatccaggcccggccggtatacctgctggaggatgccgaggggctcgccgggatgttcgccctgaccccggagccgggcgccgagtgggaactggacagcctctgggtcgcgccgcgcgccatgcgcaggggctacggccggcgtctgctggcgtccgccgcggagcatgcgcgtagcgccggcgtgtcgagcttgcggatcgatgccgatccctatgccgaagccttctacatcgcccagggtgcccagcgctatgcgacccgccctgcgccgatcgacggcgagcccgggcgggtccggccgcagttgcgcctgggcctgggctga

SEQ ID NO: 345097 - DNA, 171 bp, Pseudomonas aeruginosa
atgagcaaactccagcatatcggcctgttcctcttcgtcctgctttccgccggcctggcgctcggctaccgggtcgactgcgcggatggcagccacgtcgaaacctacctgctgcgcggcctgggcgcgaacctgctgggcagcgacctgtgcgagaaaagcggctcctga

SEQ ID NO: 345098 - DNA, 687 bp, Pseudomonas aeruginosa
atgcccgtggatatcagcaagctgacgatcaccacgccggtggcgacctcggcgaccaaccccctggccctggaactcaacggcgcgctggccgcggcgcgcctgccggaagtcgtctcgctgcagcccgacgaaaccctgcgtctgtccgcgccgacccgcggcgcttccagcaagagcacccgccgcacccgctgcgagtggaaggagcccggctactggacgctggacagcgccgccgtgcaccgcaaccaccagcggatgcgcctggtcaaggtcaacgcggcgcagaaggtagtggtggcgcagatgcacgtgaaggacgacgatagcccgcccatcaaggtgttctggaacaagggcaggatcaccttcggattccgcggtgccttcgatcagccggcaccgacgaacagcaccctgctggcgaacgtgccgctggccgccgactacgaggtcgacatccaggtcgacgccgccggtagcgccattgtcagcgccacctgcaatggcgccagcgccaccagcgggccgctgcaactggagcgcagctggttcggccatgccttcaattttcacggcggcgtctacaaccagctcgactacgacgaatcgacgccggcggaggacggctcggtctgcgtgatcagcgaactggcgctcagccatgggacgcggtccgcgtag

SEQ ID NO: 345099 - DNA, 774 bp, Pseudomonas aeruginosa
atgttgcacgacaagcgttttctggtgaccggcgtcagctccggaatcggcgaagccaccgcggcgttgctgggagccgccggcgcgcgggtgatcggagtggatgtccgaccgccgaggatcgagctggaatccttcatcggcgccgaccttggacgtggcgagagcatcgacgagctggtccggcagttgccggaaggtctcgacggactggccaacatcgccggcgtgccgccgacgcaaccggtggaggcggtgctgcgggtcaacctggtgggactgaagtacctgacgcggcaggtagtgccgcgcctggcggatggcgccgcgatcgtcaacctggcatcgctggccggggtcggctggccggacgcgctggagtcgatacgtgccgcggaaaacctggatttcgacgaggtcggcgaattcgcccggcgcgaggggatcggcagcccgcgcagctatttcttcagcaaggaggcgttgctggcctggaccctgcagaaccgctggacctggcgcgaacgcgggatccgcatgaacgcggttagcccggggccggtggatacgccgatcctcggcgatttcctgcagacgctgggcgagcgcgccgaagaggacatgcgtaccctcggccggcccggacgggccgaggacatcgcgccggtggtggcattcctgctcgacgatgcctcgcgctggctgtggggcgtcaacatcccggtcgacggcggcatgtccgcccacctccaggcgacccggtacggcctctag

SEQ ID NO: 345100 - DNA, 576 bp, Pseudomonas aeruginosa
atgagtgcgattgcgatcgtgtattacagtggctacgggcataccgcccggttggccgaagcggtgcgggaaggcgcgcagtcggtgcccggtagccgggtcagcgtgcacgccatcgatcccgaaggaaacctctccgaggcgtcctggcaggcactggaagaggccgacgccatcgtctatggcagcccgacctacatgggcgggccggcctggcagttcaagaagttcgccgacgccaccgccaaggcctggttcgtccagcgctggaaggacaaggtggccgccggcttcaccaattccgcctcggtgaacggcgacaagttcgccaccatcgcctatttcttcaccttgtcccagcagcacggacagctctgggtcggcaccgggttgctgccggcgaatacccgcgccaacggccccgcggacgtcaactggagcggaggcttcgccggggtgctggcgatctcgccgtcggacgcgacggcggacgaggcgccgcgcggcggcgacctgcagaccgcgcgcctgctcggcgcgcgggtggccgaggtcggggcgcgcctggccgcctga

SEQ ID NO: 345101 - DNA, 900 bp, Pseudomonas aeruginosa
gtgcagccttccctttcccgtacggtcgagcaagtgcgctacgcgccgccgggcgaatatgccctcgacctggaggtcgtcgccttcgacgaattgcgtcggcgtaccaccccggcccacctgcacgccttgcaacgcaccgacttccacctgttgctggccgtcacccgcggatgctgcacccactggatcgacttccgcccgcaccgcgcggaaaccggcaactggctggtcatccagcctggccaggtgcatcgtttcgacggcagcgccgactggtccggctggctgctgctgttccgccccgagttcctcgccccgcccgggcgcggtggaacggccgaggaactggcggtcggcgtctgcctcgaggccctgcccgcgctcctcgcgcccgccgccgacgagcgacgcagctgcctgcaggcgctgcggcagatggcccgcgacgcccggctccggcaaagccgcgccgtgcgccacagcctgctgcgccaccagttgcaggcactgctcctgcgtctcgaactggtcgcccgcgactcccggctcgcgccgctcgccagcggcgccgaactgcagcgcttcaaccgcttcagggaggcggtgacgggaaacttccagcgtcatcaccggatcggcgagtacgcccgtctgctcggtatttccgaacgcagcctgagccgcgccagccaggcggtggccggggtcaccgcgaaggcctggctgtcggcgcggatcgccctggaggccaggcgcctgctcgcgcataccgacgaaacggtggcggccatcgccgaacgcctcggcttcgacgagccaagcaacttcgtcaagttcttcaagcgcgagaccggccaggtgcccggcgccttccgccgcgagcagcgtggcggctga

SEQ ID NO: 345102 - DNA, 1080 bp, Pseudomonas aeruginosa
gtgatccccgtcgctccgatttccctgactgtcctgctgatctacctgctctccacggtcgccggcctctggctgctggcctggctgttgctcctggccttcagcccacgcgcgcgccagcgcctgcgccgccactggccgagccgcggcctgctgctggtgctcctgctggtcccgctcgggctgcgcgcctggctggagatcggcctctggcagtaccagcgcgaacgggcgcgcgaagaggcggcgcataccgcggtactcgagcacccggcccgcctgggcggcatcgggatgcccgccggcacccgcttgaagctggagctcaggcagcagccggaaagcttccgcgaagccgagttccccgcgccggtgatgatccgcggcgtcgccacccgccacctgcaacgctggctgcagagcgagcacgagaacccgcaggaaccctggacaaccaccggcgtccatcccacctcgatccgcctgcgcggcgacggcgtcgccgagatcgacggctggcgctgcgacgccagccaggaaatcgccttcgccagcgagcgcgacggtcgccccgccgccttcgagcattgcagcctggcggccggcaaccgcgccggcgccatcgagttgcccgccggcgcgcgcctgtttgccagcgacggcatggtctacaccgacggctaccgcgacgccgagcgctggcgggtgatgccggaaacaggccagcaggtctcggtgcacggcatcgcgctgagcggcggggcgctggccttcgaccgccagcgcaagctctacggtctcggcggcacgctactggccgcaccactgcaactgggcgattggcactatccggccggcaccgaggtcagcctttcgccgcgcgccgcctggcacacgcggcatccccaggcgtggttgttcagtcccggccacgaagcggcccggcacacctccggcgcgcgcctggagcatggcgcttcgctgttgcaggcgctggacggacgagagctggaacgactcggcaatcgcgaggccgggattctcgacttcatcgaactggacgtcggcgaagccccctga

SEQ ID NO: 345103 - DNA, 384 bp, Pseudomonas aeruginosa
atgaataaaagcccctttcttctgctgacgctggccctgctcctcgtggcctgcggtcccgaccagctggtttccgacctgccgtcgcccgacgggcgataccacgtcgagctgcgcaaatgcccagagaacggcttgttgagccggggcgaagtgatacaggtttccctgctcgtagccggcgtctcggaaaagtgcagctcggcactgaacgccctcgcgcagttcgacctgcgcgccaccgcggatgaattgcagctggagtggctgtccaataccgagttccgcgcctggcacccgacgttcaatccccagtacgggccggagatatcgcgccagcagggcaaggctccggtgcggatggtgtttgcaccgaagcgctga

SEQ ID NO: 345104 - DNA, 597 bp, Pseudomonas aeruginosa
atgcgcgccggcaacggcatctggcacggcaaggaactgtcggcctctgacgctccgcggacccaaggctttcaactctggttggctttaccccccgaactcgaaaacagcgagccggacggccgcttcatcgaagccgagcagacgccccaggttggcccggcacgcatcatcactggcctgtacgaaggcgcacaaagcccagtgcccgcgccgcagggcatcaactgcctgctcatcaccctgcgtcccggcgaacgctggacgtatcagccgcctgccgggcataccgtcggctggctggcactcgccaagggccagcttgaagtcggcgcgtctatccgtactggcgagctggtggtattcgagccgggcgaaacgccgatcaccctcgaagcctctggcagtctcgactctgtgttcctgctcgcctcggcggtgccgcatccgcacgatctgcacttgggcaactactcggtgcatacctcggcgcaggcgctcgagaaaggccagcgccgcatcgctgagctggcgcaactgatgaaggaagctggcaatcggaacacgccatcggggacaatccctgttttccgctga

SEQ ID NO: 345105 - DNA, 1674 bp, Pseudomonas aeruginosa
atgtggaaaaaaataaatgagttacgggatccctttaatgatgcggtaaattaccgtagtcgaatagaaaaagagttttttaataaattatttttgcgcaccgacgagttggatagactggtggcgccaaatatatattacttaatgggggagaagggggctggaaaaactgcgtatgctacctatttggagaataacaagcatgataggaattattgtaaaacaataactctcactgagactcagtataaaagatttattgctctgaagaaaaatggaaaactacactatagcgactacgcaaatatttggagatctattcttttatcaaccactgctcaagtcataatagataagtctaaggggattcttcaagggataaccggtaagtttagagaggtggaggaggcgcttaaaaaatggaacagaagctctcttaatcctgaaattgatagcgcgctggagtctttaaaaagccttacagcaggagttgatgttgggcgtgaccctctaaaagtatctggcacaggcaccgtggagatgtctgctaagactgaagagataaaacatcacttgctagaaaatgaaaccaatctaaaagaagctataggttcattgtctcttaataataatcatattgtatttatagatgggattgattttcgcccttcatcagtttcataccgggagtatatggactgtattaaaggtctaggggaggctgcttggcagttaaatacagagttttttaatgggatccgtgattctagagggcgaattaaaatagtcttgttggttaggcctgatgtttttcattctctgaatatatataactcaaactctaggattcaagataataccgtcttcttaagctggtacactacggagattaatgcgtcatcatctccactttttgaggttgttggtaaatttttggcaagccaaaatggctccaatgtttcggctaaagacgcgtggtgtaattatttctcggaccattcggatcatttagatatatttaagaagtttttgcgggggtcttttcagaagccaagggatttcttgacgtttataaaaatacttagggcactacatctaagtaaaggtctaggtgggcaaacgcagttctcacctaggctaataaatgatccaagctttactagtgactcatctgactatttgctaggggaggttaggaactacgctgctttctatatgacccctgaggactttggttgttatttaaagttcttccagtttttagatggtaaatcaaagttttcttttgcagaattttctaactactttaagggtttctctcgttgggcggcaggggagtctattaataatagacagtatttgcgggatgcggagtcgctattgcagtttttctatgatgttaatgtcattgggtatagggagagtactgacgataaatcggaaacccattatcactggtcttacagagagaggacgttaaataatatagctcccaaggttaagtctgttgatgatttgatgattaatccaggaattgcaaaagcattagatataggaaaacgtttcaaagatcaagctgatgcttcattagagccgaggaagcccaaaaagcgttattggaaggggaaaaaacgccctaaaaaaaattatagtgaaaaagctccagcccgctag

SEQ ID NO: 345106 - DNA, 771 bp, Pseudomonas aeruginosa
atggcagtgcttgcacctgtgtattcccgcgcggcgccaggattcgtccggccgacgcggcggctgatcaactgccaggttactcgcaacggtgagcagactccggccgtcaagtatgtccggttctatcgcacggccagcgacattgcgcctctcgccctgatggtgctccaggacggctatcaggatgaacaggctttcggtgcggcagagttcgatggagggtggcatgttcaggtgctcgatctgagcgagccgcgcaccggactcatgcgctggccgagcatcacccaggacgtgaccttgcgcttcgacctgaccgatgacaccggtggtggggggggcgatcctgctcagttgcctgcggtggttcgggtccagggcgtgcagcaggcgcgcccagtggtggtcgtcgagcgcctgctcgatggcacctggcgcgtggcaggtgccggcgactcgtccagtgccgaagtgcagatgatcgacctaaaggtctcgccggcgtcgttgatctacgcgctggcagtggatgactggggcgttgtctttcaaccgggtgtgccggtggccgtcggtatgacgatacgtccgacggtattcatgggctggctgtatcgagttacccagcctgggaacctgccgtccgtcgagcctgcctggtgggatgagacgcttcccgagccgcagccccttgggactgctcgcgcggaagtggttcggtacttccgtccccaagggctggggccgctatcggtggagatgatctga

SEQ ID NO: 345107 - DNA, 999 bp, Pseudomonas aeruginosa
atggcgatcacccattatcacagtactgacaccggcagtcctggccgcagcctctccgggtccactatcaacaggctgcgccagatcttgcgggcgtgccttgtcgatggataccagggcaagcccggtgccggctggcgggtcattcacgagcacgaacgagggttctcgctgcagaacggtcccggcaccgggatcatcaacttcgtgcagaacagcagcgccgagaaccccgacgaggtgatccagatctacctgctggagaccgtcaccagtacctcggcagcgatcctttcgggggacaaccttcgctcgggtacttggtacagcggcagcaacgtgacgacccgacacaccatgaatggttactggatcttggccgcgaatctgtcatggattgtctggagcgtcgtggccgacgagcgtacttgcatcttcaccgccggtataggaaatgcagcaccgacggcgatcaatgccttcgggtccatgtcgctctacttcggcgaaatcaagtctgacctgggcttgagtggtgcggccaccttcgtcgccagtggcggccagatcactgcgccgaatgttgcgtcccaagatggcttcacactgtctggaggctacaccgtgctacgcaacatgaagtccggactgttcatcccggctgggaccacggattgctattgcccggaaatgtccgacggtgatcgtgtgttgaccactgggcagaacatcgcggacacgttggtagtgccggccgagatacgagtcaatccgctgcgggcctattctggttcgggcgggatcgttggcaagttccggggctgtgtcgcggacgatacgttgcgtcgctacggcatcgcgacgctgttccgcacgttggggttgcctgtcgatatgaactctatcggcaggatggtcgatgtcggggggatctcgctggcccccttcgccaacgcgaagtaccagttcatggccaccacccacccggacttctggtga

SEQ ID NO: 345108 - DNA, 1860 bp, Pseudomonas aeruginosa
atggcccagttcttccccgcccgcaacgcctgtcgcttcgacagccccggcgaacggcgcctcgccgaacgcctggaaaagaaactcgacgacgactacctatgctggttcaacgtcccggtcggcgacaacgccctgcatcccgacgtgatcctggtccatccgcagcgcggcatgctggtgctggaggtcaaggactggagcctggagcggatcaccttcatggacaaggctcaggcgcggatccgcgacggcgctggcgagcggacccacaagcatccgctggagcaggcgcgcgagtataccttcgaggtggtgaagaccctgcgcaaggacgccgccctgaagcagccggagagcgccgcgcggccgggccagctggtgatgcccttcggcttcggcgtggtgctcagcaacgttacccgcagccagttcgaacagaccgacctgcacgaagtactcgacccgcacaaggtgatcttccaggacgaaatgaccgagtcggtagacagcgaggccttccagcagcgcctgtgggacctgtttccctaccccttccactgccagctgtcgccggagcagctggaccgggtgcgctaccacctgtttcccgaggtacgggtcagccagcagtccgggcagttcggcctgttcagcgccagcgaggcgcctctgccgagcctgatcaaggtcatggacctgcagcaggaacagctggcccgctccctcggcgacggtcaccgggtgatccacggcgtcgccggcagcggcaagaccatgatcctggcctaccgctgcaagcacctggcggcgctggcgagcaagccgatcctggtgctctgctacaaccgctcgctggccgggcgcctcaaccagctgatggtcgagcgcggcctgggtgacaaggtaaaggtgcgcagcttccatgcctggtgccgggaattgctggtcgagcacggtctcgagctgcccggagcgacgctctcggtcaacgagaagatggaaaccatggtccgccaggccgtcgacggcgcgaacgacggacgcattcccggcgcacgctacgcggcggtgctcatcgacgaaggccacgacttccagcccgactggttccgcctggccgtgcgcatggtcgacggcgacagcggctcgctgctggtgctctacgacgacgcccagtcgatctaccggccgaagggcggcaggcgcctggacttcagcttcgccagcgtcggcatccgcgcccagggccgcaccaccatcctgcggaccaactaccgcaacaccctggaggtgctcagcgtagcccgcgccttcgcccacgacctgctcgccgctcgcgaggacagcgacgatggcgttcccaccctggccccggaaagcgccggccgccgcggcgccttcccggaactgatccactgcgccagcgaacgcaaggaatggcagtgcctggtcgaacgcatccgcgacgcccaggcccacggccgcgcgctcagcgacatcgccatcgtctatcgccaccacgcccagggccaacgcgccgagcgcgccctgcaggaggccggcattccctgcgcctccggcctctccacccagggccgcgccagcctctacggcgccagcgattcggtgaagctggtcagcatgcattccagcaaggggctggagttcggcctggtgctgattccaggtctgcacgagatgcccaggacgaacgaagacgaaagcgacgaggcgcgtctgctctacgtggcgatgacacgggcgatcgaccgtttggtgatgacctatagggaaggcaccggattcaccgggagagttgcagaggcgataggggtcgcgcggggagtgcttgcctga

SEQ ID NO: 345109 - DNA, 204 bp, Pseudomonas aeruginosa
atgcaggtgcatatctggaaacgcagggaaggtgacatcgtcaccctcaagctggccagcgacggtgacgaacacacgttgctccagcagttgcgcgacgaaggtatcgagctgatcttcgggccgaacgacagccaggtcaccgaagtctgcgtgcgtgcaccggcatcgctgagggcgcggatcgactcggatgcgatctga

SEQ ID NO: 345110 - DNA, 1263 bp, Pseudomonas aeruginosa
atggcggggaaaatgaggaaaacggacattgatactgtcggtctgggacatgtccctgtggcgtcatccgcccgggagcgacattgcgcggccttcacggccaagctacaaatggagaaacaacgaaacgctcaccagtccccagacaccagcatgaagcacttcacaccgagtccggctgcccgcaatgccatggccgaagggagcaagaccgagggtttcttccttgccagcatccttctggacgcgttggagacgctgcgtgcccgcgacatcgacgccgaagccatcggccaggcactcggcctgaatctgcacagcctgctggccgatcccaatgcctggctgcccacccaactgctggaaaccatcctgcgcaaggccctgtcgctctaccccgacccgctcatgggtctgcatgcctcccagtccgagcgcgactccgccttcggcgtactgggctatctgggacagacctgcgccaccctgcaggaggtcttcaccaccaaggcccgctatgaacgtctggtgagcaacatcggcaccaccacactgcgccaggagccaggcgtcgtcctctgctgctggagctgcaatacctgcgacccgctgttcgccaggcacgccaccgagttcctgctgggccagtggctgcggcatatccgatcgatccgggagcagaagcgggacctgctgctacgcgtgcatttccgccatgcggctcccgacgacccgacactcctcgacgaataccaggccattttcggctgcccggtgctgttcgaacagccggagtcggcactggtggtcccggctccagtcatgaacctgcgcctgcgcactcccgatccaggcctgcaagccaccctggagcgtcacgcccatctgctgctcaacgaacgccacggcacgccctcgctactcgaccagatccgctcgcgcatgcgagtactactgatggaaggcagcgtctcccgcgaccatctcgcggaagaactcggcataagcagccgccatctacaccggcaattgcagaaggccggcagcagctaccgggaattggtcgacgatatccgcatcgagctggccaaaactctcctgcacgacaacggcctgaccgtagaaaccatcagccgacgcctcaacttcagagaaggtccctccttcaaccgctggtttcgcgagatgacccagcagacgcccggtgagtaccggcggcaactgcggtctgcggaaaccgccgctccccgcagccgcccctag

SEQ ID NO: 345111 - DNA, 930 bp, Pseudomonas aeruginosa
atgaagaaactgatagctcccatggtgctggttgctgccgcagtgggtgcagcccctgctcacgcctactccgattatgccaagaccaaataccccatcgtcttcgcgcatggccttttcgggttcagcaacatcggcccgatagagtattggtacggcatacccaatgaactccgggagaatggcgcgacggtcttcgtcaccgcccaggcgccggcgcagagcaacgactcccggggtgagcaattgctggctcaggtcaaggagattcgggccatcacaggctcggacaaggtcaacctgatcggccatagccagggagggatgaccatccgctatgtggccggggtggcgccagaactcgtggcctcggtgacttccgtcagtacgccgcacaagggcactccggtggcggacgtggtccagggcatcgcctcggtagtagggccttttggggcggacgtcattgccggtgcggtgaacgccatcacctggatgatcgacgcgctcggcgacggttcgggcagcgcgcagaactcgctgggcgccatgcgcgacctgaccagcggtggcgccctggccttcaatcagcgcttccctggcgggataccggcgaccgcctgcggcgccggtccggccgaagccaatggggttcgctactactcctgggggggagcgaagcatctcaccagtgtcctggacccttcggactggtggatgaaaagcgccagcctgctgatcttggggcagcccaatgacggcgtggtgccgaaatgctccaaccacctcggcatggtgattcgcgacgattacatgatgaaccacttcgatagcgtcaatcatttgctgggtatcgtctctccgatcgagaccaatccgaagacggtctatctccagcaagcgaaccgcttgaagctggccgggttctga

SEQ ID NO: 345112 - DNA, 1050 bp, Pseudomonas aeruginosa
atgaaaagaaccgtgcttatgatccttggctcctgcgtattggccgtggcgggcgccggactggggtggtggctgcaagaggcccccccggctgcgcaaccgcagaaggtcgccgaggtgccgccgcggctcgcggcgcctgcggtagccgcccctgccgtttcccgcgccgccaccgcgccgccccggagcctgccggcctcgctgctgggcaccgaggtgaattgtccggtcgaaactggagccgacggtcatctccgtataaccaaggggcttcgactgtgcttcgactattttctcgcggccatcggtgaggagcgtgtcgaggtgctagccgcgcgtatccgcgccgaactgcgcagccgcctgcaggagacggcgcgggacgaggccgagcagattctgggggcctatctcgcctatatgagcggtatggcggagttcgagcagagcgagggcgtccaggaggcgggggcgctggacatgggggccctccgccagcggatggagcgggtgcggacacttcgaatgcagtatctgtctgccgaggtcatcgcggccttctacggcgatgaggacgcctatgatcgctatacgctggcgcggttggagctcatgcgcaacaaggagctttcgccgcaggcgcgggcgcagcaactggcggaactggagcgacagttgccggatgacatccaggactcgctcaaggcgatgaatcagtacctgaacctgaagacgttgacggacgactggaaacagcgtggcggatcggcggaggagttgcaccagatccgccagggattgttgggcgcggaggcgaccgcgcggctcgaagtgttggaccaggaaaatgcctcttgggaccgtcgcatgggcgattggtatgcgcagcgcgacgaattgctgaagacacccgggttgagcgaggaggatcgcgagcgccagctggacgatttgcgccggagcagtttcggcaacgaggccgaacggcgacgcgtggaggcgctggaacgaatccatgaccaggccctgctttccaagcagccctga

SEQ ID NO: 345113 - DNA, 264 bp, Pseudomonas aeruginosa
atgctcagcggcgccaacgcgatccagtacaacctctacaagctcggcgacgcgacggtctggaccaccaccagcacccagcccggcaccggcagcggtgccgcgcagaacgtgcccgccggcacctacagcgataccgtgcgggtcatcctcacctactgggtcaggccggctgccgggacgccttccaatcctcgccgccctcgccttcccgccgcaggctccagtccttcaggtgctccaggctggcgcgatagggcttga

SEQ ID NO: 345114 - DNA, 639 bp, Pseudomonas aeruginosa
atgcccgtacatgagatccgccaccccctcatccgccacaaactgggcctgatgcgccgtgccgatatcagcaccaagaacttccgcgaactggcccaggaagtcggcgccctgctgacctacgaggcgaccaaggacctgcccctggagcagtacgagattccgggctgggccggcccggtgacagtggagaagatctccgggaagaagatcaccgtggtaccgatcctgcgcgccggcatcggcatgctcgacggcgtgctcagcctggttcccggtgccaaggtcagcgcggtcggcgtcgcccgcaacgaagagaccctggaagcgcgcacctacctggagaagctggcgccggacatcgccgagcgccgctcgctgatcatcgacccgatgctcgccaccggcggctcgatggtcgccaccatcgacctgctgaagaaagccggcagcaaggagatccgcgccatggtgctggtcgccgcgcccgaaggcatcgaggcggtgcgccaggcgcatcccgacgtgatcatctataccgcttcgatcgacgagaaactcgacgagaacggctacatcatcccgggcctcggcgacgccggcgacaagatcttcggtaccaagcagaaggaagcctga

SEQ ID NO: 345115 - DNA, 486 bp, Pseudomonas aeruginosa
atgttcgcccgtagcctgtgcggctccctgctcctgttcgtcagcctggccggcctggccgccgagaaccctccgatgcacgcgcgcttcctgccgcccgacgatggccagtcgcgccaggaggcgccggagcagcagcaactgatccagatcaccgagtacagcgtggtgctgggcaaccagcggcagtccaaccagcagccgatcccgatcaccacgccgaccctgctgcgcctgaagggcaagccgctgagcaagggtgcgaccctggcgcaggtgctgatccagttcgacagcgaaggcaagagcctgaagaagcctgtctacgatccccggacccgcaccctcacgctcaactatccgctggcgcagtacccggcgttgctcgacctgctgcgcaaccagacggtctattgccaattcctcgcctaccccaacgggcatgtctgggccgacctgcacaccggcacggtacgcgcgcgttga

SEQ ID NO: 345116 - DNA, 3345 bp, Pseudomonas aeruginosa
ttggtaggtcagcgccggatcggcatcgccgtagaccttggtcttggcgtcggcgatcacgttcagcagcgccttggtgatggtcaggtcgttgccctggtaattcagcgtgtagttgctgctgaccaggcccaggccgccctggttgatgccgtagaccccgacattctcgcccgccacgcgactcaggctgccgccattgagcaccgcgccggcggtatcgccgcgcttcaggccggagacctggtaggtgagggtcggatccaggtcgccgtacaccttggtcttggcgtcggcgatcacgttcagttgcgccggagtgatgcgcaggtcgttgccgacgtagctcagggtgtagttggcggtattgaggcccagcccgccctggagaatcccgtagttgccgacattctcgccggccacccggcccaggttgccggtcagcacgctacccgcggtgtcgccgttcttcagaccgctgacctggtaggtcaggctcggatcggcgtcgccatagaccttgctcctggcgtcggcgctgacgatcagttgcgccggggtgaccgtcagcttgccgtcctggcgtaccagctggtagcgctggctgaagtattcgctgccgttggcattgccggtgatcgcgtactgcccgacgttcgacgcctgggtcgcagtggtgctggcggtcacctggtagaggtcgttgaactggctgttgacataggcatcgatggcattgatgccggacatggtcgccgtcagcgccgggttggcatcgccgtagacgcggctggcatcgccggcggtcagggtggcggtctgctggcgcgagagaatgtcgccagcggtagtagtggtcttgaacatttccacctgggcgcgctcggcaaagctgccgaatggcccctcgcgcatgaacaggtcgaggcgggtgtcgacgcggctggtcttgccgcccaggccgaagatcagttcctcggtcaggccggtgccgacgtcgtactgcaattcgtcagtcaccccgatcaccccgccgaagcccttcacgccccaactggtgccccagttgccggcccaggtggtgacgctgccgttgccggcggcgacggtgaagccgctgggcgtgccgccggtcggcgtggccgtgacgtcgctgccgttgacccggtagcgcaggttggtcaccaggtaatccgacgagtcgttggtcgggaagctggcggagccgctgacccggcggtagggcaacgcggtgaagaccaggcggtcgaactcgctgttgccgtcggcggtcagggtgtagttgccggtggtgcctctgctgttggcctcgaggacccgggtaccgacgctggagacgatgttctgcgcggtgccggtcatgctctggctggcgatgaacggatcgaacaccgtgccgctggtggtcacaccggtggagttgctctgccggtacttcaacgcgccattgaaggtctgcagcgccaggttgccggcgtagttgtcccaggaaccgagatcgatgctgccggcacgaccggccaggttggcggcgatcagcgcggtaccggcctgctggctgatcttgccggtggtgctggtctgcatccacagggtgccgctgccaaggtcgacgatgccactggtctgcggggtgccaccgctgaggaagttgatattgccgccggcgcggatcgccaagctgccgttgcggaacaggatcggcgcggagatgtccaccgcgccggccgggccggtcgcgatcaactccaggccacggctggcgccgcccaggttgttggtgatcagcggcgcctcgaccgacagccggtcgctggcgctgagggtaacccggccgccggccagcgcgccggtgaccaccgaggcattgaccgtcgcgttgccgctggcgccattggctccccccaccgagccggaggtgccgccggaggcgacgatgcgcagggtggtcgggtcgagcagccaggtgccgccgttgccgtagggtgccgcgacgctgacgtaggcgctgtcggcgatgctcaggttgaccttgccggaggtttccaccaggccgccgttgccgccctgggcaccgccccgggcgaggatccgcccgtccatgcgggtattgccgtccgaccagaccacggcaaggccgccgttgcccttgccggttgcggaaacgtcgatgctggcgcccttgtccagcgtggtgttcttcgcccggggcagttcgccgcggccctggaagtcgccgccgatgcgtacgctgccaccctgggcggcgccgcgcgcatcgacgctggcgctgctcgccaggaccacctgctggccgctgaccagcacgtcgccaccattcttcggtccgctgacgtcgatcttgccggcgacctggatgtccccggacttgctcaccagcgccacgctgccctcgcgcacctcggtgccgcgggcgaggatcacgccggacaggttgaccgcgttatcgaccacccgcgaggcctgctcggcggtgatcagcacgctgccgccatcggcctggatggccccgccgttgctgaccagcgcctgggcatcctgcggcttgcgggtgaccgggtcggtcaccgcgatcgacaccaggccgtcgccgtagaggtcgatggtggcggcgttgccggcggccatcgccacggtgccgaggcgcgcgttgatcacgccgttgttggccaccgacggcgcgacgaaggccgccaggcctttctcggcgacgctgatgctgccgtcgttgacgatccgcgcattggggttaccgggctggtcgaagatcagcttgccctggcggaagtgttcgtcgctgatgttcgccgtggtggtgatcagggagccgacgtcgaccttggccgtgccgctgaataccacgccgttggagttgtagatgatcacctgcccgggcgccgagatgcgcccggcgatcacgctttcctggccggcggtgacccggttcagggtcgacgaggtcaccccgggctggttgaagcgcaccgcttcgtcggcggacacgtcgaagcccttccagttgatgatcgcgcgctgggtgctctggtcgatcagcgtggtcttgccctgctggctgatcttgatctcgttggggttgaactgggcaccggtgggcgccgccatggccgcgttgatactggcgatggcgaacatcagggtgctgctggcggcgaggacgaaacgaccctccctaccggctttcgaagtggtgcgcttgtcgcgctggttatccggacggaccatgaaaatctccctatctacgtggcgcacgtcagttttccagcacttcatttcgtcagttaa

SEQ ID NO: 345117 - DNA, 684 bp, Pseudomonas aeruginosa
atggccttcgacgccgccgactatgtccaccgctaccacgccagcctggaatatgctccgggcaatgaatacccgcgcctgaaagcctgggagttcctctgggaatacatctgggattcccggcgtagctgggacgacctggtcgctcccgagcagctcgataccaccgcactgcacctgggcttctacctggccaactggggcatgttccgtggctcgtcaggcctgttgcagaacagcaatctggacctgatgaaggccctggcccggcagttgttcggcggtccggggccggagctgttcgaactgtcgctggtggacttcgccgccagcgccccacgcctggcgcgtaaccaggaactgctggagacggtgctcggcgcgatggacaccctcagcagccgggtcagctggaccgacaccctgaagagcaagatcctcctcggcgtctggggcgagttccctgccctcgaccgctactacgtggccgcctgtcgcgcgctgtacccgcgccgcccccacctgacacgcgccagcggcaagacgctgaccgcgctgcacggcctgatcggcgcggaacggctgtccttcccgcgcctggaaaccgcccgccagggactgctctatcccaccggccgcctggccgacatggcgttcttccagtacgggttggaacacgcctga

SEQ ID NO: 345118 - DNA, 180 bp, Pseudomonas aeruginosa
atgcataacggagttcaagtggtatccgccccgctaaccaccctgttcgtggttgtcactgcggccttcgccgcctctctcgaccaccgccacccgctcgccacgccgtcttcggccacgagcgaacccggcatcgcccacgacatccgcctgctgccccgcgccgccgctttccgctga

SEQ ID NO: 345119 - DNA, 651 bp, Pseudomonas aeruginosa
atgagctatccacgcttcgccgaccgccgccacgccggccgcgagttggccgcccggctgcgcggcctgcgcctgccacggccgctggtgctggccctgccgcgcggcggggtgccggtcgcctacgagatcgccctggtcctggcggcgccgctggacctgctgctggtgcgcaagatcggcgcgccgggccatccggagttcgccctcggcgcggtggtcgacggcgccgatccgcactgggtggtggacgagcgcatgatggaactgttcaagccgccgccggactggttccagcacgagctcgccgtgcaactgcgcgaactggagcgtcgtcgcgcacgctactgccggcaacggccggcgccgcggatagagggtcgcgacgtgctgctggtggacgacggcatggccaccggcagcagcgccctcgccggcctccaggccctgcgccggcaagccccgcgctcgctgcgtctggcgctgccggtggcgtcggcggcgagtgtggcgcgcctgcgcccgctgctggacgaactggtctgcctggacacgccggagaccttccgcgcggtgggcgatcactaccgggacttccacccgctcgacgacgacgaagtcatcgagctgctcgccgccgtcccgcattga

SEQ ID NO: 345120 - DNA, 1344 bp, Pseudomonas aeruginosa
atgcccgcacccgcacctgcacaccgcgccaacgaggaggcgcgcctggacgcgctgctgcggcggcacgccgaaccgctgccggcactggacgacgagtcgttcggagccgccttcgagcgcttcgccgatgcccgcgtggtgctgatcggcgaagccagccacggtacttcggagttctaccgggcgcgcgccgccatcactcgtcgcctggtcgagcggcacggcttcggcctggtcgccatcgagggcgactggcccgacgccgcgcgcatcgaccgtcatgtccgcgcgctcggcgacgaccgtgtggatagcggcgacacgcctttcagccgctttcccagctggatgtggcgcaaccacgaggtgctcgcgttcgtccgctggctgcaacgccacaacgccgagcgccccgccgccgcgcgctgcgcctttcgcggcctggacatctatagcctgcgcgcctcgatggacgccgtgctgcgctacctggacgcgcgctacccggaacgcgccggcgaggcgcggcgacgctacgcctgcctgacgccctggcaggacgatccgggcgcctatggcgcgcgggtcgagtggggcggcggcgactcctgcgaaaacgcagtggtcgagcagctcgacgatctgctgcgggcccgcctggagaccctcgaccacggcgaaggactcttcgacgcgacccagaacgcccgcgtggtgcgcgccgccgagcagtactaccggtcgctgtaccacggctcggtgtcgtcctggaacctgcgcgacaaccacatgttcgacaccctcaggcagttgctgcgccagcgtggccgcgacgccagggcggtggtctgggcgcacaactcgcatgtcggcgacgcctcggccaccgccatgggctggcgcggcgaattcaacctcggccagctggcgcggatcgcctggggcgacgaggcggtactgctgggcatgggcagcgaccatggcgaagtggcggccgccgatgactggggcgggccgctgcggatcaagcaggtgccgccggcgcgcgaggacagctgggagcgacgcttcctccaggccggcctgccggcctcgcttaccgactggcgcggcgagcgccgccggacgctgcgcgaagccctcgcccaggcacggctgcaacgcgccatcggggtgatctaccggccgcagagcgagcgcctgagccactactacgaggcggtgctggccgagcagttcgacgcctacctgtggttcgagcgcggcacgccggttactccgctggatccgctggacggcggcgccggcgcggaaagcgaaacctaccccttcggagtctga

SEQ ID NO: 345121 - DNA, 1476 bp, Pseudomonas aeruginosa
atgagtgaagcatccgcgagcaccggctgctgctggaccgccagtgtcccgccagcaagctttccacgcctgaccacgaaccatgactgcgaggtggcggtgatcggcgccggcatcgtcggtctcagcgccgccctcgctctgcgccaggccggcaagacggtgaccgtgctggaggcgctggaggtcggcgagcaggtcagcggccgctcgacggcgaagatcagtgcccagcatgggctgatctatcactacctgatcgacaccttcggtcgcgaactggcccaggcctatgccgacgccaaccgcgaggcgctggagaccatcgcccgctggatcggcgagtaccgtatcgattgcgactaccagccgcagtcggcctacgcctatgcgaacacgccggagggccttgcggcgcttcgccaagaggccgaggccgcgcgttcgctgggcttcgacgcgcggctgctggagcgcgcgccgttgccattcgccaccagcggcgcgctggaattccccggccaggcgcaattcaaccccgcgcgctacctggtcggcctggcccgggcgctggaggccggcggcgggcaggtctaccggcggacccgcgccaccggcttcgagcacgaccggcgctggcggatcgccttcgacggcggcacgctggaggccgaccgggtggtactggccacccacctcccggtagaaaccccggtggactacgccagtccgacgcaaccgcgctgccacgtggcgatggcctttcgccttgaggagcgggcgcggctgccgggcatgttcatcggcatcgacccgcccacgcactcgatccgcagcggccgcgacgccgaggggccattgctgctggtgctcggcccgcgcttcaacaccggccaggacggcgacgtggcgcgacgcttcgtcgaactggaggactgggcgcgtcgccacctgccggtggccgaggcggcctggcgctggtgcaacgaggactacgacaccccggaccgcatgccctacgtcggcgaagcggacccacgcaaggcgccgggcctctacgtcgccaccggcttcaacgcctggggcatcagcaccggcaccgccgccgggctggccatcgccggggagatcgtcggcggcgaacgcccctggggcacgctcttcgccccggaccggccggccgcgaaggacttcaaccagggcggcgacagccagtcgcggatcgacgatccggcgcgcctggcccccggttcgggcggcgtgatccgccgtggcgaggagcacctggcggtgtggcgcgacgacgacgggcaactgcacgcggtcgatgcggcctgcacgcacatgggttgcacggtgacctggaacaacgccgagcgcacctgggactgcccctgccacggctcgatcttccgcgccgacggcgcggtgctgcacggtccggcccgccagccgctgcccaaacgaaccctctag

SEQ ID NO: 345122 - DNA, 1146 bp, Pseudomonas aeruginosa
atggaagcgaaaggacactgcgcaagtggcttcgaggcggtccgccaggcgttcgaggcgatcttcgacgatcccgccgagcgcggcgccggcctgtgcgtacaggtcgacggggagacggtcgtcgacctgtgggcgggcgtcgccgacctgcgcgggcaggtgccctggcggcgcgacaccttggtcaacgcctattgcgtgatcaagccgatcgccgccgtggccgtgctcatgctggtggaggagggcaggctggggctggacgtgccggtctgcgcctactggccggcattcgcgcagcacggcaaggagcgcatcaccctgcgccaggtcctctgccacaccagcggcctgcccgcgctgcgcccgccggatcgaacccccgtcatgtacgactgggaggcgatggccggggcggtggccgccgagcccgcctggtgggcgccgggaacggaactggggtacggcgcgacgacctacggctggatcctcggcgaactgatcaggcgggtcgacggcagggattcgcggaccttcatccaggaacggatcacccggccgctgggcctggaagtgcacacgggcgtggccccggcggatttccagcggatcgcccacttcgagcacgccgcgggtcgccagggcgaacgctacgcgcgggaactgcgcgacatcatcgtcaatcggcccgagcatgtggcgaccctggccttcaccaatccgagcatgtcgtcgaagaacaccagcgacccgcgctggtgggcctatcaccaacccggcgtctgcagccacgccaccgcccacggcctggcgggcttctacagcgcgctgctggacgggcgcctcatcggcgccgaactgctgcgcgcctttcgccaggagcacagccgtggcctcgaccgcacgctgtgccggccgatgcgctatggcctgggctgcatgctggaaaaccccgccgacccggcggcctcgtaccgcatgggcaaggacgcgttcggccatgtcggcctcggcggaccggtcgccttcgccgacccgcaacggaacctcagcttcgccttcgtcaccaccaccatgggcggccacgtgctgatggatccccgtcccggggtgttggcggagcgttgctatgcggcgttgtga

SEQ ID NO: 345123 - DNA, 243 bp, Pseudomonas aeruginosa
atgtccgttacggatgcgcagctgaagcagaatacggcatttgcgctcggcctggagcaggacgagtttgtgatttccaatcgcgtggactctggcataaagagcagttatacggtgaagacgaaggacggtcgccaatataattgctatgtggaagggatgataagcttctttggtagatcggtttccgatgccgtctgtagcgaaaagggcaagcctgtgggtaatccattcatgaggtaa

SEQ ID NO: 345124 - DNA, 498 bp, Pseudomonas aeruginosa
atgaacagcatcggtgccgccagcctttccggctggcctgcgcgttacctgaacaaccagcggcaaaccaccgtcgacaccggcggcgatctgtcgaaaccgcgccccgccctcggcacgccgctaggcggcgaagccgccgatcccgccgcggagtccgcccgccaggccttggacgaaggactcgcgaagctgaacctgacgctgaagcagaaccaggcgcatccccctgccgccgccagcgaaggcaagtcggcctatgacgagttcaaggagtacatgcagaagtcgcccgccgagaggatgcgcgagcaggtcctgaagagccttggcctgagcgaggaagaactggcggcgatgccgccggagaaacgcgagcaggtggaaaacagcatcggcgaacgcatgcgcgaaatgatcgccatgcagaacggccaggcgccgggccggcagaaggacccgacgcaggccggcgcggcgctgaacgcctggatctga

SEQ ID NO: 345125 - DNA, 240 bp, Pseudomonas aeruginosa
atggccaaggcactcatcagcgtactgttcctctccctcgccctcgccggctgcgccagcgactacaacccctcgcgcccctacggcgaagacgaggtccgccaactggcgctggaagacctggcgcggcgcagcctgtcgttcgaggagtaccaggccaagcgccaggcgattctccagcagcaagcggaaaccactgtcagccaaaccaccgccgccggccgcagcaacgccatctga

SEQ ID NO: 345126 - DNA, 141 bp, Pseudomonas aeruginosa
atgcgcatcgccgtcaccctggtgttgcccatcctgctgatcctcagcctgctcggcttcgatttcctctacgcccggcatgtccagcccgacacgcctggcgcctgctcggccgcacacgcctgccgggctgcgccctga

SEQ ID NO: 345127 - DNA, 678 bp, Pseudomonas aeruginosa
atgaagatcctgctggtggatgaccatcccgtggtccgcgaaggcctcgccgggttgctacggggcctgctgcccgacgtgcaactgagcgaggccggcgacggcgagcacgccttgctggcggtgcagcgcgagattccctcgctggtcatcgtcgacctcgacctgccgggaatcagcggcgtggagctgacccgtcggctgcgccagcgcctgccgcagctgcgcgtgctgttcttcagcctgcacgacgagctggcgctggtgcgccaggcgctggacgccggtgcccgcggctacctgaccaagcgcgcggcaccggcgacgctgctggaggcggtgcgccgggtgctcgcggggcaggtctacatcgagcagggcctggccatccgcctggcgtgccagcagcggagcgaggagggcgaggccatcctgcgcgacttgacccgccgcgagttcgagatattccgcctgctcgcgcgcggcctggccatgcgtcaggtggccgagcaactgggggtgagcggcaagaccgtgtcaaaccatgtcagcctgctcaagcagaagctgcaggtgagcacccaggcggaactggtgcaccgggccatcgacagcggcgtgctgcggctgggcctgccgctgccgctcgccgagaaggcttgcggcagcgtcgggtag

SEQ ID NO: 345128 - DNA, 1206 bp, Pseudomonas aeruginosa
atgacggacatccacatcgacgtactcatcaacggctgcggcatcggcggggcgatgctcgcctacctgctcggccgccagggccaccgcgtggcggtggtggagcaggcgcggcgggaacgcgcgatcaacggcgccgacctgctcaagccggccggcatccgggtggtcgaggcggccgggttgctggccgaggtgacccgccgcggcggacgggtccgccatgagctggaggtctatcacgacggcgagctgcttcgccatttcaactattccagcgtcgacccgcgcggctacttcatcctcatgccctgcgagtcgctgcgccgcctggtactggaaaagatcgacggcgaagcgaccgtcgagatgctgttcgatgcccgcatcgaggcggtgcagcgcgacgagcgccatgcggtcggccaggtgcgcctgaacgacggccgcgtgctgcgtccacgggtggtggtgggcgccgacggtatcgcctcctacgtgcgccgccggctgctggacatcgaggtggagcgccacccctacccgtcgccgatgctggtcgggaccttcgccctggcgccctgcgtggccgagcgcaaccggctgtacgtggactcgcgcggcgggctggcctacttctatccgatcggtttcgaccgcgcgcgactggtggtgagctttcccagggaggagtcgcgcgagctgatggccgacacccgcggcgagtcgctgcgccggcgcctgcaacggttcgtcggcgacgagagcgccgaggcgatcgccgccgtcaccggcacctcgcgcttcaagggcatccccatcggctacctgaacctggaccgctactgggcgggcaacgtggcgatgctcggcgacgccatccacaacgtgcacccgatcaccggccagggcatgaacctggccatcgaggacgccagcgccctggccgacgccctcgacctggccctgcgcgacgcctgcgcgctggaggaagccctggccggctaccaggccgagcgcttcccggtgaaccaggcgatcgtctcgtatggacatgcgctggccaccagcctggaagaccgtcagcgcttcgccggggtcttcgacaccgccctgcaaggcagcagccgggcgccggaagcgctgggcggcgaacgttcctaccagccggtgcggtcgccatcccgggagcttacgcgcaactga

SEQ ID NO: 345129 - DNA, 876 bp, Pseudomonas aeruginosa
atgacgacgaaaaacctttgtgtcctggcctgcgcgctgggtctggccggctgcctgcagggcgccgtggtcgagcggcccgacgcgcatggggaaacgctggcgccgccgccgctggcgatcgactacaacagctaccggaccagcgccgcctacaacaagagagtgcgctacctggtactgcactacacggcgctggacttctcgcgttcggtggagatgctcacccgggggccgggcagcgcccactacctggtgccttcgccggccgacgccagctaccgccgcgccggcttcagcgggcagcggatcttcaacctggtcgacgagaacgaccgcgcctggcatgccggggtcagcagctggggcggacgcgaagggctgaacgacagttccatcggcatcgagatcgtcaacctcgcccgcgacgacgatggcgtattcaccttcccggactacgaaccgtcgcagatcgaggcgctcaggcaactggcgcggaacatcctgcagcgctacccggacatctcacccaagcacgtcctcgggcattccgatatcgccgtggggcgcaagtccgaccccggtccgaaactgccctggaaggaactccacgacgccggcatcggcgcctggtacgacgacgccacccgcgatcgctaccaggcacgcttcgaacgcgacgggctgccgtcgcgcgcagagtggctggaagccttgcgccgctatggctacgccgtgcccgaaaggggcaatgacgaggacttcgccaatctgctgcgggcattccagatgcatttccgcccggacaaccacgatggcgtggcggatgccgagacggcggcgatcctctatgcgctgaacgagcgctactcctga

SEQ ID NO: 345130 - DNA, 774 bp, Pseudomonas aeruginosa
atgaatagtttttctgacaaggtcgcgatcgtcaccggcggcggctcggggatcggcaaggaggtcgcccggcgcctggtcgaggccggcgcacgggtggtcatcggcggccgcgacgcggccaagctggagcgcgccgcccgtgacatcgaccccgtcggcgacagcgtccgcaccctcgccggcgacatcgccgacccggccaccgcccaggcgctggtggacctggccagcgccaccttcggcggcgtcgacatcctggttaacaacgccgggatcttccgtcccaagccgttcctcgaggtcaccccggaggagtacgacgatttcctcgataccatcctcaagggcaagtacttcatggcccaggccgccgcccgcgccatgctccggcgcggcgccggggccatcgtgcagaccggctcgctatgggcgatccaggccgtcggcgcgacgccctcggccgcctactcggcggccaacgccggggtccacgcgctgacccgcaacctcgccctggaactggccggcgccaatatccgcatcaataccgtggcgccggcggtggtcgagaccccggtctacgccactttcatggaccccgaacaggtccgcgaggtgctgcccggcttcaacgccttccatcccctggggcgcaacggccagccgggcgacgtcgccgcggccatcctgttcctcgcctcggacgccgccggctggatcaccgggaccgtgctgccggtcgacggcggggtcaccgcgggacgtccctga

SEQ ID NO: 345131 - DNA, 933 bp, Pseudomonas aeruginosa
atgaacggtcccgtgtatctcaacgccctgcgcgccttcgaagccgccgcgcggcacctgagcttctccgccgcggcggccgagctgaacgtcactcccgccgccgttggccaacaggtgcgcaatctcgaggcctggctgggcagcgaattgttcatccgcgccggccacggtgccgcgcgcctgaccctgaccgaggccgcgcgcgccgcgttgccggatatccgcgccggcttcgagcgcctggccagcggcctggccaggctgaaggacagcggccgccaggcgggcctgacggtgacggtcagcccggccttcgcggcgaagtggctgctgccgcgcatcgagcgtttccagcaggctcacccgcgcatcgacgtgttgctggacaccaactcgcgctcgctggatttccatcacgagcgcatcgacattggcgtgcgctacggcgccggtcgctggccgggcctggccgcgatccgcctgctggacgaggtgatgttcccggtctgcgcgcccggctatccgccgttgcgcaacggccggctgagccgcgcggcgctggcgcgctgcaccctgatccatgacctgtcgatggccagcgatcccgactatccgacctggcgcacctggctggacgcggcgggacacggcgatctcggcgccgaccacggcctggcgatcaacaactcggcggcggtgctgcaggcggcgatggacggccaggggctggccctggcccgcagtgtgatggtgcaggacgacctggcggcgggccgcctggtccgcccgctgatcggccgcaacggcacggagcgcgcgctggcccaggcctactacgtggtctaccggcccgaatgcggggcgctggagaaggtccgcgcgttccgcgactggttgctgggcgaggccggcaggccggccgcgggctga

SEQ ID NO: 345132 - DNA, 849 bp, Pseudomonas aeruginosa
atgataaaagaagtcatgaaaatgtcccccgctccccgcgacctgatcctcaagttcctcctgagcgccgacgacggccagttgaccgcgcgcgacgcggtggccgcctgcgcgctgttcggcatccgcgagaacagcgtcagggtcgcgctggtgcgcctggccgccgccggcatgatcgaggcagccgagcgcggcgcctatcgcctgggtgccaatgccagcgacctggcggaggacgtgcgcgactggcgcaacgccgagtcgcgcgtgggaccttggagcggtgcctggatcgtcgcgcattgcgccggcctgggacgcaccgatcgcgcacagctgcgccggcgcgaacgagcgctggaactgctggggttccgcgagctggagcgcgagttgttcgtgcgtccggacaatctgctgggcggcgtgacgatggtcagggagcgcctgctcaagctcggcctcgaaccttcggcctgtgtgttcctggcgatgcagttcgacccgacccgcgaggcgcgcgcgcgcggcctctgggatggcaagggcctcgatcgcggctaccgcaggaccgccgagaagctccgcggctggatggcgcgggccgatgcgatggagcccgaggcggcggcgcgcgagtccttcctgctcggcagcgcggcgatccgccagttggtctacgacccgctgctccccgagccactggttgatccgcacgagcgccgcgccttcatcgaggccctgttgcgctacgacgatgccggccgagccatctggcgcagcctgcgagcgccggcgcttgccggggcgccggccggcagcgccgccgaacctgtccgccactga

SEQ ID NO: 345133 - DNA, 1020 bp, Pseudomonas aeruginosa
atgctccaggatgccgccgttcgccaggaaagttcacccgccacgcgccgcaagctcacgcagttgttcagccgcgacgaaatccgcatgctgacccggcgctcggatctcatgggattcgccgccgtcggcttcacctggggcgtcatcgccctggcgttcgccgccatggcctgggccagcgggcaggcgccggcgctggcggtcccggtgttcctgctcgccatcgcactgatcgccgggcggcaactggccctggcgatactcatgcacgatgcttcccacggcaccttgttcaggcatcgctggctcaacgaggtcttcgccgactgggtgtgcgccaggccgatctggaacgacctgaagaaataccgcagccatcatctcgcgcatcacgcccggaccggccaggcggacgatccggatctctcgctggtggcgcccttcccgacgacccgggcgtcgctggcgcgcaagctgctgcgcgacctcagcggcctgaccggggcgaagttcttcatcggtcgctttctcatggatgccggctacctcaggtggacggtggccaacgagcgggtcaggctgcccgccgacgggcagacgttcgccagccgcggactgctgttcctgcgcaacgcgacgcccaccctcatcaccaacgcgctgctcttcggcctgctctggaccgccggacatgcctggctgtacctcgcctgggtggtcgcctacatgacacccttcgccgccttcgtgcgtatccgctccatggccgagcatgcctgtaccgagaacgtcgccgacaacttcctcaacacccgcaccacccgcgccggctggatcgccagggccacggtggcgcccatcaacgtgaactaccacatcgaacaccacgtgatggcctcggtgccgtacttccgcctgccgttgatgcaccggatgctgcgcgagcgcaacgccaccggcgcgccgccgggctacctggaagtgctgcggatcgtgtcgtcgcgccgggccgcctga

SEQ ID NO: 345134 - DNA, 744 bp, Pseudomonas aeruginosa
atgtcctccaacgcgctgtacaccgacctgtccgcctactacgacctgatgtgcgccgacatcgcctaccaggcgcagagccactgcgtgcggcgcctgcaccagctgttcggcaaccaggggcgccgccacctggacctggcctgcggcaccggcccgcacgtgcgccacttcctcgacttcggttaccgcagcgccggcctggacatcaaccagccgatgctcgacctcgcccggcagcgctgccccgaggcacgtttcagtcgccaggacatggccgacttccaggtcgaggaaacgctcgacctgatcacctgcttcctctactcgatccactacaacgccggcctggctcccctgcgggcctgcctggcgagcgtccacgaggcgcttggagacggcggggtcttctgcttcaacgcggtggacaagcaccggatcgacaaccgttcgttcgtccgccacaccctggaacacgagggcagccgcttcaccttcggctccggctggcactacggcggcgagggcgagcgacagacgctgcgcctcggcatcgagaagaccacggcgggaaccacccaggcctggcaggatgaacaccccatggtcgccctcggcttcggcgagctgctggaactgctgcggccgcacttcgaggtacaggtcttcgagcacgactaccagcggatcactccctgggacggcgactccggcaacgcgctgttcgtctgcgtcaggcgctag

SEQ ID NO: 345135 - DNA, 510 bp, Pseudomonas aeruginosa
atggtcctgaccagcaccatcaccctctacgacgagcgctggcccatacgcttccaggtcgcccgcgcacagatcgctggtgccttcggcgacgagctgctggccatccatcatgtcggcagcaccgccgtaccggggctcgcggccaagccggagatcgacctgctggtggtggtttcggcacagcgtgacgaggtccgccgcgacgaggcgttgcgcgacctcggttatgtgcgcggcagcgacctgtcggcggggcaccatttccatcggcgcgacgtcgacggcgtgcgcactcacaagattcatgtctgcaccgagggtcatgcacagatcgacaggatgctgcgtttccgcgacctgctgcgcaaggattcgctcctgcgccaacgctaccaggacctcaagctggccctggaggcggaaaataccggcggcatcggcgagtacctcgccggtaaggcgcccttcatcgacagcgtgatggccccctgtgccgaacggtcctga

SEQ ID NO: 345136 - DNA, 429 bp, Pseudomonas aeruginosa
atgagaaacgacacccgcctctcgcgcatgctccatgtgctgatccatatggcccgccacgaagggccggcgacctccgaagccatcgcgcatatgcttggcaccaacccggtggtggtgcggcggaccatggcgctgctgaagaacgaaggctacgtgagttcggagaagggccatcgcggcggttggaggctggccaagccgctggcggacatcactttgctggatatccaccaggcactgggagcgtcctcgatcttcgccatcggcctgtctaccgaccatccggaatgcctggtcgagcaggcggtcaacgaagcgctcggcgaagcgttcgaggcggcgcaggcgctgctcctggagcgcctgggtagcgttacgctggagcagttggcgagcgagttcgagcgccgctaccggccctgctga

SEQ ID NO: 345137 - DNA, 939 bp, Pseudomonas aeruginosa
atgaaaaccttcgccatgctcgccctggccgccgcgctgccgttcgccgcacaatccgccgcggccgccgactggtacccttccgcctacggcgcgaaggacgaaatcggcgccgccaacctgctcaccccggaagtggtgaaacaggcggtcggcctggtcaggaccggcaagacctacccgctggcggtgccggtggacaagaaccttccggccttccgccaccgcagcttccgcctctacaacatccagccgggcgaacaggccgggcagtccctcgggccgaacaggttcaccttcaacgacgaactggtgaacgcctggaccggtgtcggcacccagctcaacggcatcggccacatcggtatcgacaaccgctactacaacggcaaccaggccgccgacttcgtcaccgtcgaaggcgtgaagaaactcggcatcgagaaggtcccgccgttcgtgacccgcggcgtggtgctggacatgaccgcccactatggcaaggacatcgtccccggcggcaccgagttcagcgtcgccgacatccaggcggtgctgaagaagcaaggcctggccctgcgcaagggcgacgtggtgctgttcaacaccggctggctggaactgatcggcagggacaacaagcagttcctcgaagtcgagccgggcatcggcatggaggccgcgaagtggctggccgaccagggcatcgtggccttcggcggcgacacctgggcctccgaggtgtatcccaacccgcacggcaaggacgagttcccggtcaaccagtacatgctggccaagcgcggcatctacaacctggagctgatcgacagtcgcgcgctggttcgcgaccaggcctgggagttcctcttcgtcctcggccagccgctgtacgtcggctcgacccaggtcaacatcaacccggtggccatccgatga

SEQ ID NO: 345138 - DNA, 534 bp, Pseudomonas aeruginosa
atggccaaggcccgtgcatccatcgatctacgcaacgacgccgaacaggtctggcgcctgatcggcggtttcgacgcgctgcctgactggctgccgttcatcctgcagagcgtgcccagcgagggcggccgggtccgaacgctggagagcgtcgagggcggcaccagcgtcgaacgcctgctcgacttcagcgaggccgggcgcaaccatacccacgccatcctccaggacccggccccggtgcgcgactgccaggcgaccctgcgcgtcctgccgctcgccgacggccgtcgaccattgccctgcgaccttccgcggtgcgcatcggtcggaacggccggggccgaggctggcgcagacgaagagtcgaggcaccgagaactacctgggacggaagaacaaggccgggaggcgggggcctcccggccagagggtcactcgcgtaccagcggcggcgtgcgcggcggcacgatgcgccgcgcgccggtcgactcgaaggctgcggcgaagcgcagcagcgccgagtcgtcgtag

SEQ ID NO: 345139 - DNA, 492 bp, Pseudomonas aeruginosa
atgcttcatattccccttgcccgactggcgctcccgttcctgtgcaccaccctctcaccattcgcggcgcacgccgccgcagcggaccccaccatcgaggccgccgtcacccggcagctggaacgctatgaagaggcgctgaacgcctccgacgtcgacgcggtgatgagactctatgcccgcgactcggtgttcatgccgcaacacagcctgcccgcggtgggccgcgaggcggtacgcgcggcctaccggcaggtgttcgcgaagatccgcctggacatcgacttcagcatcgacgagatccgcccgctgggcccggactgggccttcgcccggacccgctccaacggtacgctgaaagtgctgggcgtcgacgctcccgcagacgccgaggccaaccaggaggtgttcctcctgcaccgcgaaaacgacggccaatggcgcttcgcccgctacatcttcagcaccaccaatcctccccggctgccctga

SEQ ID NO: 345140 - DNA, 378 bp, Pseudomonas aeruginosa
atgagcatccagtccatcctgcgatcctacgagaccgcactcaacgcgaacgacatcgacaccatcctcgaactctacggcgacgcgccggtgttcatgccgcagcatgccccggccctggtcggccgcgaagcggtgcgcgccggctaccggcaggtgttcgccagcatcggcctgcaggtccgcttcgacatccacgaggtcgaggtcgccggcgactgggcctgggcccgcaccagttcggccgggcgcacccgtctgctggccgacggcgtggaaatcgccgagggcaacaacgagctgttcgtgttccggcgcgaacagggtcactggaagatccaccgttatctcttcgccaccaaccagtcgcgcgcctga

SEQ ID NO: 345141 - DNA, 912 bp, Pseudomonas aeruginosa
atggacctgaacgcgcttcgcatgttcgttggcgtagtccaggcgggtagcctgtcggccgccgccggtcgcctcgggattcccctgccgacgctcagccggcgggtccgcgacctggagcgccagctcgctgtgcagttgcttgagcgttcggtgcgcgggacgcggttgaccgaggcgggcatgcggctctacgagaatgcctctcgcggtgtcgagatgctgcacgaggcggagcaggccctggtctcggaccaggcgcggctcaagggtcgcctgcggctgtcactgccgcccggtttcgaaccctggtgggagttgctcgggctgttccagcggcgctatccggagatccgcgtgcaggtgttcaccaccgaacggcgcatcgacctgatcgaggatggcgtcgacgtggcccttcgggtcggcgcggtcgctcatgagacgatggtggcgcgtcgcctgctggcctaccgacatgtactggtggccagtccgcgcctgctcgagcgcgagggcctggcggagacgctcgatgacctgcgccggttcccggccggcatgtggtcccccggcggcagcggcgagggcgcctggtcgctgggcgggcagccggtcaagccgcgggtggtgctggcgaccaacgactacgcgcacctgcgcgcccgtgccctggccgccgaactggtcgccgagttaccgccgttcatggccaccgccgcggtacgggccggggaactggtcgagctgctgccgcggttgccgttgccggagcaggaaatccacctgctctatccgtcgcaccgacatccctcgaccctcgtcaggacctacctggatttctgccagcagcacctggacctgttgcgcgaggcctgcgggctggacgagccgccgcccgccgagggctga

SEQ ID NO: 345142 - DNA, 891 bp, Pseudomonas aeruginosa
atgatcgacgatatccgctacctgatcgtattcgcccgcatcgccgagagcggttccatttccgccggcgccgaggcgctcggcctgagcgcggcgaccgccagcctgcacctgtccaggctggaaaggaacctcggctgcgcgctgctctaccgcaacagccgcaagctgtccctgacccaggatggcagccgcctgctggaaaccgcgcgatccatgctggaactctacgaaaagggcttcatcgagttccgccagcgcgccgtctcgacccgcaacagcctgcgcatctcgatgcccgcggtgttcatcaatggcgacttcacccgtcacctggcgagcttcatcgaggaacatccggacctcgatctcagcgtcgcctgcgacgacagccgccacgacatcatcgccgacggcatcgacatcgccttccgcatcggcgacctgccggacagctcgctgacggcccgccacctgttcctgctgccgcgccaggtggtggcgagcccggcgttcctcgcccgccaggcgccgccggaacatccgcgcgacctcgaacgcctggaatggatcggcctcgacatgcgccccgacagccgcgtgttcgagcacgccgccagcggcgagcaagcgcaggtccgctacaccccgcggatacgcgtcgacagtgtcgaggcctcctgtcgcctggcgcgcctcggcgtcggcctggccgcgccgccgacctacctgggcgacgaaccgatacgccgcggcgagttgcgcgcggtgctgccggaatggcgcctggcgccgttgaaggtgtatgcggtgtggccgccgaacgttcccgccagcggcatcgcctaccgcctcatcaagcacctgcacgacgcgttcaacccgggctag

SEQ ID NO: 345143 - DNA, 222 bp, Pseudomonas aeruginosa
atggaactcttgaatgaaagcgagatggaaaacgtagcgggcggcgatgtgtggggaacgccggtcccctccttccccggcgccaaggcgcgcgggttaggcgagatcgatccgggcttcgacggaacccgcctggccaggggcttctggccctggtggaactgccggccggtgatgccgccggtatgtccgcctccgccgtgccgtccgcggccctgctga

SEQ ID NO: 345144 - DNA, 1719 bp, Pseudomonas aeruginosa
atgtgcatggagtgccacaacaccggtttcgaacgcaatcacgacgccgccagcggccgcttcgacagccagtggctggctaccggcgtcggttgtcagagttgccacggtccggccgccgcgcatctggcctggacccgccagcccgatcggaggcaggcgcacgccggcttcgccgggagcctggcggccaccgccaaccgcgcccaggtggaaagctgtgcgcgctgccattcgcggcgctcgccgctaggcgacggcttcgatgcgacggcgcgcctgctcgacgactacctgcccagccccctcggcccggtgctctacgagctggatggaaagatcagggacgaagtcttcgagtacggctccttcgtccagagccggatgtacgcgaaaggcgtggcctgcagcgactgccacgatccgcacagcgcacgcccgaaagccgagggcaacggtgtctgcctgcaatgtcacaacccctccggtcgcgccgttcgccgtggcatcgacgctggcggcctggccgccggcgactacacctcgcgcgaacacctccgccaccgccccgaaggcccggccgggcagtgcgtcgcctgccacatgccggggaagtactacatggtcaacgacctgcgtcacgaccattccttcagcgtgccgaacccggcccgggccctggcgctgggtctctcggacgcctgcctcggctgccatgcgcagatgcccggggcaaccctggtggcaagcttccgcgactggtatccgcgcgcgctcccacgcgatggcggctatgcgcaggacctggcactggtgcgcaacggccaccccggcgccgccgcggccctgctgcggcaactgcgccgcaccgacctgccggcgatccgccgcgccacgctcctcggcgaggttcccggctatcccgggcaagccctgctgcagcaggcgctcgccgacctgggcgacgacgatccgcaggttcgcgaggcggccatcggtgccgtcgccgccctgctttcgccagcggaacgagtcgcgcggatcgctccgtcgctgagcgacccgctgcgcgcggtgcgcctgtcggccgcctacgcgctgctccccgccatcgccgaactcggcacgcacgccgcggcctggcgccgagccatcgacgaatacgaacaggcccagctggtccagcgcgaacgcgccgaggccaatctcaacctggccagcctgtaccaggccgacggccggccaggcctggtcgaggcgcgcctgcgggaggccctgcgccgcgatgcggatttcgctccggcgcgggtcgccctcggccagtggctggagaacgccggccgcgacagcgaagccatcgagctgttgcaggacggcatccgccgccagccacgctcaggcctgctgcgctacgccaagggactggcgctgatccgccagggcaagcgcgaagccgcacgccaggcgctcgccgaagcgctcgcggcggaaccggacaacccgcgccatgcctatgtcctcgccgtcgcctggcacgaggccggacaaccaggcaaagccatcgaggtcctgcgcgccctgctcgcgcggcggccggccgaacgcccggcgcgcctggctctggccggctacctgcggcaagccggcgatatcgccggggccgaaacggcgctcgccgaactgcgggcgatcaaccccgacgatccgctgttccgctag

SEQ ID NO: 345145 - DNA, 345 bp, Pseudomonas aeruginosa
gtgaacgtcgccgtgcgcgtgctttgcgccctggatgagatccccgacggtggcgcccggggcctgcaattggtcctggacggcgagcgcctgtcgctggtcgccgtgcgccggggcggcgaggcctgggtctatcgcaaccgctgtccgcatttctccgtgccgctggacttccgtcccggcgagttctgcacctatcgcggcgaggtcctgatgtgcgcgcaccacagcgcgctgttccgcttcgaggatggccagtgcatcgacggcccctgtgcgggagcggctctggagggcctgcgttgtcgggtcgaggcaggaatgctggtcctgctgcgtgcctga

SEQ ID NO: 345146 - DNA, 312 bp, Pseudomonas aeruginosa
atgaaccgctacttcgcggtcttcgccaccgaccacccgcggcttgacgccctgcgccggcgggttcgcccggcgcaccgtgcgcacctgcgcaacccgtcgccgcaccgggtggtggtgcgcctgggtgggccgacgctggacgactgcgacgggcggatgaacggtaccctgctggtgatagaggctgcctcgctggacgaggtggaggccttcctcgccgacgacccctatgtccgcgccggcctgttcgagcgggtcgagatccgtccctggagctggagcctgggcgcgccggaagcgctgccgtga

SEQ ID NO: 345147 - DNA, 891 bp, Pseudomonas aeruginosa
atgacggcgaggccggacgcggccgggcgcgcgaacgccgccgaagaaaggatcaccgcccaggtcctcgccagtttcgccgccgcgccggacccacggctgcgtcgcctgctggaaaggctggtggagcacctgcacgccttcgtccgcgaggtggagctgagcgaggaggagtggttcgccgggatacgtttcctcaccgagaccgggcaaacctgcgatggcctggtgcgtcaggagttcatcctgttgtccgatgtgctcggcctgtcgatgctggtcgatgcgctcgcccatcgcggcagcgccgggaccaccgacagcaccgtgttcgggcctttctacatcgccgggatgccgcaacgtgactacggcgagagcatggccctcaccccgggtgtcccggcgctggtgatggggagggtgctggacgaccagggacggcctgtcgtcgacgcctgcctggacgtctggcagagcgcggagaacggttgctattccgggcaggatgcgacgcaaccgcacggcaacctgcgtggccgctatcgctcggacggcgaggggcgctacgcgatccgcagcatcgtcccgaccagctacccgatccccagcgacggcccggtcggccgtctgctccaggccagcggccgtcatccgtggcggccggcgcacctgcatttcatgatcgaggcggcgcggcatcggcgcctggtgacgcacctgttcaagcatgacgatccctacctggcgtcggacgcggtgttcggcgtgaaggactcgctgcgggtggaatacctggcctgcacggccgagcacccgctggcgcgggagttcggcatcgacacggcgttccgcctggtgcgctatgacttcgtcctggagccggcatga

SEQ ID NO: 345148 - DNA, 336 bp, Pseudomonas aeruginosa
atggccagaccgcgcgtctccgaactcttcgaacaggaacccccgcactggggcggtcgcggcgatccctacttctggcgggaaatggccgagcaactggcggatgcgccctggccggcctccaccgaggcattgcaacgcctgctcggcgaaaccttcgaacgcctcagcggccatccgctggactacgacacctggatctacctcgcccgccacgcccacggcggcatgtccagcggcatggtcagcccggaattctggcgcgacaccgccatcccggagctgctcgaacgctatcggcggcggcgctcatggccgaggtggttgcgccggtag

SEQ ID NO: 345149 - DNA, 942 bp, Pseudomonas aeruginosa
atgaaccgcgaagccctcgatatccttctccagcacctgctcgccgcgctgtccccggcgcctgcggaaacccgccgcctgttccacggccgcggccgttgctggccaggcctggagcaactgaccgtggactggctgcagggtgtcctgctggtcaccctgttcaaggaaccaccggccgaggagctcgacgccctgcgccgcacgctcgcggcgctggccgccgccccggcctgggcctcgagccagggccggcgcctggtcctgcagcaccgctaccgccccgacagcgcttgcgagtggctgctcggcgagcctctggaaacctgggacatcgtcgagaacggcctgcgcttccgcctcgacctgggacgcaaccagaacaccgggctgttcctcgacatgcgcctgggccgccgctgggtgcaggagcaggccgccggccgccgcgtgctcaacctgttcgcctacacctgcggcttctcggtggcggccgttgccggcggcgccagccaggtggtcaacctggacatggcccgcggcccgctcagccgcggccgcgacaatcaccgcctgaacggccacgacctcggccgggtgagtttcctcggtcacgaactgttcaagtcctggggcaagctgcgcaagctcggcccgtacgatctggtgatcgtcgatccgccgagcttccagaaaggcagcttcgtcctcacccaggactaccgcaggatcctccgccgcctgccggaactgctggtgcccggcggcaccctgctggcctgtatcaacgacccggccatcggccccgacttcctcctcgaggaaaccgcccgcgaggcgccgtcgctgcacttcgtcgaacgcctggagaatccgccggaatttcccgatgtcgaccccgcggcgggcctcaaggcgctgctattccgcaacgcaggctga

SEQ ID NO: 345150 - DNA, 795 bp, Pseudomonas aeruginosa
atggacatgcccgatggattcatccccctgccgccccgcgtcgaaccgcaggcggtctttcgccccctgctcgacgacctgcgccggaccctggcccgacctccgttcgagcgggccttgcacagcgtctacctgtacggcagcgtcgcccgcggcgaggccatcgcggggcgctccgacctcgacctgcccctggtcctgcgcgacccgcccagctccgaactggccgcgcaactggaaaccgcgcgcctgacactgcaggcgcgccacccagaagtcagcaagatcgatttcgacatcggccacctggccgaggcccgcgatccggccaaccgccacagctggggctactggctcaagcatcgctgtcgctgcctgtggggcgaggacctggcggccggactggcgccttcgcgtccctcgaaggccatcgccctggccctcaacggcgactatgcgcaagtgctggaggactacgcgggacgcctggacgcctcgcgcccggccgaggagagccgacgcctgcaacgggaagcggcgaagaagctgatccgttccagcgacgttctccgcggggaaacggaaaccgcctggccggaaaccctggagcactacctggcgctgttccacgcgcgccaccccgaacaggcgccggcgctggaatatttcaaggctgtgctggacggccaggccgccgacccggcggagttcgccgagcgcctgcgcgcgttcggcgcctggatgcaggatcaggagcggacgccgcctccggccggtagaacagctcccggataa

SEQ ID NO: 345151 - DNA, 840 bp, Pseudomonas aeruginosa
atgcgcctagccgccccgttcctcatgtccctccagcaatccgccacgacgaccatcctcgccgccctctgcatcgccctgtcggcactggccggcagcccaccggcggcagccgcggaactgcgggtaatcacctcgggcggtttcagcgccgcctaccggcaactggcgccgcgcttcagcgagaagaccggcgatacgctgcacagcgcatacggcccatcgatgggccacacaccccaggccattccgcaacgcctggaagccggggaaaaggccgatgcgctgatcatggtcggctacgccctcgacgaactgatccgccagggcaaggtgcgcgccgactcgcgggtcgagctggccgactcgcgcatcggcctggtggtgcgcagcggcgcggcgcgaccaccgatcggcaacgtcgcgcaattgcgccaggcgctcctcgccgcccgctcggtggcctactccgacagtgccagcggccgctacgtgcaggagcggttgttcaagcgcctgggtatcgaacggcagatgcgtgccaaggcaaggatgattccgcggatcccggtcgccgaagtggtcgccgacgggcaatacgaactgggtctgcaacaggtcgccgaactgctgccggtgccgggcgtcgatttcgtcggccgcctgcccgaggcggtgcagtcggtgacccgcttcgccgccggcattccggtgaacgccgagcatccacggcaagcccgtgccctgctgcgctatctggcctcgcccgaggcgcaggcggtggttcgcgccagtggcctggactccctcgcgcaatcggcgccggcgggtgaccgctga

SEQ ID NO: 345152 - DNA, 933 bp, Pseudomonas aeruginosa
atgaatcagccacatgaatggccacccctcagccgcctcgatctgaacctgttccgggtcttcgaagtggtctatcgcgagcgcaacctgacccgcgcggcagcgctcctgcatctcagccagtcggccgtcagccacgccctggcgcgcctgcgcgaacagctcggcgacccactgttcgtccgccagggccgcggcgtggcgccgacgccgctggccgagcgcctggcgccgggcatccgcgacgccctcgccggcctgcagcgcagcgtcgctcgctgccagtcgttcgacccgcggcacgacgcccgcaccttcctcctgaacatgccggagcagttggaaccgctggtgctgccggacttcctcggccacctgcggcaggtcgcgccacaggtcgaggtgcgctgcagcagcctgcactgggcggaactgaagacggaactggaggccggccgcatcgacgccgccgtcgaggtcgcccgcccgaccgatgccgcgctgcgccgccagccgctgctggaggaccacctgtgggtgatggccggcccggagttcgccggcgagctgagcgcggaacgctacctggcggccgcgcacgtggcggtcacttcgcgacggcgcgggatctgcatcgaggacctcgccctcggccagctcggcctcacccgcaaagtgcgccagcgctgccagcactacctgtcggcggcgctgctggtcgcccagggcggctacctgctgaccctcacccggcgctacgccgaactgctcaaccgcggcctgggcaatcgcctgttgccgatgccgctggccttgccagcggtggcgctgaacctctactggtcgcgccaggccgacgccgagcccggtggccgctggctgcgcggcgaactgatggaactggccgcccgcgccgcgcgagcggctgactag

SEQ ID NO: 345153 - DNA, 342 bp, Pseudomonas aeruginosa
atgcgacgcccgatgaccatgattgcctgcgcctgcctgttgctcggcggctgctccgaccccgacgagcgaagcgccaacccattgctgggcaaggacgccgagtgcctcgagctgttcgcccgcagcaacgcgctgtactgcgctatccgcgaggacgagcgcgagtcccaggagaacgggtcgccgcgccggcattccgactacgaggtggcggacgccgcctatctgctcaaggccaccggcgaacgctgcgcgatcgatacgacctacgtcatggaatgttcggcgcaggccgggcaatggctgagggcggcgcgcgacaaggcggcgaagccctag

SEQ ID NO: 345154 - DNA, 633 bp, Pseudomonas aeruginosa
atgacaggccgcatcatcgtagccgacgaccacccgttgtttcgcgagggcatgctgcgcaccctccagcgcctgctgcccgacgccagtctcgaggaggcgggcgatctcgccggggtcgtgcacctggccgaacggggcgaggagccggactcgctgatcctcgacctgcgctttcccggcctgacccgcatcgacctgctcgccgacctgcgccggcggtttccgcgcaccgccctgatcgtcgtctccatggtcgacgacccgcaactcatcgccgaggtgatggacgccggcgtcgacggcttcctcggcaagagcattgcccccgaggaactcggcgaggcgatcctcgccatccgcgccggcgaggtgctggtgcgctacgaaccgtccggcctgctgccgctggagtcgtcggcgttgctggacgggctcaccgagcgccagctcgacgtcctccgcctgctggcccagggcaagagcaacaaggagatcggccgcgccttggacatctcccactacaccgtgcggatccatgtctcgtcgctgctcaaggcgctcgacgtgccgtcgcgcaccgccgcggcggtgaagtaccgggcggcgctgggcgatggggaagggaagtag

SEQ ID NO: 345155 - DNA, 195 bp, Pseudomonas aeruginosa
atgaagcccatggacagccgcgaataccggatcgacacaccccgcgggcagctcttcgccaaacgctggacgcccgccgcggccggcgccgcagcgccgagcgtactgctgcacgaatcgctgggctgcgtggcgttgtggcggaacttccccgagcgcctggcggccgccagcggacatccggtggtggcctaa

SEQ ID NO: 345156 - DNA, 753 bp, Pseudomonas aeruginosa
atgaccacccacttcaaggatcatttctccaccggctcggcgaactacgcggcacaccggccgagctacccgccgcgtctggtggaggaactggccgcgctcagccctggccgcggcctggccctggattgcggctgcggcaccggtcaactctcggtgctgctggccgagcgcttcgagcgggtggtcgccaccgacgccagcgccgcgcagatcgacaaggcgcaggcccacccgcgggtcgactaccgcgtcgcgttggccgaggacagcggcctggcggcggccagcgtggacctggtgaccgtcgcccaggccgcccactggctggacctgccgcgtttctaccaggaggcccggcgagtggcccgcgcggacgcgatcctggccctggtcacctatggcgtgctgcatgtcgacgggcccatggagccgttgctccagcacttctaccaccaggtcgtcggtccctactggccggccgagcgccgccacgtggaggaaggctatcgtaacctgccgttccccttcgaggagcgacgcctgccggctctggccatcgaggtggagtggagcgtggacgacctgctcggctacatcggcacctggtcggcggtgaaggaagcgggcaaggccctgggccaggacccggttgtcgcgttcgccgcgcaactgcgcgaggcctggggcgacccgtggctccgccggcgggtccgctggccgctgacggtgcgcgccggcatgctccgctga

SEQ ID NO: 345157 - DNA, 627 bp, Pseudomonas aeruginosa
atggcttcgaagtccctcacccaactgctggaactgaccctcgccaccgcccaggccggcctgacctattcgcgcgaccccttcgacatcgagcgtttccacgcgctgcgcggcgccgtcgcggcattcgtcgccgagcgcgagggggtggcggaggagcgggtgcagggctggatcgaactggacagccactacccgacgccgaagctcgatgtgcgcgcgctgatcctcgacgggcagcgccgggtactgttggtgcgggaggcttccgatggatgctggacgctgcccggcggctggtgcgacatcaatgagtcgccgggaacggcggtggtccgcgaagtgtacgaggaaaccgggctgcgggtgcgcgcgaggcagttgctggcgctctgggacaagcagcgacacccgcatccgccgcagttgccgcatgcgctgaaggcgttcttcctctgcgtgatcgtcggcggcgaactgcgccagcgcaccgacgagacgctggcggcgggctatcacgaggtcgcggcgttgccgccgctgtcgcggcaccgggtgctggagagccagatcaggagcttgctggcgcgggtcgaggcgggcgcgcaagagacgctgttcgactag

SEQ ID NO: 345158 - DNA, 147 bp, Pseudomonas aeruginosa
gtgcgggtgcgcggcgcgctggtcagcaacgacaacgaggccctgctctgcaccgcgcgcctgggcctggggatcttcgccgccggcggatggctgatgagccgcgacctcgacgccggcccgccgtggcagcgccgccaggactga

SEQ ID NO: 345159 - DNA, 975 bp, Pseudomonas aeruginosa
atgcagcgcctgatcggcatgacctacctgaactccgccgcgggccagcgccgcctgcgccagaacggcatcgtcctgcgcctcgggcgactggccgccgagcctcgcctggcggccttgccgcaccgccagggccgctgcctcgagcggcgaagcctggaaaacctgctgctctggctgcaacggcacttcctctgcgtgcctctggagcatctgctggagcggccttcggcaaacgatctgcgcatagcgttgagcctcgacggcagcacgccggagctggtcgagcaggtctatcccctgctggagcgctacgagatgcccgccagcgtcttcctcggcggcgatccgcgcggctggcgcgaagccgtaggcgacacgctgtggcaggccgacacggtcgccgccgcgccgctgctggaactgttgcagcgttattgcggcccggcgctcgcgccggtgctcgagcggacgcgcgacgatgtccggcgcagccgccacctcgcggccctgctgggcaagctcgaacgcctcgacccggcctcccggcaggcattgcgcgcggcctgtccgcccgccgacgcgcaggccgctcccgactgggggcaactccgccgcctggagaactccggcctggtccgcttcggcctctacggccagggcccgcaagcgccggacagcttctgcgcggaaatggaaacccttggccacgcccatcgcctgctccagcagcagtgcaacgctcctctgccggtgtactgccgggcccgccccatgcccggcgcgacccaggccagcccacagttgcgtgcgagcctcgggcggctcggctatcgcttcgccttcggcgcccgccgcgggctggtcgactcccgcggcgatccgctggacctgccgcggatcgaggtcgacgccgccatcgccgcccgccccggccggctggcctggcagctgtatcgcggagtccgtgcatga

SEQ ID NO: 345160 - DNA, 435 bp, Pseudomonas aeruginosa
atgacggcaggcggtattccattcacgggcgacggcgcgcggttgtcccggggcaaggcgctattgtgcgggctggtgttgctgctgggcagctcccagacgctggcgcggcagttgccaagcgatctgctggtgggcttcgtggccagcgcgcaatacccggtcatcaccctgaagaagcccaggcagagcctgctgcgcagcgtgctcaccctgggcctgggaaagaagaccgtcagctatcgggtggcgccttcggtacgcatccgcacggcgcagaacctgttcatcgtctatggtcggatgccccagctcaggggcagcttcgtcggcctgaagagcgacgccaacggccaggtcaagcagatctgggaactgaccgaaaaggaagcccgcgactacgtgcggcggccggacgcgcgcttcccccaatag

SEQ ID NO: 345161 - DNA, 765 bp, Pseudomonas aeruginosa
gtgagtccgagcgcttccctgcaactcttctgcctgccttattcgggtgccagcgccgttctctacaaccgttggcagagccggctgccggcctgggtccgcctgcagccgctggagctgccggggcgcggcctgcgcttcgccgaagccttgcacaacgacgccgccagcctggtcgcgcaattggccggcgagctgccggggctgttcgaaaacgccactccctacgctttcttcggccacagcctgggcggcctgctggccttcgagctggcccatgccatgcgccggcgaggcctggaagaaccgctggcgctgttcctttccggcgtcagcgcgcccgccgagaacgatctcagcggctaccggcgagccagggaagacgccgagctggtcgccgcgctgcgtgactaccggggcaccccggaggcggtcttcaacgatccgtcgctgatgcagatgctgctgccggtggtgcgcgccgacttcctcgtcaccggcagctaccgctaccagctccgcgcgccactggcgtcggcgctgcacgtgttcggcggacgcgaggaccgcctgcgcagtgccgagctgctcggctggctgcgcgaagcgggtggcgagttcagcctcgacctgctcgacggccagcactttttcatccgcgagcaggaagcgcagttactgcgccacctgcgtcgctacgccgggcagcacctgctgcgctggcgccaggagcgggtgcgcgaaagcctgcgcgccgccagttga

SEQ ID NO: 345162 - DNA, 264 bp, Pseudomonas aeruginosa
atgactgccaggatctaccgggaagtcgtcaacccgggaaaactcgacgaaacacagaggggaaacctcgcaagcgaactctacgcgattcacgccaggatctttcatggcgtccagtatgagtccttcgctcgcgaggtcatccactccaccgcccgcctcacccgcatcgccatctaccgcaaccgccagcagaaatcgtcggctactgcgccgtacatttccacgactcggaagtcttccagtacagcaaggcctgcgtga

SEQ ID NO: 345163 - DNA, 729 bp, Pseudomonas aeruginosa
atgtcccagaatatctatgattgcgatgatttcttcgctggctacagtcagttgccgcgctcgcgcgaaggccttgccggtgcgcccgaatggccggcgctgcgggccatgctgccggagttgacgggaaagcgggtggtggacctgggctgtggcttcggctggttctgtcgctgggcccgcgagcagggcgccgccgaggtgctcggcatcgacgtttcgcagaacatgctcggcaaggcgcgggccatgaccgacgatccggcgatccattaccttcgccaggacctggagaccctggagcttccggcggcggcgttcgatttcgcctacagctcgctggcgctgcactacatcgaggacctgcgccgtctgctgggcaccctgcatgccgcgctgcgaccgggcggcgggctggtgttttccatcgagcacccgatctacatggcgcccagccagccgggctggcgacaggatggtgaaggccggcggacctggccgctggatggctactcgatcgaaggaccgcgcagcaccgactggctggccaggggggtgatcaagcatcaccgcaccctgggaacgctgctcaatctgctgctcgaactcggtttccggctcacccgggtagaggagtggagccctagcgacgcgcaactggccgcgcgccccgaactggcggaggagcgcgagcggccgatgctgttgctggtgtccgcgctgcgttga

SEQ ID NO: 345164 - DNA, 513 bp, Pseudomonas aeruginosa
atgcacggccatacccagctagccccgcactatttcttccgacagcagcggttgttgcgcgccctgctgatcgacgaccaggcctggttcgtcctcgacgacttctcgcgcctgctcgacctgccctgccccgaacagctgcttacccgactggatgacgatcaggcacgccaggaagcgctgcataccgagcgtggcgaggacgaggcacagtggctgatcagcgagtccggcgcctacgcggcgctgatctactaccagcaaggcgatggcggagacctgcgccgctggctcagcggcgaggtggttccggaattgcgcagcgccgccgacgacagcgacatgccgcgccacgtcaagttacgctgggagcgccaggtggtacacatgctcgactggcagggcaagctctgggtgaatttcagcgagatgcccgacctgctccagcgccgggacggaccgacgacgccgctcgactggcgacgctggctgcgcaagttgcgcccgctctag

SEQ ID NO: 345165 - DNA, 984 bp, Pseudomonas aeruginosa
atgagcgtgactgatcccgaggcgctgctcctgctgccgcgcctgtccatccagaacgccaatgccatttccagcccgttgacctggggcttcccctcgcccggcgccttcaccggcttcgcccacgcgttgcagcgccggatcggtgcgaccctggatatcgaactggatagcgtcggcatcgtctgccaccgtttcgaagcgcaggtctcgcaaccagccggcaagcgcacccaggtcttcaacctgacccgcaatccgctgaatcgcgacggctccagcgccgccatcgtcgaagaaggccgcgctcacctggaggtcagcctgctgctgggcgtccgcggcgatggcctggacgaccaccccgcgcaggaaatcgcccggcaggtcgaggagcaggccaacgccatgcgcctcgccggtggcagcatcctgccccggtgcggcgggtgcttccctgcgcctagcgccgaactgctgatgctaggaggcagcgacgagcagcgccgcaaggaccagcgccggttgacccgccgcctgctgcccggcttcgccctggtgagtcgcgaggcggtgctgcagcgacatctggaagatttgcgcagcacgacccccgaagccaccacactcgacgccttgctcgacctttcccgcctcaacttcgagccgcctgccactgcgcctgaagaggcggcgtcgccgctcgatgcactctggcaagtgcgggacaagcctggctggctggtgccgattccggccggctacaacgcgctctctccgctatacgctcccggcgaggtgcgcaacgcccgcgaccgggaaacaccgctgcgcttcgtcgagaacctcttcagcctgggccagtggatcagcccccatcgcgtcaccgcgctgcaagacctgctctggtaccaccaggtcgagcccgacgaagggctctaccgctggagcacgccgcacttcgccaaacacgccatcgcataa

SEQ ID NO: 345166 - DNA, 168 bp, Pseudomonas aeruginosa
atgtcgaaaaccaagcactggtccgggcaggcctgccccaagaccgcgacctatggccagcatgacgacaaggacgacagctacgccggcgcgaagcatgaccgccaggtggacaagggcgagaccttcccgccgtcgctgaacaaccatcacttccaggagaagtga

SEQ ID NO: 345167 - DNA, 1581 bp, Pseudomonas aeruginosa
atgcagatcggcaagcagcggcgggaacgtctctttcatttcggtatcgtgttcgctgcgctcgcgatcgtgccgctgctcatggcgccgctggtgtttcagcaggccaggatgcgtgccgacggcgaggccgcggtgacttccgtcgccgtcctccgtcagttggataccttgctcggagtggtgtccggcagcctggacaggagccagggcgcgctgggcaagccctgtgcggaggtgctggggcgactgacgcggatgaccatgctgagcccgtatttccgttcgctggtcctggtggagcgcgggaacgtctactgctcgtcgttgcagggcgagctgaaggacctgccattgccgatggccttcaaggccttgggcagcctggcgcccggccagcgcatcacgcccagcaacgcgacgccgcaggtaccggaacgggcctcggtgatcatgtcgcgcggcgacgcaaacggatccggcgtgctggcgataatcgacggccagtatctgctggatatccagcaggcggcttcctacgacgggcggttccaggtgcagatggtgctgcgcgagtcgcagcggcagcttcccggcggcacgcctgccacacaggatggtggtggcgccatcgcggcctcggcaaggttcccggtcgaggttcgggtggcggtcgctccggcgctggccagcgcctatcgtgccgatgcatggcggcactacgcgcccttcatcgttctcgccgcgatgctggcggggtacctggcgcatctgttctgccgtcgccgcctgtcgctggttggcgacatgtaccgggccatgcgggcccgggagttccatatggtctatcagcccatcatccggctcgatacgggggagtgccggggcgtcgaggcgctggtgcgctggcggcgtccggacaacagccaggtgcggccggacatcttcgttccgctggctgaagacaatggcatgatcggcgacctgacccgccacatcttcggcctagtcgctgccgacctggcgcaactgggcctgggagcgggcgatcacctcggcgtcaatgtcagcggttcgcacctggctggccagggattcgtcgacgacgtgcggcgcctgctcggcgccatcggcagcgacggcccgcaactggtcctggaggtcaccgagcgtgaggcgctaccgcgcgatgcgcaggcgcagcgcaatatccggcaactgcgcgagctgggcgtgcagtgggcactggacgatttcggcacggggcagagttcgttgtcctatctgcagcaactgcatgcggactttctcaaggtcgaccgttcgttcgtcagcggcgtcggcacggagtcggtgaatgccgtggtgctggaaaccatcatcgggctggcgcaacgcctggacctggacgtgaccgccgaaggcatcgagacccgggagcaggaacagtacctgtgcgggcatagcgtccagtgggggcagggctacctgttttctcctccgctgacggcggccgagctgggcgcctggcgcaatggccggcgcggcgtggcgcgcgcggcacaggtggtcgcggggtag

SEQ ID NO: 345168 - DNA, 174 bp, Pseudomonas aeruginosa
atggccgactcctttgccgccgacctcatggtcggcctggtacctgtgcaggaagcgagttccgaggccagcttcgtcatggggcttgagtacttctcaccaggtcgcgctactggtagccgtcgtgtgcccgatgtgcaaaaatccatcgatcgctggatggtcgagcagtag

SEQ ID NO: 345169 - DNA, 876 bp, Pseudomonas aeruginosa
atgcaggtcgtatccatcatttcaacgaaaggtggcgtgggcaagaccaccacggccgccaatctaggggggctcgctgcagatgcagggctgcgcgtgctgctgctggatctcgacgtgcagcccacgttgtcgtcctactacgagttgctccagcgcgcgcccggcggcatctatgagttgctggccttcaacgagcgcgacctcggccagctcgtgtcccgcacgatcatcacaggcctggatctggtgctgtccaacgaccaccggggcgagctgaacaccttgttgctgcatgcgccggacggacgcctgcgactacggcacctgctgccggcactggctcccctctacgacctggtgctgatcgacacccagggcgcgcgctcggtgacgctggagatggcagtgctcgcctccgatctcgcgctgtcacccgtgaccccggaaattctcgccgcccgagagctgcggcgcggcaccatgcagttgctggaggacatcgcgccgtaccggcacctgggcatcgagccgccgccgctgcatctgctcatcaaccgggtccacccggtgtcggcgaacgcccggctgatccagcaggccctgcgcgacctgttccaggaccacaccggcatccgcgtgctggccaccgacgtgccggccatcgaagcctatccgcgcgccgcgacgcgcggcctgccggtgcatcgggtcgagtaccgccagccaccgggcagagtcgcccccgccgcgctcgacaccatgcgcggcctcgctggcgaactgttcccgcaatggcagcaccgatttaccacggtgtccggccgcccgccatttcctcttgataccgggaggccccgtggcgaacgcacatga

SEQ ID NO: 345170 - DNA, 1233 bp, Pseudomonas aeruginosa
atgaggctggcgtatcgacgggtcaagcgcaatggcggatcggccggggttgatggtctgaccgtccaggagctcggagcttggctcaagatgcactggcccagcgtgaagcaggcgctgctggcggggacgtatatgccgcaagcggtgcgccgggtggacatccccaagccaagtggcggggtacgtagtctaggcgtgccaacggtggtggatcgtctgatccagcaggcgttacatcaagttctccagccgatctacgagccgaccttctcggccagtagcttcgggttccggccggggcgcagcgcgctcgacgcagtacggcaggcgcaacgccatgtccaagccggacggcgctgggtggttgatatcgatctggagaaattcttcgatcgggtcaaccacgacgtgctgatggcgcgggtggcgcgccaggtacaggacaggacgaccctcaagctgatccgtcgcttcctggaagcgggggtgatggcgggcggggtggaacagtcccgtacggaaggggcgccccaaggcggcccgctgtcgccgttgttgtcgaacgtactgctgacggatctggatcggaaactggagaagcggggcctggcgttctgtcgctacgctgacgattgcaacatttacgtcggcagcgagcgggcgggacaccgggtcatggcaggcatcaggacctatctcgagaaggtcttgaggctaaaggtgaacgcgtctaagagcgcggttgctcgaccgggaagccgtaagttcctgggatatcgggtagccgaacgccacgcaagcgtcagcctgtacgtcgccccggaaagtatcgggcggctcatggagcgcgtgcgtgacgtgatgcggcaagggcgcggtcagtccttggtgaaggttatccagaggctgaacccgctgctacgcggatgggcgaactacttccgcctaaccgtgcagcggcggcgcatgcaggatctggatggctgggtgcgtcgtcgtcttcgctgtctgctctggcggcagtggaaaactgggcgtacacgccaacgccgcatgattgcgctggggctggacccgcaacgggcctggaaatccagcggcaatggtcgcggcccatggtggaacgccggggcatctcaccttcaacaggcgttgcctaacgcctacttcacggccatggggctggtctcgatccgcgacaccgtggatcgcctccagcgtatcaactga

SEQ ID NO: 345171 - DNA, 300 bp, Pseudomonas aeruginosa
atggcactgcgattcaaaggcaccgatctgcggccggtgctggccgaggccgtcgccaaccaatgccgcgtcgtcctcgccaaggaccagggcgtgtacttcctcgccgagcgcggagagcgccgccccgatggccgcgtgaagctgctggcctacgccgtcggctgcaacccggataccgaccgttcgatgactggtgggaactggcacgcgccgagctgggcggcgacgacttcggcgagttcttcgacccgaaggaaggcgtcttcgcacgcatcctgcacggcacggacgatctga

SEQ ID NO: 345172 - DNA, 219 bp, Pseudomonas aeruginosa
atggtagccacctcggaagccacaagatcagtcctacccatcgtcgtcccgggccagctcacgttgcgaaccatccgcggcaagaacggcccgttcacggtcggtcgtttgaccacgcccatcggcgaatttgccgtgaaagacccggaattggagcagtatcccgaaggcaagtacgacggggagttcgtcatccgcgtgcgacgtgaagtcgcttaa

SEQ ID NO: 345173 - DNA, 1719 bp, Pseudomonas aeruginosa
atgactacgcaagaaattgcttgcgcgggtgcgccctcacgcgaatcggtcacatggcacagcatcgactgggctgcgtgtcaccgtgaagtgcgaaggctccaagcgcgtatcgtaaaggcgacacgggaaggaaaacatggcaagctgaaagccctgcaatggattctgacccactcgttcagcggcaaagcattggccgtcagacgagtcaccgagaaccaaggcaagaagacgccgggtgtggatggcatcacatggtccaccccggaagccaagtctgaagccatgttgtcactcaagcggtgcgggtatcgtccccaaccgctgaagcgtgtctatattcccaaagccaatgggaagatgcggccgctgggtatcccgaccatgaaggacagagcgatgcaggcgctatacctgcttgctcttgaacccgtggccgagaccactgcggataggcgctcatttgggttccgaccagaaaggtccacggcggatgctatcgaacagtgcttcaaatcactgtccatgaaggcgtctccgcaatgggttctggaaggcgacatcaaaggctgcttcgacaacatcagccatgactggctcatgggtcatgtaccgacagatcgcgagattctgaggaagtggctcaaggccggatacatggaagatcggcaactttttccaaccgaagccggtaccccgcaagggggcattatctcgccaaccctggcgaatctcgtcttagatggtcttgaagcgaagctgtttcagacgttcggcaaagaacgttttataaatggcaagcagatcaccatgaaagtcaactacgtgcggtatgcggacgacttcatcgtgacaggacgctcgaaagagctactggaacaagaggtcatgccgatagtcaaggaattcatgcgggaacgggggctcacgctctcaccggagaagaccaagattacgcacatagacgagggctttgattttctaggtcaaaacgtgcgcaagtacagcggcaagctgttgattaagccgtcgaaaacgaacgtgacaacctttctggaaaaagtgcgctccgtggtcaaaggaaacaaggcgctaaatcagatacatctgatcaagctacttaacccgatgatccaaggctgggcaaattatcaccagcacgtcgtctcaaaagcgacgttcgcgagtgtcgatcatcagatttggcatgtgttgtggcagtgggccgcccgtcggcatccgcataagggtagtgtctggatcaagcagcgctacttccattccgtaggctcccgtaactgggtgtttgcggcggcgacaggtgaaaagttccccgatgggaattcgatcctggcggtactgcggaaggcaacggatacgcccatccggcgacaccggctaatcaagttggaggctactccactcgacccgctgtgggaaacgtactttgaggagcgtatgagcctcaagatgcagaactcactgaggggcaggaagaagctcatcaacctctggttggatcaggatcgccgttgtccaatctgccagcaattgatcacgcaggaatcggggtggcatgtccaccacatcatccggcgggtcgatggcggaaaggacgggagtaccaacctcgtgatggtgcatccgaactgtcataaccagatccacgtcaatggtctcaaggtggtgaagccggttcgcgaaagcgagctttga

SEQ ID NO: 345174 - DNA, 423 bp, Pseudomonas aeruginosa
atgacgctcaatggcatcgacaaactaagccgtgacgaggcccgcagcttcgccacccaggaagtcgatccgcttgatgaagagcaagaggcacagccagcggcaacgccggccaagcccgtcaaagcatccaaacccgccaagcccgcacccgtgcaggcgtcggcggacccgctggtcgataccacgcctttcggggtggatgcgccgacgcccgccgcggttgctgccaccggcagtgccgaggatggcgatgccgcgctgttcggcagcctgtggccgctgggcgaatccgtgaaactggattcgaccatcgaccgccgcgcgttgcgtgcgcagatcgcccgcctgggtgaactgggctacgcgctggactttaagacgcaggagtggagccgccaggccgaactgcaacctgcgtga

SEQ ID NO: 345175 - DNA, 408 bp, Pseudomonas aeruginosa
atgggctggtatttctccccccaatcgcggtctgaactgatcgcggaactgatcgcaccgcaagagaccgagcgcgccagcgtcaaggtcatcgcccacgcgctgcgcggcaacgtcctctggtccgtcgcggaagtgacggccaaggtcgaaggtgtgcatcgtcatctggcgccgggccaatccctgcgctacatccgctgcgatctgctcgaacgcagcggcggccagtggggctacaagccgctggacgagtccatgcacccgtactactactcgtgcccgctgtcctatctggacctcgcaccggagcagtccgccgactggcgtgcaggcgttcgcgcctaccacgcgcggcggcgcacacccacggcacctgcggcatccaccgcagcgctgatggcctga

SEQ ID NO: 345176 - DNA, 372 bp, Pseudomonas aeruginosa
atggaaaagatcatcatcgaaaacctgaagaagcatgcgatcaatgccgacggcagcgcccgtgccggcttcatccacaccgcgcactgcaccatagctttctggaacctggaaaagggcgcggtgatcccctgccaccggcatgtgcacgaagcctgccccatcatcatcaagggccggctgaaactgcgggtcggcgacgtgacccatgtgctcggcgacggtcaatgcgcggtgatcgcctcgaatgtcgagcatgaagccctggcgctcgaagcctgcgagatactcgagatctactcgccggtgcgggaggactaccagcaactggactttcgcaaggtcgcctgggacgtggtcgccgaaacctga

SEQ ID NO: 345177 - DNA, 534 bp, Pseudomonas aeruginosa
atgaatatctatacgctgggtcccagcgggaccaactgtgaaaaagccgcccggcaatatatggccaagagtggctggaatggccagatcgaacttcgcgccaccctcgaagaagccctggatgatttgctcggttcacaagaaccgggaatcctgatgggctgtatcgtttatcccaggctgcatgaaatcgtatttcgccacctcgatcgcttgaaacttgtcgaccaccatctcatggatacctatgacatggtcttcgcgcgaaacggaaataccacggtaaaacgaatcggctcccatccagcgcccaccagtctgctggcaaagttaggggagcctgcaacttccgccgaacttgtcctgtgcacttcgaacagtgaggccgctcgccaatgtgccctgggaaatatagatggctgcatcaccaccatcgaggcggcgcagaataacgagctgcatatcgtggagaacttcggtccggtaccgatgggtttcagtatccacctgaaaaccgcgacgccggtagcctga

SEQ ID NO: 345178 - DNA, 696 bp, Pseudomonas aeruginosa
gtgagccatgaacttttcattgaaataagacagcagccaatcagcacttcgactttcgccgacctcctggatgcttatggtgtcggcgaagttctctgtcgaaatatcgtttcaagaaacacgcaacgacattatttcatagggcatgcctatacggtggaatgggagcgggtcaggaagaccggcgacatcacccgtgcgcaaccttccacctgggaacaggtgaaggacttcctcgtcccggacctgagttcggccagggacctggtctacgtcgccggagccggcgcgctgacgaccgacgccgcgctggcggggggcctgagttgcacctatttcgccaagctgggtttcgaaggcatcgtcctcggtggctccgtccgcgatgcggcggaagtaagggccctgacgacccccgtcctggccagcaacttcaccccggtcgatacccagggcgcctaccgcgtcaggagcacgggggaaagctgcatgatcgaaggcagccgcgtgacgagcggcgacgtggtggtctcggacgacaacggcaccgtggtgttccctgccccgctactcggcgaactctacgaaaaggccctcgaaatcgagcggatcgagggagaaatcctcgccaccctgcgtaacgggcatgaccacaggagcctggccagcctcgtggaggaacgcaaccgcatctga

SEQ ID NO: 345179 - DNA, 1404 bp, Pseudomonas aeruginosa
atgcccctttcgaaactctcggcctcctccctggcgctgtgcctgggcctgctcggcgcctgttcgctggcgccccgctaccagcgcccggaggcgccgatcccgacgacctatccggccgtcccggcgagccagcaggctggcgaccgggccaggctggacgactggcaacaacagttcaccgacccggtgctgcgccagatgatcggccaggccctggagcacaaccgcaacctgcgcgtcgccgccctgcgcatcgaggaagcccgcgcgctatatggcgtacaggcctcggagcgcttgccgacgctggaggccagcggtcgctacgagcgcgagcgcatgcgcggcgaaacccgcgaggccggcgaggtcgaacaacgctatcgggtcgcagccggcatcagcgccttcgagctggacttcttcggccgggtgaaaaacctcggcgacgccgccctggccgactacctggccagcgaggaggcccagcgcagcgcgcggatcgccctgatcgccgaggtcgccggcggctacgtgcaggaacgggcgctgtacgcacagcaacggctggcggaacgcaccctgcacgcgcgggaaaacggcctggcgctggtgcgcaagcgctacgccgccgggatgagcacgcgcatcgacctgcgcagcgaggaaatgctggtggaaagcgcccgcgccacccacgccgcgctggttcgcgaacgcagccaggcggtcagcggtctgcagctgctgctcggcgacttcaccggcgactggcaggatagccagctggacctggaacacctccagctgcagccactgcccgccggactgccctcggagctgctcgcgcggcgtccggacatccgccaggccgaacaacaactgcgcgcggccaacgccaacatcggcgcggcgcgcgcggcgttcttcccgagcctgcgcctgagcaccgacctgggctcggccagttcaggcctgcacggcctgttcaggggcggcagccgggtctggaccttcagcccgcagatgaccctgccgatcttcgacggcggacgcaaccgcgccaatctcgacctcgccgaagtgcgcaaggacatcgccgtcaaccgctacgaggaaagcatccaggtcgccttccgcgaggtcgccgacgcgctcagcgccggcgaccagctggagctccagctgcgcgcgcagcgcgctgtccgcgacgccgaccgtgaacgcctgcaactggtacgcaagcgctatgccaagggtgtcgccaattacctggaaatgctcgacgcccagcgcagcctgttcgactcggaacagcaactgatccacctgcggggcctgcgcctgagcaatggcgtcgccctctatcgcgccctcggcggcggctggtcgcaaggctga

SEQ ID NO: 345180 - DNA, 327 bp, Pseudomonas aeruginosa
atgtctaccctcgcccctgttttcccggccaagcacccacgcggcgaagagcgccaggtgatccggccgaacgtctgggaaagctcttgcgcagacggcgaaaccctgtcgatcttccacgtcgagggcatggccgatcccgagttgctgtgccgggtgctcaatctgttcgccgtgcagtccttcaccccggagcgagtacgggctgaccgcgaggagcacaagatccgcctgaccctctcctaccaggggctgagccagcaccgcgccagcgtgatcgcggaaaagctgcgctcgctggtcaccgtgctcggcgtacgcctgtag

SEQ ID NO: 345181 - DNA, 810 bp, Pseudomonas aeruginosa
atgactatcgtcaaaggtatttcccggtttttcctcgctttcggcctcagccttgccagtggattctcccaggccggcccggtggtcacggtggaagcggtcagctccgtgaacgaacaggtctcctcgcggctactcaaatccgtgcgctaccacgtcgacatggcggcacgcgctgtcgccgaagagcaattgaacccgtccaacgcggcgaaaaaggaactggtctcgaaatggcgctccagtaccaccgcgcgcttcgaatacagctacgtccaggaaggcgtcgaacatctgcgcgtctataacgcgatgtccgggcaagacctgcgcgacctgctcaaggtgccgcaggaccatccgctctattcggggttcgacgaacgcttcgccgcaagaggcgccaatgccgagcgctacgtgaagaacatcgaggttcccgattcacgcttcagcgcatcgctggacattcgccaggccgacgccgagctgaaagcgctgcgcaacctggagagcgatatccgcagtggtctcgtccccagcggtgggcgcctgaccggtttcatttcccaggctccttgcgaatcgtgcaagcccatgctggaaaacgtactgccggaaaccggctacgtcagcgaggcccacgtttcctacctgccgaacgccagggaagcggcctcggatctggagcggcagatcgccaacaagttctatggagtcaagaagaacctggtgagcaaggatgttctggaaaaagccgcggcggccaacgcctcggcggaaggtggtgcgctggaagcctgtctatga

SEQ ID NO: 345182 - DNA, 1113 bp, Pseudomonas aeruginosa
atgaggcacttcagttcgctgtggctggcgacaaccctggcggccatctcaggctacgcccaggcagattacttttccgatacgctgaccaaggcactccactaccacgcagtcaagaccgacaactcgatcgacttcgacgaacaaacgctgaagaacaccttcctggtcgagcctgaatcgatctactccgacaccgtatccaacccgcccattctcaacagcatcggctgggcgagcgctgtcggcgatttcaatcgcgaccagggcacggcattcgatcccgaggagacgctcggcatcttccttcgcgagaccggactgaccaaggcgcgcccgcatagcgacatcgccgtcgaccgggtgccggagggctatgtcagcttcgaacgcgacgacccgctgatcctcgccaatgtgctcaaggccggggtggatgccgacctctactatcatgcctatgaactcttcggctggcgctacggcaccattgccgccaagttcgctcttgccgcgcaatacctgcgtgactcgatgaacgccattccgctagcgcagcaccgggccaacggcatagacgccggggtcctgacccgcttcaaggcggcccagagctatacgcagctcagtcacggcgaccagaactatctgatgggcatcctcgactaccagttgaggagcccggactatcgcgacggccagggcggcttccatttgcctccacagtaccgactggctcgcctggccgcagcctaccgctatcgcaacggtttcatttccagcaccccgatctgtaccgcggacggccgctacagcggcaccgacggcgccgagccatgcctcaacgacatgaccgacaaggcgctgttcgactggtacaaggaaaagtaccgcgaccagatgaagcctcgctcccccgaggagccccagagcagtttcctcgccaagctgctggaggtgatcgtaccgatcgccacgctgttcgatggcctggctttgttcgaatccttcgaagccgccgaggctggcgagctgggtgccgaaggcgcgttcagcgaagaagaggcggaaggcatttccgctgcatccctaagcaagatctgtcgtatctga

SEQ ID NO: 345183 - DNA, 243 bp, Pseudomonas aeruginosa
atgatccgctgtcgcaactgcgctgaatacccggccaccgaagagcatatctgtatggtctgcaagcgtcgatccgacatcgatccatacaaggcactgatcgccatggccctgctggtgtattgcggcgtcagcctggcggcctatctgaaaccccgactgccgcccgctcccgccgcccagatcgaacgctaccaggagagcagcgcagggcggacggccatcggccaggggggcggctga

SEQ ID NO: 345184 - DNA, 255 bp, Pseudomonas aeruginosa
atgtcgggatacagcgcgagaaccgagcgtcgccaacgcctcgatggccacctacccttcgccgtgatggataccctggcccaggccctgcgccgcggctatcgactggccaggcaccgccagcagacccggcgtgctctgctggaactggaagcggcggaacttaaggacatcggcctgagcgccgagcaggcccgcgaggaagcctcgcgaccgttctggcaggctggcagcccccgcgggaggaacgcatga

SEQ ID NO: 345185 - DNA, 675 bp, Pseudomonas aeruginosa
atgagccgtttcgtcgggaaggacgcggacagctacgagtcgcgcatcggttgcctgctaccaggctacgagctgttgcacctgctcagtcgcgcccagttgctcgcccgcctgccggaacgggcgcgcctgctcagcgtcggctgcggcgccggtggcgaactggcggaactggccggacagcgcccgggctggcggttcgtcgccctggacctgtcggcggacatgctggcgctggcccggcaacgcttcgccatgctcggcctgctcgagcggatcgacctgcactgtggcgaagtggccggcctgcccgcgtcgcctccctacgacgcggcgctgctcctgctggtgctgcacttcatccggggtgacgaggccaagcttcgcttcctcgagacgatcgccgcgcgcctggcgccggcggcgccgttgctgctggcgaacctgatggagccgcgggacgccttcgagcggccggtgcaggccgaggcctgccgcctgctcgggctgtcggccgaagaggccggcggcatgctgcaacgcttgcgcgacgacttcgatccgctctccgagcagcgtcttggcgaattgctcacggagagcggcttcgtcctgcccggacgctacttccaggctgtcggctaccaggcctggatcgcctttcgcgccgcctga

SEQ ID NO: 345186 - DNA, 1659 bp, Pseudomonas aeruginosa
atggccgacccccttccccggcgcaatggcgggcagatcctggtggaagcgctgcggcgcaacgccgtcgatacggtctattgcatccccggtgaaagctacctgccggtgctcgacgcgctgcacgacgccgccggcatccgtaccgtcgtcacccgtcacgaaggcgccgcctcgaacatggccgacgcctacggcaagctgagcggacgaccgggcatctgcttcgtcacccgcggccccggcgccacccacgcggccaatggcgtgcacaccgcgaagcaggactcgacgccgatgatcctgttcatcggccaggtggaaagcgccttcaagggccgcgaggcgttccaggaagtcgactacgtgcagatgttctccggcctggccaaatgggtcgtggaaatagaccgcatcgaccggataccggaactcgtcgcccgcgccttcggtgtcgccacctcgggccggccgggcccggtggtggtcgcgctgcccgaggagatcctgttcggttccgcgcaggtcgcggacgcaccggcgccacgcttgctgcctggccagcctgcggccgcggcgatgggcgaactgcaagagcgtctggaccgcgcgcagcgtccgctgctggtgctcggcggcagcggctgggacgagaccgcccgcaagcgcctggcggccttcgttcatgccaacggcctgccggtggccgcctcgttccgccgccaggacctgttcgacaaccgcgatccgcactatgtcggacaactgggcttcggcgccgcgccaggtctgctcgagcgtgttcgacaggccgacctgctgctggtgctcggttcgcgcctgagcgaaacgccgagcgccggctacagcctggtcggttgccccgagccggcgcaggcgctggtccacgtccatgccgacggcgcggagctcaaccgcgtctacctggcgcacctgccgatccaggccactcccgccgccttcgccgaggccctcgccgccctgccgccacggccctcgccgccctggcaggcctggcgcgaagccgcccgcgccgactacctggcgtactcgacccccgtcgccagcgacccggcgttgcagggcgtcgacctggcggcggtggtcgcgcatctggatgaaaccttgccggacgatgcggtgatcgccaacggcgccggcaactacgcggtctgggtgcaccgcttctaccgctatcgccaggcccgcacgcagttggcgccgaccaatggcgccatgggctacggcctgcccgcggcgatcgccgccagcctgcgcgagccgcggcgcgacgtggtgtgcttcgccggcgacggctgcttcatgatgtacccgcaggaactggcgaccgccgcgcagttcggcgcgacaccggtggtgatcgtggtcaacaacggcatgctcgggaccatccgcatgcaccaggagcgcgaatacccaggacgcgtttccgccaccaccctggtcaatcccgacttcgtcgccctggcgcgggcgttcggcgcctacgccgagcgggtggaacgcagcgccgacttccccgaggcattccgccgcgcccgcgcaagcgggcgcccggcgctgctcgaactgctcaccgatccgcgccaggtcacgccacaggcacgcctcgcctga

SEQ ID NO: 345187 - DNA, 735 bp, Pseudomonas aeruginosa
atgcctagcacaagaagcctccccgcacgggtcatcgtcgccgatgactaccccctgttccgcgacggcctgaaacgggtcgtccgccgctacctgccgcaatccgccgtgagcttggcggacagcttcgacgaggtgttgcgccaggcgcaggcctgcccggcggaacctcccgttctcttcgtcctcgacctgcagcttcccggcctcgccgctccacagtccatcgatcggctgcgccgcgcctaccggaatagctcgatcgtcatcgtctcgatgctcgacgacccatgcctggtggacgaggtgctggccgccggcgccgacggctatctcggcaaatccctggaggccggggaaatcggcgcggcgctgcgggcgctgggcagcgacgagccggtggtgcgcctgcgcagcgaaggagcgagtcccgtcaggccggggcaggaccgggtggacgcgctgaccccgcgacagcgggcggtcctgcgactgatcgtcgacggcctgtcgaacaagcagatcggccgcgcgctgtcgatctcgccgttcaccgtgcgcatccacgtatcctccctgctgcgcaccctggacgtgagtacgcgagcggcggcggcggcactcgccgtgaaggccggggtccagggcaactgcgccgaggttcctcgcggcgttgccgaaaatcacagagcgaaaacctccccgcggctttcacaaagcctcccacgtacttga

SEQ ID NO: 345188 - DNA, 1155 bp, Pseudomonas aeruginosa
atgcccgatacctctcccgatctgccggccacgacgccgctcgccgcctatcgccaggccgtggaacagcgcggtttcgctcccgacgaggcgcagcggcgcgccgccgaggcgctggagcgttgtttccaggccctgcacgaggctcatcgccacgccgcgatccagggcgtctacctgtgggggccggtggggcgcggcaagacctggctgatggatcacttctaccagtgcctgcgcgtgcccgcgcggcgccagcacttccaccacttcatgcaatgggtgcaccagcgccagttcgaactgaccggcaccgccgacccgctgcgcgccctggcccgcgagctggcgcgggaggtgcgggtactgtgcttcgacgagctgttcgtcagcgacatcggcgacgccatccttctcggcagcctgctgcgaatcatgttcgaggagggcgtggtgctggtcgccacctccaaccagccgccggagcagctgtacgccgacggcttcaaccgcgaacgcttcctcccggcgatcgaggcgatccagcggcacatggcagtggtcgcggtggatggcggccaggaccaccgcctgcatcccggccgggccgagcaacgctactgggtggtggaggcggggcaggcgggcggtttcgccggactcttcgcgcgcctgagcgccggcgaggcggtgtccgaacagcccatcgaactgagccaccggcaggtggcggtgcgccggcacagcgaatcggtgctctggtgcagctatgcgcagctctgcgaggcgccgctgtcggcgctggacttcatcggcctttgcgaccgctaccgggcgatcctgatggacgacctgccgtgcctgagcgccagccagcgcgaaggtcgcattgcccgtggcaccgaggacggcgcgcaactggtggaggcgggcgatcgcgaattgccgcagttgtcggtgcacgacgacggcgtgcggcgcttcatcgccctggtggacgaatgctacgaccgcaaggtgccgctctacctggaggccagggtgccgctggaggcactctataccgagggctacctggccttcgccttccgtcgcaccctcagccggctgcgcgagatgcagctggcgcgcttcggcagcgacagcgccggttag

SEQ ID NO: 345189 - DNA, 1128 bp, Pseudomonas aeruginosa
atgcggcaaagattctggcaaggaacattcaagaccctgggcctcctcggcctgacggcggggctcgccgcccaggccgcggagccgtccggcaaggccctcagcgccgccgccggcgtgccctggccggcggtcatcgcccaccgcggcgcctcgtacgacgcccccgaggaaaccgccgcggcctacctgctggcccgcgaccttggcgccgactacctggaagccgacgtgcagcgcagccgcgacggcgtgctggtcgccctccacgacgacaccctggagcgcaccaccgacgtcgccgaggtgttcccggggcgcgccaaggacccggtgagcagcttcagcctcgccgaactcaagcgcctggacgccggctcctggttcaatcgcgcctttcccgagcgcgcccggcccggcttcgtcggcctgcgcatcctcaccctcgacgagctgctcgacatcgccgagggcggcgccaacaagccgggcctgtacctggaaaccaaggtaccggcgcaattccccggcatcgaagacgacttgcgcaagctgctggaacgccgcggctggctgcaaccccgcgagcgcgccaccgccgggcatgtggacgtggcccacggcaatggccgggtgatcctgcagaccttcgagaagagcagcctggcactgctgcaaaaaagcatgccgcaagtgccgaagattctcctgctgtggctcggcgacggctacctggaagcccgctcgccagtgactttcaaggaatccggggaaaccgacaaggcggccttctacgccaggcaggaagtgaagtccgaagccgagttcggcgcctggctggactgggccaaggcccacggcgcgctgggcaccgggccctcggcgaccctcgccgagcgcggcgaacagagctacgccgacctggtgaaaccctggatgaaccgcatgacccacgcgcgcgggctgttcatccatgcctactcggtggactcggaggaagacttcgaggccctcggcgcggccggcgtcgacggtttcttcaccaaccgcacctcggaactgctgaagttccagggccgcccggcggcgcaagacatggacgcgctgctgcgccggcacggctactga

SEQ ID NO: 345190 - DNA, 213 bp, Pseudomonas aeruginosa
gtgtcaaaacagtcacctccccacagcgtcacccccagccacatcgtctgcaaggtacttgccgaaggcatgagcgaaggctcggcgcgctacgacctgctcagttcggtgcggcgcatcccgatccgcggcaaggaccacttccgcccgctgctgctcagcgcgggcaagacctggcaccagctctccggctactggaacggccggcgctga

SEQ ID NO: 345191 - DNA, 2292 bp, Pseudomonas aeruginosa
atggcgctcgcccacaccctcggttttccccgcatcggccgcgaccgtgaactgaagaaggcgctggaagcctactggaagggcgaactcgaccagcccggcctgctccaggtcggccgcgagctgcgccggcagcactggcaacggcagaaggacgccggcatcgaactgctgccggtgggcgacttcgcctggtacgaccaggtcctggcgcactcgctggccttcggggtgatccccgagcgcttccgtccggccgacggccagccgaccctggataccctgttcgccatggcccgcggcgtcgcccaaggctgttgcggcggcgcgcatgcccaggaaatgaccaagtggttcgacaccaactaccactacctggtcccggagttcaccgtcgaccaggcgttcagcctgagctggacgcagctgttcgaagaggtcgacgaggcgctggccctcggacacgcggtgaagccggtgctgatcggcccgctgagctacctgtggctgggcaaggccaagggcggcgagttcgacaggctcgagctgctcgagcggctgctgccggtctacggggagatcttccagggcctggcggcacgtggcgtcgaatgggtgcagatcgatgagccgatcctcgtcctcgacctgccgcaggcatggaagaacgccttcgagcgcgcctacaacctgatccagcgcgaaccgttgaagaagctggtcgccacctatttcggcgggctggaggacaacctcgggctggccgccggcctgccggtggatggcctgcacatcgacctggtgcgagcccccgggcagtacccgaccattctcgatcgcctgccggcctacaaggtactttcgctggggctggtcaatggccgcaacgtctggcgctgcgacctggagaaggccctggaggtgctcgcccacgcccatgagcggctcggcgagcggctctgggtggcgccgtcctgctccctgctgcacagtccggtggacctgtgccgtgaggaccaactggacgaggaactgcagagctggctggcgttcgccgtgcagaagtgcgaggaagtggcgatcctggcgcgcgcgctggtcgagccggaagcgcccgaggtgcgccaggccttcgaggtcagccgccgggtagaggccagtcgtcgccgctcgacgcgcatccacaagcgcgaggtgcaggcgcgcctggccgcggtgcggccacaggacagccagcgcgcctcggccttcgccgagcgcgccgtgcagcagcgggcgcggctggagctgccggcgttccccaccaccaccatcggttccttcccgcagacctcggcgatccgcctggcgcggcaatcctggaagcagggcaggctcagccaggccgagtacaccgaggccatgcacagcgagatccgtcacgccgtgcaagtgcaggagcgcctgggcctggatgtgctggtgcatggcgaggccgagcgcaacgacatggtggaatacttcgccgagcaactggacggctacgccttcacccgcttcggctgggtgcagagctacggttcgcgctgcgtgaagccggcggtgatctacggcgacctgagccggccgcggccgatgacggtggagtggatccgctacgcacagagcctgaccggcaaggtcatgaagggcatgctgaccggtccggtgaccatgctcatgtggtcgttcccgcgcgaagacgtgtcccgcgaggtgcaggcacggcaactggcgctggcgctgcgcgacgaggtcagcgacctggagcaggccggcatccgtatcgtgcagatcgacgaggcggcgttccgtgaaggcctgccgctgcgtcgcgcggactggccgcactatctggagtgggcgaccgaagccttccgcctgtgcgcttccggggtgcgcgacgagacgcagatccacacccacatgtgctacagcgagttcaacgatgtgatcgagtccatcgcggcgatggacgccgacgtgatcaccatcgagacctcgcgttcggacatggagttgctcgaggcgttcgaggccttcgcctatcccaacgagatcggcccgggggtctacgatatccactcgccgcgagtgccggcggtggaggacatggtcaagctgctgagcaaggccgccgaacggataccggccgcgcgcctgtgggtcaaccccgactgcggcctgaagacccgcgcctgggccgagaccgaggcggccctggccaatatggtggcggccgcccgccagctgcgccaggcgaacctcgcctga

SEQ ID NO: 345192 - DNA, 1032 bp, Pseudomonas aeruginosa
atgaacaacaacaagaaatgcgcgtttgcccttttcgccagccttgcctgcgacggcgctccggcgctggccgacggcttcgtcgaggacgcccgggccagcctggccctgcgtaacttctacatgaaccgcgacttccgcgatggtgcgggacgtgcaaaaagcgaggagtgggcccagggcttcctcttcgactaccgctcgggctataccgccggcatcctgggcatcggtgtcgatctgctcggcaagctgggcgttcgtttcgactccggagccgggcgcagcggtaccggcctgctgccggtccgcgagggtggcggcgcggcgggtgactacgcgcggctcgaaccgaccgccaggctgcgcctgtcatgcagcgaattgagggtcggcggcctgctgccgaagttaccgaccgtccagcccaactacgggcgactgtttccccaggtgttccagggcgtgctgctgacctccggcgaactgtccgggctgagcctgcatctcgggcggctgaccgaggtcagccagcgcaacgaggcgggtaccggcgacctggcgctgttcaaccgcaaccggcgtttcgccggagcggcgcaggcggaccgtttcgaccttgccggcctggactaccgcatcgccccggactggaccgccagctaccaccatggcgaactggagcaggtctacgtccagcatttcctcggtctcaaaggacgcatcggcgttgccgcggacagcctggaaagcgacttgcgcctggcgctcagccgcgacgctggcggcgctcgcggcggccgcatcgacaaccgctccttcagcgggtcgctcacctaccgccggcgtaacggccaggccttcgccctgggctaccagcggatgggcggcgatcacggcttcccctacctggaggggagcgatccgtacctggtcaacttcggccagtacaacgatttcgccgaggccggcgagtcctcctgcaactgcgctacgactgcgacttcgcgccactcggattgcccggcctga

SEQ ID NO: 345193 - DNA, 1533 bp, Pseudomonas aeruginosa
atgaacgaacaaccgctaacccgtatcggcatcgtcggcaccggcgccatgggccagggcatcgcccagctcgccgcctgcgccggcctctcggtgctgctcttcgacagccgccagggcgcggcggcgcaagcgcgcgacgctatcgcccgaacgcttgccaggcaggtggaaaaaggccggctgacccaggaagcgagcgcgcgcgccctgaacaacctgcgggtggtcgaggacctgcggatcctctgcgcctgccaactggtggtcgaggcgatcatcgaggacctgggcgccaagcaggcgctgttccgccagttggaagaggtgctcgacgacgaggcgatcctcgccagcaacacctcgtcgctgtcgatcaccgccatcgcctcggcctgccgcgatcccggacgggtcgccggcctgcatttcttcaacccggtgccgctgatgcgcctggtcgaggtgatcgacggcctcgccacccgcgccggggtcgccgagcggctgtgcgcgctggtggcgaccctgggtcaccaggcggtgcgcgccagcgatagccccggtttcatcgtcaaccatgccggaagggccttcggcaccgaggcgctgcgcatgctcggcgaaaacgtggcgcccgtggcggcgatcgacgaagtcctgcgcgagggcgccgggttccgcatggggccgttcgagctgttcgacctggtcggtctcgacgtcagcctgccggtgatggagtcgatctaccggcagtactacgaggagccgcgctaccgcccgcatccggtgttgcgccagatgctcgccgccggccgcctgggccgcaagagcggacgtggcttccattgccatgccggaacagcgccgccgcctgccgtcgcgccggccgtcgccggcggggctgcgttgccgccggtatggctgggggtcgatgacgaggacgaccgcgcgccgctgctggcgctgttgcagcgcctgggcgccgaggtggagaacggcgagcgtccctccgccgccgcactctgcctgctcgcgccgctcggcgatgacaccagtaccgcggcgcgccgcttcgaggtcgatccgacgcgcagcctggccatcgatgtgctgtcggacctggagcggcgccgttgcctgatgctcaacccggtcacccggcccgacctgcgggacgccgcccacgccctgttcgcctgggacggcgcgggggtgacggtgatccgcgacagcgccggcttcatcgtccagcgcagcctggcggcaatcgtcaacctggcctgcgacatcgcccagcagggcatcgcctcggtggagcacatcgacctggcggtgcgtctcggcctcggctatccgctgggaccgctggagtggggcgatcgcctcggcgccgggcgcgtactgcgcatcctcgagcgtctccacgcactcagcggcgacccgcgctatcggcccagcccctggctgcgccggcgcgccgagctgggcctttccctgcgccagccggacagcccgttggccgcctga

SEQ ID NO: 345194 - DNA, 612 bp, Pseudomonas aeruginosa
atgcagcgcgaggagacccgcttcaaggtggagatcccgctgctcggcagcctgatcctccgccacagcctgagcgagccggtcccggcgctgaaggagttcacgccgcaggaccgccccaactcgacggtgatcttctggaccttccgcctgatggtcgggctcggcctgctgatgatcgccaccggtctctacagcctgtggctccgctggcgcggaggagagcgactgtaccgctcgccggcgttcctgcgcctggtgctgctgatgggcccgtccggcctgctcgccatcctcgccggctgggtcaccaccgagatgggccgccagccctgggtcgtctatgggctgatgcgcacccgcgacgccgtctcggcgcacagcgccgaacagctgggcctgagcctggcgctgttcgtgctggtctacttcgctgtcttcggcgtcggcttcgtctacctgctgcgcctgattcgcaagggaccgcgcacggcggaagggcggcagacggaggagggcggcggcgccgggcgcagacagacgccggcccgcccgctgtcggcggccggcgaggaactggaagacaaccaggacgccaccgggaggaactga

SEQ ID NO: 345195 - DNA, 1005 bp, Pseudomonas aeruginosa
atgggcatcgacctacccctgatctgggtgatcatcattctgttcagcgtcatgatgtacgtggtgatggatggcttcgacctgggcatcggcatgctctacccgttctttcgtgacgcgcgcgaccgcgacgtgatgatgaacagcgtggcgccggtctgggacggcaacgagacctggctggtgctgggcggggccggcctgttcggagcctttccgctggcctactcggtggtcctgccggcgctctacctgccgctggtgttcatgctgatcggcctggtattccgtggcgtggccttcgagttccgcttcaaggccaggccggccaggcggcatgtctgggacaaggagttcatcggcggctcgttgctggcgaccttctgccagggcgtggtcctgggagccttcatcgatggcatcccggtggagaatcgccgcttcgccggcggctcgctggactggatcgcaccctttccgctgttctgcggcgtggggctggtggtggcttacagcctgctcggctgcacctggctgatcatgaagaccgaaggccgcctgcaggagcgcatgcacgacctggcgcgaccgctggcgcttgcgctgctggcggtgatcggcatcgtcagtctgtggacacccttgagccatccgcagatcgccgcgcgctggttcagcctgccgaacctgctctggctgctaccggtgccgctcctcgtgctgctgacgttccgccagttgttgcgggcggtggcggcggacgcccaggcccggcccttcatcctcaccctggtgctgatcttcctcggctacagcggcctgggcatcagtctgtggccgaacatcgtgccgccgacgctggacttccgcgccgccgcctcgccgccacagagccagggtttcatgctggtcggcgcgctgttcatcattcccttcatcctcggctacaccgcctggagctactacgtgtttcgcggcaagagcgccgatgccggctaccactga

SEQ ID NO: 345196 - DNA, 900 bp, Pseudomonas aeruginosa
atggcgcaatccgcggctcttcatccatccaccacccgcctgctcgcggcctgcctggtggtggttctgttcaccgtggaggcggcgctcccaccgctgcacgaattgaaggtaggcagcgccacccgccgctacctgctgtcccagcagcacaagccggcgcgaccgttgccgctggtgctcgcccttcacggcgccaacggcgacgcgcgagagttcgccgcgagcaccgcgctggacagcgagggccgccgcctgggtttcctgctggcattccccgaaggcagcggcgagaagggcgcgttgagctggaacgccggcgattgctgcaagacggccagccgccgcgacgtcgacgacatcgcttttctccgcgccctggtggcagacctggtggcgcggggctgggcggatccgcagcgagtgttcgtggtgggcttctccaatggcggcatgctcgcctatcgactggccgccgaagcgcccgctctgttgcgcgccatggccgcggcttccgcgacgctcgacatcgacccgaacgagctgagcctgggcgtgccgctgctgcatatccatggcagcgccgatacgctggtgccttatcgcggcggggtgggtccacgctcgagcaacccggcgccctatcccagcgtttccagcagcatcgcctcgatggccgggcggctcgatgcccgcctggcggacgatggccgcgccggtcgtaccgccgacggcaagccggtgagccgcgaacgctatgcctcggcggccgacggtgaggcggtggtgctcttgcgcatcgctcgcggcggacacgactggccgcgcagcgacaaccgcggcaggggcctggacgccacccgtgaagtgctgcgcttcttccaagagcatggcggctga

SEQ ID NO: 345197 - DNA, 174 bp, Pseudomonas aeruginosa
atgatgaccaccaagcgcgaaacccgcgagccagaaaacccaccactgagccccgactcgcctgcggtgggtcccgagcgacacaagcacgaccaggcgagcgaggcgcaaccggagttcgccccggacgatcccgacgtcgcaggccacggcgaggcccgccgcccggcctga

SEQ ID NO: 345198 - DNA, 2259 bp, Pseudomonas aeruginosa
atgcgcacctaccgcctgctcgccgtcccgctcctgctcgccgcgctctggctgctcggcggcggcgcctggttgtggctgctcgacggttccgcctactacctgtgcgccggcggcgcactgctggtctgcgccatcgccctctggcatggccgggcgcgggccctggccgcctacgcgacgctgctgctgggcagttgcctgtgggcctggtgggaagtcggcctgcgctggtgggagctggtgccgcgcctggccctgtggttcctgctcggcggcctgctctgcctgccggcgttgcgtcgccgactgcgtggtcggcacgcgtcgcgcgacgccgcgctgctggcctgcgccctgggcctggtcacgctgctggcgagcctggcgctgctgcggccatccgtggagttgccggcggtcagccatggcgcggccgggccaggcgccacgggtgcggcggatggcgagtggcgcttctacgcgggcgacgccggcgggcagcgttactcgccgctgcgtcagatcgatcgcggcaacgtgcggcgcctgcgactggcctggcactaccgcagtggtgacctgccaggtccggacgacccgctggagaccaccgcggaaaacaccccgctgatggtcggcgggcgtctctacctgtgcacgccgcatagccaggtgatcgccctggaggcggagagcggccgcgagctctggcgcttcgatccgcagttgcgcggccgtcgcgccgacggcttccgcagttggccgcacatgacctgccgcgggctcgcctaccatcacagcccggcctccagcggcagttgtccacgccgcctgctgctgcccaccgcggacgcccgtctgatcgccctcgatgccgacagtggcaagccctgccggggcttcggcaaggacggcacggtggacctggcgcgcggcctgccggacttccaggccggcgagtactactccacctctccgccggcgctggccggcggcctggtactggtcggcggccatgtcaccgatcggatcgccactggcgtgctgcgcgcctatgacgtagaggacggccacctggtatggaactggtacggcgacgaccgcgtcgacggccgtccgctggccgccggcgagcagtatccgcgcggcgcgccgaacgtctggtcgacgatcagcgtcgaccggcgcctgggcctggcctacctgcccgtcggcaacgccaagccggacttctggggcggccggcgcagcgccgcggcggagcgttacagttcctcggtggtggctttggagatcgccagcgggcggccgcgctgggtattccaggcgacccgccacgatatctgggaccgtgacctcgccgcccagccgacgctcttcgaactgcgccgggggcggcagcggatcccggcgctgctggcggccaccaagcagggcagcctgttcgtcctcgaccggcgcaatggcaagccgctctggccggtacgcgaggtgccggcaccggcgggcgccgccgaaggcgaccacacggcagcgagccagccggtctccagcctggacttctccccgccgccgctgcgcgagcgggacatgtggggggtcacccccctggaccagttgctctgccggctggcctatcgccggctgcgctatgagggtccgtatacgccacccggcgagtccggcagcctgatctatccgggcagcgccggggtgttcaactggggcggggtagcgctggacccgcaccggcgcatcgccttcctcaacccgagctacatggccttccgcgtgcgcctggtcgccggcgcgccgggcgaaccgcgctatcgcgccgacggcgtgccgttccgctcgccgctcggcctgccgtgccaggccccgccctggggcgaggtgatggccctggagctggacagcggtcgcctgctctggcgccgccccagcggcacggtacgcgacgccacgccgctgccgctgccattcgcccttggggtccccagcctcggcggaggcctggtcaccgccggagggctggcattccacgccggcaccctggatcgctacctgcgcgcctacgacctggacaccggcgaggaactctggcgcgcgcgccttccggcaggcggccaggccagcccgatgagctaccgcgggcgcgatggacgccagtacctggtgatcgtcgccggcggccacggctcgctgggcacccgcgccggggaccatgtgctggccttcgtcctggcgccctga

SEQ ID NO: 345199 - DNA, 345 bp, Pseudomonas aeruginosa
atgaccgacaaacgacaaggcatgagcaccagcgaagccgggcagaaaggcggcgaagccacctccaggagccacggcaaggagttctaccaggagatcggccacaagggtggccaggccagcggcggcaacttcgccaacgacccgcagcgcgccgccgaagccgggcgcaagggtggccagcaaagcgggggcaatttcgccaatgaccgggaaagagccgccgaggcgggccgcaagggcggccagcagagcggcggcaatttcgccaacgaccgggaaaaagcttccgaggcaggacgcaagggcggccagaacagccacggcggcggccgttcgtcctga

SEQ ID NO: 345200 - DNA, 336 bp, Pseudomonas aeruginosa
atgtccagacccacttcccgccatccgctgcgcgccttcctcctggttgccacgctctgcagtggcgccgccctggccgggcaaccggcgacgccggacggcaatcatcccggtcccggcgagggtacgagccatggccagggcgccgggcccaccgcccaggatcctcacgaaacccatcgcgagaacggcaaggtgcgcaccgaggatggccgcgccgtgcgcagcgacgacggcgagcgcaacaaccgcagcgaccaccaggatgcctcgccggagcattccggtgagggcggccagcgcgatcgctccagcaaccccggtagccaggagtga

SEQ ID NO: 345201 - DNA, 978 bp, Pseudomonas aeruginosa
atggcggaacgacggctggtggcgatctgcggcggcagcgccggggtcgggcgggccaccgcgcatgtcttcgcccgcgccggctacgcggtggcgatactggcccgcggcgaacgcggcctggccgagaccgaggcggagctgcgcggctacggcgtgccgctgacgacgctgagcgtcgacgtggccgatgccgatgcgttgcgcgcggcgagcgagcgcctggagcatgaactgggcaccccggacgtctgggtcaacgcagcgatggtcacgctgttctcgccagtgcgccagctcaccgcggaggagatccgccgtgtcaccgaggtcacctacctgggcacggtgcatggcaccctggccgcgctggagcgcatgcgcccgcgcgaccgcggggtgatcatccaggtcggctcggcgctggcctaccgggccatccctctgcaggccgcctattgcgcggcgaagttcgccgtgcgcggcttcaccgacgcgctgcgctgcgaactgctggaggagggcagcgggatccgcctgtgcatggtgcaattgccggcgctcgacaccccgcagttcgactgggcgcgtaaccgcctgccgcgaaaaccgcagccggtgccgccgatccaccatcccaacctggcagcccatgcgatctacgcggcggtcgacaagacgccacgggaactctggctgggcgcgtcgaccctccaggcgatccttgccaacggcgtggcgccgggcctgctcgaccgcctgctggcgcggcgcgcctacgtcggccagatgagcgaacaggccgagccgggagggcgtccggacaacctgttcctgcccctggaggaaggccacgccacttgcggccgcttcgccagccgctcgcgctgctcggcgctgttgctcagcgccgccacggtgtcctggggattgctcggcgcggccctgctgctggccgcgctgctgctatggctgtga

SEQ ID NO: 345202 - DNA, 1608 bp, Pseudomonas aeruginosa
atggacgctgaatggtatcgccactgcctgatctaccagatcgatccatcgctgttccgcgacagcgacgccgacggttgcggcgacctggccggtatcgtcgagcgcctcgactatctgcgtgaactgggcgtcggtgcgttgtggctgatgccgctgtaccgctcgccgttccgcgacgccggctacgatgtcagcgaccatctggcgctggagccgcgcttcggcagcgaggaggatctccggcggctggtgagcgaggccgccgcgcgcggcatgcgggtgattctcgaactggtggtgcagcacacctcggatcagcacccctggttcgccgccgcccggcatgaccgcgaggcgccctgtcgcgactactacctgtggtcggaccggccgctggacgacggcaaccggccgatctttccctccgtggaggacggcatctggaactgggacgcccaggccgggcagtactaccgccatcttttctacagccacgagccggacctgaacctgaagaacctacgggtcatcgaggaagtcgagcgggtcatgagccactggctggaactgggcgtcgccggtttccgcctggatgccgcctcgcacctggtcgaacaggccggcggcggcgacgagcgacgtggcgtctggctgctcgaacggctcgcccggcatgcgccggaggcgctgctgatgggcgaggtggacgtcgagcccgaccgttaccgccattacttcggcgacggcaggcgactggggctggtactggacttctggatcaacaaccacctgttcctcgctctcgcccggcagagcgccgaaccgctgcgccgcgcgctggtccgccagccggtgccgccgccgggctgcggctacgccctgtggctgcgcaatcatgacgagctggacctggagcgcctgagcgaggccgagcgcgaggaggtcatgcgcgccttcgcccccgagcagaacatgcgcctctatggccgcggcatccgccggcgcctggcgccgatgctcggcggcgacgtccgccgccaggcgatggcctacgccctgctgctgtccctgccgggcacgccgatcctgcgctacggcgaggaaatcggcatgggggacgacctgcggcgcccggaacgcctggcggtgcgcacgcccatgcaatggagcgaccagccccacgcggggttttccgacgcgcccgccgaacgcctggcggtggcgccgatcgaggacgggccgttcgcctgcacgcgggtcaacgtcgccgcccaggatgcggcgccggactccctgctcaaccgggtacggcgcctggcccgggcgcgcgcggaactgccggagacgggcctgggccaggccagcctggtaccgaccgaccagccggcgctgttcgccatgcgccatgatcgcggccaggcacccggcagcctgatgctggtcaacctgtccgagcggccgctacgcgcgtgcataggcgagctggatctcggcgcctaccgggaaatcctcgccgatgacgactacccgcctccgcacggcaaccgggtctcgctggctggccacggctaccgctggttccgtcgcgacggctcacagccatag

SEQ ID NO: 345203 - DNA, 1548 bp, Pseudomonas aeruginosa
atgctgcaatccttccagccgccctggtggaggcgcgcggtgatctaccaggtctatccgcgctcgttcgccgacagcaacggcgacggcgtcggcgacctgcccggcctgatcgcccgcctcgaccacctgcagcgtctcggcgtcgacgcgctgtggctgtcgccggtgtaccgctcgccgatgcgcgacgccggctacgacatctgcgaccactgcgacatcgatccgctgttcggcagcctcgccgacctcgaccgcctcctcgccgaagctcatgcgcgcggcctgcgggtgttgctcgacttcgtgcccaaccacacttccgaccagcacccctggttcctcgccgcccggcgcgggcgcgacgatccgcggcgcgactggtacatctggcgcgaccagccgaacaactggcgcgccgccatcgatggcggcagcagctggacctgggacgaggccagccagcagtactacctgcatttcttcctggcgcagcagccggacctgaactggcgcaacccgcaggtagtggaggcgatgcacgaggttctcaggttctggctggaacgcggtgtcgacggcttccgcatcgacgtcgcgcactgcatcggcaaggatcccgagttcgccgacgacccgcgctgcgcggccggcgagagcatcgcgcggatcaacgaccagccctacagccacgaggtgctgcgcgggctgcgccgactggtcgacagctatcccggcgagcgcgtgctggtcggcgaggtgaacatccgctcgaccgcgcgggtcgccgcctattacggcgccagcgacgagctgcacatgtccttcaacttcccgccgctggacgcgccctgggacccggtgaccctgcgcctgtgcatccgcgaggtggaaaccgcgctgaatcaggcggcggcctggccgacctgggtcctctccaaccatgacaacagccgccaccgcacgcgctacggcggctccctggcgcgggcgcgcgccgccgcggtgctgctgttgaccctgcgcggcacgccgttcatctaccagggcgaggagctgggtctggaggacgcgccgatcgaggcggcgcatggcgtcgaccccggtggccgcgacggcagccgcgcgcccttgccgtggcgagccgccgcaccccacggctgggccggcgagcccgcctggctgcccttcccgcccgaggcggataccctggcggtggaggtccaggagcgcgatcccggctcggtgctggcgctctatcgccggctgctcgcctgccgccgcggcagccccgccttgcagctgggcgactgggaggagctgccgtcgcaccccgaggtgctggcctaccgtcggcgccatggcgatgaccagcggctggtctgcgtcaacttcgccgacgccgcccacggcttcccgctggccggtgcctggcaggtcgaggtggccagcgatggcgtcgccgccgggcagccctacgccggcgagttgcgcggcggccaggcgctgctgctgcggccaggggagcgtggcgatggacgctga

SEQ ID NO: 345204 - DNA, 1038 bp, Pseudomonas aeruginosa
atgtcccaatccacgcaggtcaaccgccgtatcgtcctcgcgtcgcgcccccacggcgccccgacccgggaaaacttccgcctggagcaggccccggtaccgcaacccggcgccggccaggtgctgctgcgcaccgtctacctgtcgctcgacccgtacatgcgcggacggatgagcgacgcaccgtcctacgcaccgccggtggagctcggcgcagtgatggtcggcggcacggtgagccgggtgcaggcatccaagcatgccgacttcaaggtcggcgactgggtgctttcggccaatggctggcaggactatgcgctgtccgacggcagcggtctggcccggctgggcgaggccccggaacatccgtcccatgccctgggcgtgctcggcatgcccggcttcaccgcctacatgggcctgctcgacatcggccagccccggaccggcgaaaccctcgtggtggccgccgccaccggcccggtcggcgccaccgtcggacagatcggcaagctcaagggctgcacggtgatcggcgtcgccggcggcgcgcagaaatgccgccacgcggtcgaggtcctgggtttcgatgcctgcctcgaccaccatgccgcggatttcgccgagcgcctggccgaagcctgcccgcaaggcatcgacatctactacgagaacgtcggcggcaaggtcttcgacgcggtgttccccctgctcaacgccaaggcgcggatcccggtatgcggcatcgtcgcccactacaacgacaccgacctgccgccggggccggaccgcctgccggcgctgatgggcaccatcctgcgcaagcgcatcaaggtgcagggattcatcatcttcgacgactacggtcatcgctacggcgagttccagcgcgacatgtcgcaatggatcgccgagggccgcatccagtatcgcgaggagcgggtcgacggtctcgagaacgcccccgaggcgttcttcggcctgctccagggacgcaacttcggcaagctggtgatccgcgtcggagccgacgcatga

SEQ ID NO: 345205 - DNA, 1602 bp, Pseudomonas aeruginosa
atgtccgagcgtgggacggctgtcgaaggccggatcgactggcaacggatcctgctgatcctgttcaccaccaccctggtgggcggcatctgcgggatcttcgtgatcaacgaactggatcgccagcacgacggggcgcacctggcgtcctataccgaaatggccctggagcgggcgctggagatctcctcggcggccgaccagatgctcgccgagatgaacgccggcaacgcgccggcctgcggcgaccgcgacctggagatgctgcgctcgatcgtgctcgagtcgcgtttcatgagcgacgtcggccggatcagcggcaaccaggtgatctgtaccggggtgcgcggccgcttgcgggcgccctgggggctgtccgcacccgaccgggtcgaccgcgccggcacccgcttctggtccgagggcatgccgttgccgctgcaggtgctgccgaccggcctggtcgcccgcggcaacgccatcgtgttcatcgccccgcatgcctatttcgacgtcgaccacccggacgccggcatctccgccgccgccgtctcggccaacggcgactacatctaccaccgcttcgccggggagcagcgcccggccccggagatgcccggcaggcccgcttggccggaagtctccggcgcccgccaggcaagccgctgcgagccggaccaggacctctgcgtggtctcccacctgcgcgagcgcggcctgctgaacaccgagccggaccgcgccgccatggccgcggcgatgggcggcgggctgttcttcggggtcatgttgctgctgagctacctgttcggcttcctcagcgacgagaagcttcccgccaggctcctgcgcgcgttgaagcgcgaggcgctggaggtgcactaccagccgatcgtgcgcctggcggacggccgctgcatcggcgtcgaagccctggcgcgctggaccgacagcagcctgggccgggtgtctcccgacatattcatcggcgccctggaagaaagcggcgacatccagttgctgacccgcttcgtcttccgccgtgccctcaggcagctgggcccgctgctgagaaaggagccggggttctatgtcagcatcaacgtgaccggcaaggacatcgccaatcccggattcatcgacttcgccatccgccagatggcccgcgagcgcgtgctgcctgcacaggtcgccctggagctgaccgaacgcaccaccgaggcccaggactgcctgctggcggggatgaaccgcctgcgcgagctgggcctgaagatctacgtggacgacttcggcaccggccactcgaatctggtctacctggccaacctgccggtggacgcgatcaagatcgacaaggtcttcacccagtcgatcggcgaaagcgaagccgtcgagctgatcttcgacaagctctgctcgatggccgaacagttgcagatcggcgtggtggtcgaaggaatcgaaacccaggcccaggcggactacgtctcgcgccgctcgccggaagccctcggccagggctggcacttcggcagggcgttggcgcttgaggcctttctcgcctattaccgggatcttcccgcccgcaagcggccatga

SEQ ID NO: 345206 - DNA, 885 bp, Pseudomonas aeruginosa
atgtacgcaccgacacccgccctggacaaccagctcgccgacgccctgccgcagtggcgcgatctcgcccgcaccgccgcggttccacgacgaaacctcgaccttgccgactggaacgccgactggcgtggcctgttcggcgcactcgaacgcttttcccggagccacgcctaccggcagcctggcgcggtgcaggggtatgcggcgctggagagcgcctggagctggggcagcgccgcggagaatgccagcacgctgctgctcaagggtatcgaccggggcctgccgggcgccgcgctgcgccccgtctaccgggaaacggcggcgctctggctggattacgcgcggttgctcggcgtcgcgcgcgacagcctgcggcagcagggcgaggagaacttcgaagcgaccccggccctggcgccacgcagcggccagtacccgttcgcgttgcagctgctggccatgggcgtgctgctcgacgcccaggaccttcttcccgcgttggtcgaggaagttcttctgttcgacaccgaccgtcttctcgactacctgagcgcggccgccctcggcctggtcgaggccagcggggaaaccttccatccgcgaccgttcggcgagctccgggcgttcttcgaagccccggacgacagcgccgcgcaggcgctggtgccatacctgcaacgccagtaccgggagttcttccagttgtcgcccaaggcccagaaaaagacccgccgcctggccgggcccgaatcctggggctggtgggccatggaagtgtcggccctgagcgtgctctacggctgggacgacaaggccctgcgcgactccccgcactacctcgccgatctggtcgactacgcccgggcgcagggcagcgactag

SEQ ID NO: 345207 - DNA, 1185 bp, Pseudomonas aeruginosa
atgaacctgccgccacgcatacgcctggccctcgccgacctgcgtcgacagcgcgaggagccgctctgcgcttacctatacgacctgccggcgctggccgaacgggttcgcgcgatgcgcgcggcgctgccgcccgcatgcgagcttttctatgccgccaaggccaatccggaggcagcgatcctgcgcaccctggcgccgctggtcgacggcttcgaggcagcttccggcggcgaactggcctggcttcgccaacattgtccggagcatccgctgatattcggcggccccggcaagctggaaagcgaactggacgccgcgctgctggccaacctcgatgccttccacgtcgagagcctgcacgagctgcgccgcctggccagcctcgccaggcggcgcgagcgacggatcccgctgttgctgcggctgaacctgaagctggacgaaactcccgacagccgcctggtcatgggcggcaagccgacgcccttcggactcgacgaggaagcgctcgacgaggccctggcgctgctgcgcgaggagcccgcgctggagttgaaggggctgcacttccacctgctttcccaccagctcgacgtgagcgcccacctgcaactggtccgcgcctactgccgcgccttcctgcgaatcgctggcgaatcggggttgccgttgtcgctgctgaacgtcggcggcgggatgggcatcgactaccgcgatttcgcgcgctccttcgactggtcgggcttctgcgacgccttgccggccctcctcgacgaagaaggcatggggggtatccgcctgcgcttcgaggttggccgctacatcgccgcgccatgcggctactacgcgatggaagtgctcgacatcaagcgcaaccatggcgagcttttcgccgtcgcccggggtggcacccaccatttccgcacccccgcggcgcagggtcacgaccatcccttcgtcgtcgtgcgcggcgagcgagccgcggaaatcgaggaccaggcggtgaccctggtcggccagctgtgcacgcccaaggacgtgctggcccggcggcagccggtcgccgccctggccgtcggcgacctgctggtgttcaccctggccggcgcctacgcctggaacatctcgcaccgcgacttcctcatgcatgagccgccgcggatgctgttcctgcaggactag

SEQ ID NO: 345208 - DNA, 1755 bp, Pseudomonas aeruginosa
atgaccgcagcacccgactcgttgtccctgcacgaccacgcgctggctggcgacgcccagcggcacgccatcgaatgcctgctcaactgctatctgcgcgagtatgccctgccccgtggcgaggcctgcctcgacgcgcgtggccaggacctgccgatgagcctgcgccagctcgccggcacccgcgtctgcatcgacctggccggcggccgcttggcggtagccgccgaccgcaccagtgtgctcggtcgctgccgcttcaccagcgcgccctatttcaagggtaacggtcagggctggcgccccctgggggtcatggaactggcgcaattgctgctggcgcccctggccagcgcggagcgccatggcgagctgatggggcagatccacaacagcctgagcgtcacccgggtcttcctccgtcacgcggttccggcgcagcagctgccgcaggacagcctgctgcgctcggagcagcaccaggtctggggccatgccttgcatccgaccccgaagagtcgcgagggggtttccctggagtccctgctggcctgttccccggaggtcggcgcgcgcttctcgctgcactggttccaggtcgatccctcgctgttccgccatctgggcgacgatccgcgggcgaccctgcgccagttgtccggcgaggagcatctctatccgtgccacccctgggaggtgcaacgcatcctgggcaatcccctggtacaacgcgccatgtcgcggggactgatggcctacaggggcgcgctgggcgcgccgctgtatccgacctcgtcggtgcgtaccctgtatcaccccgagcttgcctacttcctcaagttctcggtgcacgtgcgcctgaccaactgcatccgcaagaacgcctggtacgaactccacagcgcagtggccctgacccgcctgctgcggccggcgatggccgacctggccaggcaccagccgggcttcgaactgatgcccgagcccgccgccagtaccctcgacctgagcgcgctgggcagcgccgagcaagcccgcgaagtcaccgagtgcttcggtatcctctaccgcggcaacttcgatgccggcagtcgcgaggcctatcgcccgcaggtcgccatggcgctcttcacctggggcctggacggccacggcatgtgcgcctcgcgcctgcgccagtgcgcggcgcggctcggcctggggcgcgaggagaccgccgcgctgtggctgcagcgctatgccggcctgctgctgggtggcgtgctgcactgcctctatcgccagggggtggtcctggaaccccatttgcagaacaccctgctcggcttcgacgacgatggcctgccctgccgggtctgggtccgcgacctggaaggcaccaagctggtcgccgggcactggccggaagaacgcctggccgggctcgacgaacgcacccgcgcctccctttactacagcccggagaaggcctggaaacgggtcgcctattgcgcgctggtgaataacctgggcgaagcgctgttccatcttgccgacggcgacgcggcgctggagcggcgcctgtggacactgctcggcgaagaactgcgggcgcaatgcgcgcggctcggcaatcccgctgagctgagcgggctgtgcgccggcgccgccctgcccagcaaggaaaacttcatgacccgcctgttgcaacgcgccgaccgcgaggccggctataccgccctgcccaatcccctgttccatggagaccgcgcatga

SEQ ID NO: 345209 - DNA, 1146 bp, Pseudomonas aeruginosa
atgtcccggcgcctgatgtacagcgtcctgctcggtcactacctgtcggcgttcaccgccctcggcgtgcccctgttcctgccgcggatcctcgccgacctggcgccgggcacgccgggctgggccatcggcgtgctgttcgtcctgccgaccctgtgcaccgcgctggcggccccgttctggggccgcctggccgaccgccatgggtgccggctgtccctgctgcgggcacatgcgggactggcgctcggcttcctgctggccgggctgagccccaacctctggacgttcgtcctcgccctggtgatccagggcagcttcggtggcgccatggctgcctccaacgcctacctggcgacccagctggacgacggcgagctgtcgcgcgcactgaactggacccagtactcggcgcgcctggcgatgatcagcggaccggtcctgctcggcctgctgaccgccagcggcatgggccaggaactctaccgggtgctggcctggctgccgttgctggctttcgtgctgattctcccgttgcctgccgatcatggccgccagcgggcctccgggagtgccggggaagccggtgcgggcgccctgccgggcgacctggcgcggctgctcgccgtgcagttcctgttctgtttcgcgatggtgctgggcttcccctacttcgttccctatggcgaggccctgggcctgcgcaacgacgctctcatcggcctgttctacgcgctgccgcacctggtctacctggtggccctgccgcgcctgcagcgctaccccgccaacctgttgctgccggggctggggctgttcgcgctgggcaacttcctgcagttcggcgccggccaaccgctgtcgttgttcgcctggcgcctgctcgcggggctcggcatgctgctcgccttcatcggcctgcatcgctgtctcagtcagcgccgccgccatggcagcgccggacggctgttcgcctggttcgactccagcagcaaatgggccggcgctgccgcgggtgccgcggccggcctggccagccagcactacggcatcgcttcaccgttcctggtcgccggcctggccgctttcgcggcgctgtggctggcgcgtcccctgctcgtcgctcctcgggagatcaccgcatga

SEQ ID NO: 345210 - DNA, 1773 bp, Pseudomonas aeruginosa
atgagcgccgtggcttcctgcaccgaccgggcggtgatcggccagcgcatcatcgactgtttcctgcgtgaggacatccgcggcctagccagcgagggtcgggccggcgcgcttccggccgagctgggcgggcactggccgctggccgcccccgacgcctggctgcgcatcgaccatctcccgcttggcgaactctggctgccggtccgccgcggagcaccgctgcaggcctggagcgcaacgtgcgatgcctggctgcgcaggcaggatggcgcggtgctgctggagcgggggcatggccggtggctggaactcctcgccctggggctggacgcggaaagccgggaactgttccgtgactacctcgccgaggccgagtgcgcggtggctcatcgcgccctctgccgcgaggcgcggcgccggcatggcgccggcgaaccgctcgacgccgcgggctgggatgagcgcctgctgggcatcgatcgcctggccagctacctcgatcatccgttctacccgaccgcgcgcgccaagagcggcttcgaccgggacgccctgcgccgctatgcgccggagttcgccccgcgcttcgcgctcaactggctggccttgccgaagtccgagctgaccctcgccagcaccgcgccggcgcactggccggggttcgccgaagtgggcctggaccccgccctggcgcagagccatgcgctgctgccggtgcacccgctgacctgggcggaactggagcgccagggcctgccggcggacgcgttgcgcgcgcccggcagcgcgctgtgggtgcagccgacgctttccgtgcgcaccgtggcctgcgtcgaacatcctgactggcacatcaagctgccgctgctggtacgcaccctcggggcgcgcaacctgcgcctgatcaagccgagcaccctgtatgacggccataccctgcagcgtatcctgcaggcgctggccgagcgcgacccggccctggcggatcgctacctgcatgtcgacgaaagccacggcggccatgtcggcgagcacaggcacctggcctatatcgtgcgccgctatccgtccggcctggagcgcgccaccctggtcccggtggcggcgctggccagtccgctggaggatggccggctgttcctcgaagcgctggtcgagcgtttccacggtggcgacctggacgactggctggagcgctacctcgacctcctcctgcaggtgcacctgcgcctgtggctgcgttacggcatcgccctggaggccaaccagcagaacgccgtgctgctgttccagcccggccagccgctgcgcctgctgatgaaggacaacgacgcggcgcgtctctggccgcggcgcttcctcgcggcctgtcccgacctggccggccactgcgccgccctgcgcgacgagcgtatccgcgtcgaaggttcccaggcgctggcggagatgttcaccaccatcaccctgcaattgaatatcgtcgcgccaatcgaggccatcgccgcggcccgcctggccccgcgcgaagcgctctacgcgaggttgcgcgaacgcctgcgcgcctgcctcgacgggctcgaggcggaaggcctggcgtgcgccgaggcgcggcgcttcctgctcgacagtccgtgcctgccggtgaaatacctgctcagcgccggcagcctgttcagcaaggcctggtcgggggctcgcgacatcaacaagttctacggctacagcgccgcgaatttcctgcggggggacgacgcatgtcccggcgcctga

SEQ ID NO: 345211 - DNA, 1200 bp, Pseudomonas aeruginosa
atgcaacgaccgctcgtgatcctcacccacatcgcccatcccgccatcaccgagggtttccttcccgccgccatggcgcgtgggctgccggtgctgctgatcaccgaccatgcgcagcagcatcgacgccagctggcggacgcggactatccggccgaacgcctggagatccacgagtgcgacgtgttcaatccgctcgccgtggtcgaattgatcaacgcccatggctggacgccactcgcggtgttcagcaacagcgaccacctgcagaccgccaccgcgctggtggccgagaccttcgcctgtcccggcaaggattggcgtctgtgcctggcggcgaagaacaaggcgctgatgcgcgagcgcctgctgcgactcggcctgccctgcccctggttccgcgtgctggtgccgggcgcggcactgcccgacgaggttccctacccggtcgtggccaagccgcgtgaaggagtggccagcctggatgtccgcctgtgccgtgatggtgacgcgctgcgcgactactgcacgcgtttctggcagctcaatcccggccgcgcgctgctgctggaggcctacctggagggcccgctgttcaccctggaaaccctcggcgacggccagcgcctgagggcgatcggcggtttcgacgtgaacctctcggcgccgccgcatttcgtcgagctggcggcgcgctggaacggaccgctgagccgtgagaaccgtgccgcggccctggcccaggtggccgccttcggcatcaatttcggggtctgccacagcgaattcatcctcactgcgcaggggccggtattggtggagatcaactaccgcagcatcggcgatggccgggagttcctgctcgaccgcctgctaccgcagggctggttcgagcgtatcctcgccctgcacctgggcgaaccgctcagcgagccgctggccgcggccgccgaggcgctggtgcattacctggtcgccgagcgctccggcgtgctgagccaggcgccggaaagcttcagcgagcaggacgacggccgctggcgtgactaccgcgcgctgtatcgcagcggcgacgagatccgcctcagccactcgaacaaggactatgtcggcgtgctgcgcctgatcgagcgcgacgacgccaccctgcgggcgcgcctgcaggccagcctggccgacctgcgctgggtgctggcatga

SEQ ID NO: 345212 - DNA, 2073 bp, Pseudomonas aeruginosa
atgaaaacaacaatcccattacttgcccttcccttcagcctcctggcccttggcatcgcgaatgccgcggaggaggaagacgccgccctggacccgatggtgatcaagggcgacgtgctcgggaaagccagcgatcccgaggtgctcacctacagcggcagccgcagcgtggtcgatgcgcaggacctgagcaaaggcagcgtgcgcggcctggacgacgcgttgcagcgggtccccggggtgaagatcttcgacgagaccggcaccggcgcgctgccgcagatttccgtccgcggtctctatgaaagccgcagcgggcgcatccaggcgttgtccgacggcgtcccgctggcgctggcgccctacggccagaccggcatgtcgctgttcccgatgaccctggcgaccatcgaccggatcgacatcgtgcgcggcggcgcggcggtccagtacggcccgaacaacgtcggcggggtgatcaacttcatcagccggccgattccgcgcgagtgggaaaccaccctgcaggaacgcaccaccttcgccccgggtggacggcagctgtgggacagctacctggggaccggcggctacctgaccgacaacttcggcctgcagctggacctcaacacggtcaacggcgagtacggccgcgagcactccgacaccgacatccagaattaccgcctgcgtggccagtggctcatcgacgacggccgcgagctgaccttcggcgtccagcgctatgtcgccgacatggacctggccggcgccctgagcgtcagggactacaaggacgacccacggcaatccacccgcccgctggaccgcttcgagggcgatacggaccgggtctggggcacctatacccagtacttcggcgcggtcgggccgttcgactcggtggagttcagctggaccaacttcgcccacaacagctatcgcaacttcgtcgtcggcctgccattcaccccggatgcgcagcccgtgaccaagcaggacggcccgcgcgacttcaaggtctggggcagcgagccgcgcctgagcatgagcatcgacggcgatagcatcggccagacctggctgctcggggcgcgctacgtgaaggaggacatcgactaccgggtcgaccggcagaacctgaacagtggcgtcaccagcgtgttccgcgactggagcttcgacaacgatgccaaggccttctacctgagcaacgccatcagcctgctcgaccatcgcctgaccatcactcccggggtgcgctacgaaaacgcgacgatggactactccgacagcgtcaccggtttccagcgcaccaacaaggccaaggagtggttgcccggcctgaccgtaggcttccaggccaccgaggaatggttcgtctacgccaacgcccagcgctccctgcgcccgccgcaggtcacgcagatcgtcaaggagggcgcggtggatgcggagatcgcctggaactacgagaccggcgtgcgctacaccccctggaacggcctgcgggtggacttcggcctgtaccgcatcgatttcgacgaccagatcgaatacaacgccagcaccgaccgcttcgtgaacctcggcagcacccgccaccaggggatcgagacggagatattctggtcgcccgaagccatccgcggcctggaactgcatgccggctatgcctacctggacgccgagcagcgcagcggccagtacgcggacaacgaagtgccctacgcttccaggcaccaggtcattctcgacggacgctatcgcttcgccgagttctggacctatagcctggacggcctctacgtcagcaagagcttcaccgacgccgccaacagtcatgcagagaacgccacggcctcggtcggcgagctgccgtcttactggctgtggaacaccgccatcgagcgggaattcaagttcgccaacaagagcctgctgaccgcctccgccggcatcagcaacctcttcgaccgccagtattactaccgcggtatcgataccagcccgtggggccgccagccggcgccaggacggaccttcacggtcggtctcaactaccgcttctaa

SEQ ID NO: 345213 - DNA, 771 bp, Pseudomonas aeruginosa
atgatccggccttcacctgtccaggcaagactgaacgacggcgaatgcgtctacggcttgctcaattcggtaccctcccccctgctctgcgaaatgatcgccctcgccggctatcacttcgtgatcctcgacatggagcacctgctgcgctccggcgacgacctgatgcactgcctgcgcgcctgcgagtcggctggaatctcgccctggctgcggatccccgaagtggacgccaagctcatcggccgcgcgctggatgccggcgtcgaggcgatagtcctgccgcgggtggaaagcgccgccgaggtcgcgcgggccatcgaggccgcgttcttcccgccgctcggccgccgtggcatcaccggcggccgggtcaccggcttcggtcgcctgtccctggcggactacatcgaactggcgaaccgggcccggccgatcgttccgatgatcgagagcgccgccggcctgcgcgcgctgccggaaatcctccagttgcccggcgtcggcatgctcctggaaggcgccctcgacctggcgctcgacctgggactcggtcccgaacccctgcatccgcgggtctggcaggccctgcaggaaatggccgaggcctgccgggcgaccggcgtaccgttctgcgccaacccgcgtacgcccgagcagcgccgtcactggcaggccgccggcatccgcgcctttctcgccggcgaagaccgcggcctgctccaggcggccctgaagaaccgcctgggcgagttgcaatccaccccctga

SEQ ID NO: 345214 - DNA, 1797 bp, Pseudomonas aeruginosa
ttgaacaagctcaatgctgaaaccgaccgccgccgggcggaggcagaagcccagcgtcaagcagaagcggaagccaaacgcaaagccgaagaagcggcacgcctggaagcccagcaggtcactcaacagctcggtgccgacttcaacgcgatcaccgctccgaccgccaccaaggtccagcagcgtgtgcaagccgtggatacaagtctggcccagatttccagccagatcagtagtgcagtcgcctcggcaacccaggcggtgcaggtcaagacaacgcaagcccagcaacaagccaacagccagatttcgaccagcgcgaacctgatcagcgcggcatttcggaatcagattgccttggcagcacaggccagtggagaagcccaggtcacggctttcaacaccaaagtcaaccagatcgtcaacgaagccacggcgttttcgacagcacgaaaacaagcgctggctcagtttgcgaccaatgcggccgccgaggtcgaaaccgaggtcaacaggctaaccgcccaggtcaaggccagccccaccaaggcagcttcgcaagctgcacaagcaacccttcgacagttcactgaaagcacctatgccaaagtgaatacctttgcccagcagaccgaagcagcgctgcaggctaaggcaaaagaggtcgcagcagaggtagccgaagcacagcgtgcggcgaccaacgatctgcaaaaaacagccgatggagtaccaggtcagatcatccaggctgcgaacaccttggcgatgccagctacctctgcgccgctggtttcggtggccgggtttggtagtgcggcagtggagacggctcgcctggcggcttccctaacgaatgctgtcaatcgtttggttcagattgctggtagtggtcctggcgcatacgttgccgccttcgcggtgctgtcgctgtattccgaccaggctggtaaagacagtgacaaggttcctgccggcgttcgtaatgcattggcattggaggcatccgctctgggtcttcctggcacggctgatttgcaaagcgctgccaaggcaggtgggacggttgatatgccggtacgactcacgagtgctgcacaagagagcccgagtggtaagtcgcagattgccgcggtgctgaccaacggggcaactgtccccaaaggcgtgcctgttcgtgccgcgaccctcaatactgcgacaggccggtatgaggtgacggttcccgcaaagtccaccgtgccgaatacacccccgctgaccttgacctggactcctgttacccctccaggaagccagaacccctcaagcaccactccggtcgtgccgcagccggttccggtgtatgagggcgcaacgatcaccccagtacaggccgagccggagtcctatccgggagtgccgttgagcctggatgatttgatcgtgattttcccggcggattctggagtaaaacctgtttatgtaatgctcagtagtcctcttgatagtggtatattcacgagaaagcagctgcttaagaaatatcaaagtcatgccgatgactttggcttcgccggcagaaatgcaaataacaccaccttgacggagttcagagataaaattctggaacaccttagctcaccttcaactatcgaaaaaggtgtttatcatagatatcaaggatccaaggtattttacaatcctgacactaaaattgtggttgttctcaaagaggatggaatgtttttgtcagggtggtatcttgaaccaggaagcaaacaggaaaaaaactaccttgagaatgaggtgctttaa

SEQ ID NO: 345215 - DNA, 1170 bp, Pseudomonas aeruginosa
atgattccagacatcgattcccgtctcagccggaacatattgaaatccatctcgtatggcctccccctcgccgaagtggtccccgaccatacctatgcgcaactggaaacgcgcctcggcgaactgaaacgcaggtatctggagctgcgcatctcccacggcgcgcgcgagctgccgttcagcaactacctgttctacctgatcctccagtcgcgccaccaggagttcgacttcaagctgcgccagggcaattcggtggtcaccaacatccaccggttcaagagcaagggacgcatcccgtccctgaccaccctgctcctggccgatgcggtcaacgccaggagcgagctggagctcaagcatccggacatcccgcagctcgaccgccacgcccgcgacatcgagcgctggctggccgccggcaacgtcatgccgcccagcgagcgggcgctgcgcggcctggtggcggcgctggagcgcgccgtcggcgaaggccgtccgttgcacctggtgagcgcggtatgcccggactactcgcactccagcgatgccgagggcaagccgcgctacaccttcgaacgggtcggcgaccagcccggcctggccggcgccaagctgatcagcgccggccaggcggtggcggagctggccagggcgcgccaggtggagatccgccacgcgatcctcggcggcgagttcgagtacctgtcgttcaaccgcaatcccgccaccggcgagacccgcgagggtttcctcggcaaggtcgaacgccagctcgagcggatcgccggggcgctgccctgcccggccgcgacctgctcgttcttcgagatgtgcggcggcgaggacggctggcaccgggcccacggcgagatcgtccagcgcctggaacagggcgactacggccagaccgggctggactacccggccctggaatcgatcttcctgtcgcgcctgccgctctacgagaaatggttcgccagccagtcgcgcgagcagatccgggccagcttcgtctcccaggccgccgagtacgcattgatgggaaaactcttcggcgagcgcttcgacaacttcgtcgtgctggccgtcgatcactaccggatggagccgttctactcgttcttcgcgaccgtcccgacgctctacatccgaaccgactacctgtaa

SEQ ID NO: 345216 - DNA, 390 bp, Pseudomonas aeruginosa
gtgagcggactcgcgcagcgctccgacgacacgtggctggcggcgctaccggccgcggtgctctacggtgcctgggcagcctatgccaaccaggacggcggcctggcgcgaatgggtgtcgccgccctgctccagggtggcgccagcctcctggcaacgcgcctgggcctgcacctgctgggccgtttcggtggtcgcggcggcctgacgcaacgtcacgcaccgctattggtggcgctcctgctgaccacgccgatggccgcgctgcacgggcttgcgggcgcgccgcacccattggcgagcgtggcgccgtcgttcgtcatcggctggctgtatttcggtttctgggcgcgccgcaacccgggccaccggcaagccggtggcgcctag

SEQ ID NO: 345217 - DNA, 534 bp, Pseudomonas aeruginosa
atgagcgaaccgacgattcgccgcctggcggccgaggaggccctggcgcgcctggacgagttggccgaggtgctgctggattgcgtcgaagggggggcttcggtcagcttcatgtggccgttgccgcgggaacaggccagcgccttctggcgcggcgtcgccgagggcgtggcgcgcggcgagcgcctgctgctggtggcggaggcgggcggaaccatcgtcggcagcgtgcagttgctcctggcgcagccaccgaaccagccgcatcgcgccgatgtggcgaagctgctggtgcaccggcgggcacgccgacgcggcctcgccgaggcgctgatgggcgaactggaccggctcgccgtggagcacggcaagtccctgctggtgctggatacggtcagcggcagcggcgccgagcggttgtacctgaaggtcggctggacgcgggtcggcgaaatcccggactacgccctgatgccggacggcgcgctctgtccgaccacctatttctacaagcgcctggcggccaccgcctga

SEQ ID NO: 345218 - DNA, 552 bp, Pseudomonas aeruginosa
atggacctcgatgaactgatcgcccgacgcctctccacgctgcgcagtgagcgccgtctgaccctcgcccagctggcggaacgcagcgcggtgagcaaggcgatgatctcgcgcatcgaacgcaacgaaagcagtcccaccgccagcgtgctcggccgtctcgccgggggcctgggggtcgccctttccgagctgctcggcgacacgcaggcgccggccgccccgctctgccggcgcgaccggcaggaggtctgggaagacccggccagcggctaccgccgccgccaggtgggtgcgcgcgacccgcacagcggctgcgagatggtcgaagtggaaatcccggcggatacccgcctcgactatccgcgctggggcggccggccctaccggcagcgcttgtggctgctcgaaggcaccctggaaattggctacggcgagcagcgcttcatgctggagcacggcgaccgcctggacttcggcgtcgaccgcgcggtgaccttcgtcaccgccggacaaccctgccgctacctgctggtgattctccacgactag

SEQ ID NO: 345219 - DNA, 399 bp, Pseudomonas aeruginosa
atgcatggaattctcagtcccggggcctgggcgttcatcgcctacgtccttggcgcggtcgccctttgcctggtcatgctgggcttgggccgggttctgggcggccgctcgcatggccgggcgaagaacctgccgttcgagtccggggtggactccaccggctctgcgcgcctgcgcttcccggtcaagtacgccctggtggcgatgctcttcgtgatcttcggcatcgagatgccattcctctatctctgggcggtatcggtgcgggagaacggctgggcgggcttcgtcgaggcggcgctgttcgtctccctgctcctggccgggttgttctacctgcaccgggtcggcgccctcgactggtcgccggagcgtcggcggagaaagccgcgcgactag

SEQ ID NO: 345220 - DNA, 150 bp, Pseudomonas aeruginosa
atgaatcacgatttctcccctgcccaggacatcgacctgtccggcctgatccatggctttcgccccggcgaaccggggcgggaagtcgactccgccctcgcctgcctgcgacaggcccgggacccggacgtgtttctgagcgccggctga

SEQ ID NO: 345221 - DNA, 801 bp, Pseudomonas aeruginosa
atgccggcgcgcgacttcgagctgctgcccgcgcatctggcgggggtggaggcggtcgccgcggaaagcctgcaccgtttcccccggcattcccacgcacagtacggtatcggtctggtcgaggccggcgcgcagaagtccctgagcgggcgcggcatggtcgaggccgaggctggcgacctgatcaccgtcaaccccggcgaagtgcatgacggcagtccgctgggcgggcgggcgcgacgctggcggatgctctacctggagccggcgttgctggccgaagcctgcgccggtatcgacgagcgttcggcgagcccggcggaattcaccctcccggtactgcgcgcgccgaggctggcggcagtgttccgccaggcgttcacggcactgaccgaaacactgggcgacgcccagtcgctggccatcgaggaatcgctggtcggcctgctggcggagatcgtcgtaccttcctgccagccgccggcggacatccgcatccagcctctgcgcgagcggatcgacgacgatccgctggcgcccctgagtcttgccgaactggccagcatcgccggcctcagccgctaccaggtgctgcgtgccttctcccgcgccaccggtctcacgccctacgcctacctgctgcaacgccggctggagcgcgcccgtggcctgctcggcacggaccagccgctggccgacatcgccctggcctgtggcttcgccgaccagagccacctgacccggctgttcgcccgcctctatggcatctcgcccgggcgctacgcccggccccggcgctga

SEQ ID NO: 345222 - DNA, 885 bp, Pseudomonas aeruginosa
atgtcctcccgtcacctcgcccaggcctgcctggcactggccatgctgctggtcggcagcacggtggtggtcagcaagctgctggcccacgccctcgaccccttcctcgccaccgccctgcgcctggccctcgccctgccctgcttcctcatcctgctgcgcctgtccggccagcgctggccgcgcctgggagcgcgcgacggatgcttgctgctggcgcaggcggcggccggcagtgtcggctatacggtgctgctgatcgtcggcctccgttacacctcggccgccgacgccggggtgatcctcggcgccctgccgctggtggcggcctcgctgtcgatcctgctgctcggtgaacgtccgtcgcgccgtttgctggcggccctggcgctggcttcggccggggtggcggcaatcaccctggagcccggcggcccgcgcggcgcctggctgggcaacctgctggtgctgctggcggtgggctgcgaggcgctgttcatcctgctcaacaaggcgctgcgcacggctgtgccagcgctgccgctgtccaccgcgatgagcgccctcggcctgctgttgagcctgccgctggcgctgcccgccctgcccggcctcgccacggttccgctgtcggcgctgctcgcggtgctctactacgcgctgctgccgacggtggccggtttcctgctctggtacgccggcgccagccgggtcagcgccagcgaagcttcgctgttcaccgcgctattgccggtcagcgcgctgctggcagcggcgctggccggcgaaaccgtgtcggtgcgccagttgtgtggtctcggctgcgtcctgctggccttgctggcggtcctgctgccgaacggccggcgcagggggcccggctga

SEQ ID NO: 345223 - DNA, 1257 bp, Pseudomonas aeruginosa
atgcaacacaaacgatcgcgtgccctggcgagctccagctcgccgtttctgctcgccgtgttggcgcttgccgtgagcggcgccgccagcgcccacgacgagggcctgccggcattccgctatacggcggaactgctcgagcggctgcaattgcccagcgtggccctgccgctgaacgacgacctgttcctctacggccgcgacgccgaggccttcgacctggaggcctacctggcgctgaacgcgccggcgttgcgcgacaggagcgagtacctggagcactggagcggctactacagcatcaacccgaaagtgctgctgacgctgatggtcatgcagtccggcccgctcggcgcgccggacccgcaggccctggcggcgccgctggggcgcctgtcggcgaagcagggcttcgaggcccaggtacgcgatgtgctgcagcagttgtcgcggcgctactacggcttcgaggagtaccggttgcgccaggcggcagccgccggcaccgttgccgagaacggcctgaacccggcttccgccgcgctgctggggctgctgttgcaggacacggcgaaagccgacgccaatggcggtcatccgctgggcgcctatgccgagaccttccagcggcttttcggcaccccgtcccaggcgctgctgcagccgcgcaaccgtgcggcccgccagctgcaggcgaaggccgcgctggtgccgccggccaacctgatgcagttgccatggcggcagggctactcctggcagccgaatggcgcgcattcgaacagcggctcgggctatccgctgtcgtccatcgacgcctcctacgactggccgcgctggggcagcccgacctacagcgtggtcgccgcccatgccggcacggtgcgggtgctgtcgcgctgtcaggtgcgggtcacccatcccagcggctgggcgaccaactactaccacatggaccggatccaggtgagcaatggccagcaggtcagcgccgacaccaagctcgggatctatgccagcgatatcaacaccgcactctgcgagggcggcagctcgaccggaccgcatctgcacttctcgctgctgtacaacggtgccttcgtgtcgctgcaaggcgtcaacctcggcccctatcggatcaatgtcggcagcggcaactacgacaacgactgccggcgtttctatctctacaaccagagcgccggcaccacccattgcgccttccgcccgctgtacaaccccggcctggccttctga

SEQ ID NO: 345224 - DNA, 2310 bp, Pseudomonas aeruginosa
atgccacgttgtagtacccgttccgccctccgtctgtcttcgctgttcctgctgctggcgctcgtcactcccggcctggcggcgacggcgcatccggcgcctgccgccactgccgccgcgcaggaggaagagcagtggacgatcaacatgaaggaggccgagctcggcgacttcatcgagcaggtctcggccatcagtggccagactttcatcgtcgatccgcgagtgaagggtcgggtcacggtggtttcccaggcgcggctgaacctggcggaggtctaccagctgttcctttcggtgctggccactcatggctacgcggtgctgccccaggacgggcaggcgcgcatcgtaccgaacatggaggggcgccaggacgccgccggtggcggcgtccacgtcgggccgggcagcctggagacgcgggtgatccaggcccggcagacctcggtggtggagctgatcccgatgatccgtccgctggtcccggcccacggccatctcgcggcggtaccctcggccaacgcgctgatcgtcagcgaccggcgcgccaacatcgagcgcatcgagtcgatcgtgcgcagcctcgaccaggccggcgagcacgactacagcatctacgacctgcgccatgcctgggtcgcggaaatcgccgaggtgctcgaccaaagcgtcacccccgccgccggaaagaacgccgccaccgtccaggtcctcgccgacagccgcagcaaccgcctggtcctgctcggcccgccacaggcgcgggcccggctgttgcgcctggcgcagtcgctggacgtgccatcgtcgcgctcgaccaacagccgggtgatccgcctgcgccatggcgacgccaagaccatcgccagcaccctgggagagatcggcgagtcgctgcgggaaggcggggatcagggacagcggcgcagcggcaagcgcggcgcgctggtgcgtgccgacgaatcgctgaatgcgctggtgatcctcgccgatccgcaggaggtcggattgttcgaggagatcgtccgccaactcgacgtgccgcgcgcgcagttgctggtggaggcggcgatcgtcgaactgaccggcgaactcaacgaggcgctcggcgtgcaatgggccatgcgcggcgggcatgccgtcggcggcaccagcttcgccggcagcggactgtccatcggcacgctgctcggtgcgctgcagagcggcaagccaccagccgaactaccggatggcgccatcgtcggccttggcagccgcgacttcggcgcgctgatcaccgcgctgacccgcaacagcaacagcaacctgctgtcgaccccgagcctgctgaccctggacaaccagaaggcggagatcctggtcgggcagaatgtaccgttccagaccggttcctacaccaccaacagcgaaggatcgagcaaccccttcaccactgtcgagcgcaaggacatcggagtgaccctgaaggtgaccccgcatatcggcgacgaccgcatgctgcgcctggaaatagagcaggagatctcctcgatcgcgccagcggccacgctggcggccaagacggtggacctggtgaccaacaagcgctcgatcaagagcacggtgcttgccgacgacggccaggtgatcgtgcttggcgggctgatccaggacgacgtggtgcgcagcgactcgcgggtgcccctgctcggcgacattcccggggtcggccggctgtttcgttcgacccgggacacccgggtgaagcgcaacctgatggtcttcctgcgcccgagcatcgtccgcgacgccgtcggcctggcacgggtcagccagggccgctaccgttccatccaggtattgcgcggcgcctcgactcccttgttcgacgccgccccggccatcgacctgcgccccgccgcgcaggccctgccggcgcttcccgagtcgccgcgcggctacccggagccggccccggtgctgatggagaagccgcgcctggcggacccggcgagcctgggcagcggccgtggcggcgaggtgctggaggtgcgcgagagcgagccctcggcggcgccagcgcggcgttacacggtgcgcctgatcgagggtagcagcgaggcgttcatgcgggcgctgatcgaacgccacgcggggctggccttgcgcctgcgccgcgagaagcgcgacgacggcgagtggttcgccgtggagcagggcgatttcgccgatccgcggcaggcgcagcgggccctggccggattgccggagagcctgccgcgggccagggcgcgggtggtagcgcgcacccaggaaaggctgtga

SEQ ID NO: 345225 - DNA, 558 bp, Pseudomonas aeruginosa
atgctcgccgcccctgggcgagccgcgccgttgcagcatgcccgtctgccggaacccgtctgctgcatgtcgcgtcatttcccatcgtttcccattgccccgcgtggcctgtccaggcaggtgcccgccgcgctctgcgtgctgctgctggcgttgctcagcgccagcctggccagccaggcgcgggccctgcgccatgaactgggcgcgttgcccgccgcgttgcccgtggcacccgcgcgcgcgtcggtgccggcttcgcgcgcggcgctcgccaggttgttcggcgcggccccgccgccacgcggcgcgcccgccggcgagcgcctgcaattgcgcctgctggcctgcttcctggcgcgtcgcgcggatcgttcggcggcgctgatcgcggtggccgggcgctcgcagcgcttcctggcgggcgccgaaatgcgccccggcaccgtgctgctggcggtctatcgcgaccacgtggtgctacgcgaccagggtcatgaagaacgtctgtatttccccaaagccggaagggcagaagccacccatgccacgttgtag

SEQ ID NO: 345226 - DNA, 210 bp, Pseudomonas aeruginosa
atggcttccgcccccgacgctactccccaggcccctaccaccgacgacgccccggcccctgccgcgccgagcgacgccagcgcgctgctgaaagccgccctggcgaagaagaaccaggcccagctctatccgcagcacagggtccacgacaagggccagcgccccggcatggcgccgcgcggcacccgtcgttcgatgggcaaacgctga

SEQ ID NO: 345227 - DNA, 822 bp, Pseudomonas aeruginosa
gtgaacgagcgcctcgacttctcgccctatctcgaacgctgggcgctgcaacccgacggcgcgcccttcgccacccacagcagccatctgctgccggtccgccatcgcggcgcgccggcgatgctgaagatcgcctgcgcggaggaggaacgcttcggccacgtgctgctcaactggtgggacggccagggcgccgcgcgagtgctggcccatgacgaacaggcgctgctgatggagcgtgccaccggcacgcgctcgctgctgcagatggtcgagcgcggcgaggacgaacaggcgacgcgcatcctctgccaggccatcgagcgtatccacgtgccgcgcccggggccgctgccggaactggtcccgctggagcgctggttcgactcgctgtacgccgccgagcgccgctacggcgggctctacgtcgacgcagcggacgccgcccgccacctgctggcgaccgcccgcgagcagcgcccgctgcacggcgacatccaccacggcaatgtgctcgacttcggcgcgcgcggctggctggtgatcgatcccaagcgcctctacggcgaacgcggctacgactacgccaacctgttcaccaaccccgacgcgaagaccgcccaggcgcccggtcgcttcgggcgccagctggacatcgtcgtcgccgccagtggcctggagcgacaccggctgctgctgtggatcctggcctgggccggcctttcggcggcctggttcgacgaggatggtagccacgaggagaccgcagccgagttggtcatcgcccgcctggcactcgacagcctgttccgcgaggcctga

SEQ ID NO: 345228 - DNA, 861 bp, Pseudomonas aeruginosa
atgagcgaacagcgacagaccttgccggcgcaacaccaggaccagcgccccggccacgaaagcgagatgcggccgaagccggagttcgtttccggcgactaccatccggcggccaagctggagggcaaggtgaccctggtcaccggcggcgacagcggcatcggccgcgcggtggcggtgaccttcgcccgcgagaaggcggacgtggtgctggtctacctggaagagaacgaggacgcggcgaagacccgcgaaatcatcgaatcgctcggccgccagtgcctggtgttcgccggcgacgtcgccgacgccggcttctgccgccaggtggtggacacggtgcggcagaaatgggggcgcctcgacgtgctggtcaacaatgccggcgagcagcatccacaggcgcgcctggaggacatcagcgaggaccagtgggagaagaccttccgcaccaatatcttcggcatgttccagctgaccaaggcggcgctgccgctgatgggcaagggcgcggcgatcatcaataccacctcgatcaccgcctacaagggcaacccgcaactgatcgactattcctcgaccaagggcgcgatcacctcgttcacccgctcgctgtcgatgaacctggtcaaccgtggcatccgcgtcaacgcggtggcgccggggccgatctggacgccgctgatcccgtccaccttcagcgccgagaaggtcgcgcagttcggcgcggacaccccgatgggccgccccgggcagccggaggaactggccgccagctacgtgtacctggcctgcaacgactcgtcctacgtcagcggacaggtcctgcacgtcaatggtggtaccgtggtcaacggttga

SEQ ID NO: 345229 - DNA, 189 bp, Pseudomonas aeruginosa
atgcaggcattcgtggttcatttccgtgacgccggccagcccggccggaccgtcctcaccacctttgcgtcgactctcagcgccagcgaggcgcatgcccgcctgcagctgtgctatcccctgctctttccgcaacacctgagcgcggtgcaggtctttcccctgctgccggccgccgcgcccgcctga

SEQ ID NO: 345230 - DNA, 234 bp, Pseudomonas aeruginosa
atgaccatgctttccctgcgccagatcgaacgaatcctcaatgccaatgcctgttcctcgcatttccactgccgcaaggccgccgatggcggtctcacgattaccgtcgcccgcgccgatcgtcccggcgaggccaccaccgtcgccggggtcagccccgaggaatgctgttgcgaacgttcgctgcgcgaactggcgcgcgagctggagcgcagcttcactactggcgaatga

SEQ ID NO: 345231 - DNA, 288 bp, Pseudomonas aeruginosa
atgaaacgcgactgggggttgatccgcgacctgctggaacacctggaaagcctcgacttcggccagcactgggaggcccgcgagctacccggccattcccgcgaggtggtggcctaccatctccagctgctcagccaggcggcgctgatcgccggcagcctgcagcattcctggaccgggcaggagcaatgggtggcccaccacctcaccctggccggccacgacctgctcgaccgcctgcgccaggagccggtggcggctgccgtcccggtacgcaagcgcgcctga

SEQ ID NO: 345232 - DNA, 2439 bp, Pseudomonas aeruginosa
atgcccgacagccaagagcagaccgcgagcgcggtccataccctgaaagccagcatcctcgccaagctgcgctacagcgtcggccgcgatccctccaccgcctgcccgcacgactggttcgaagcggtggcgctggcggtccgcgaccacatcatcgatcactgggaagaggccaccccgcagggccaggcgcccgcgcgcaagcgggtctactacctgtccctggagttcctcatcggtcgcctgctgctggacaacctcggcaacctcgggctgctcgaggagacccgccaggccctcgccgaactcggcgtcgacctgcagcggatcgtcaccctggagcccgacgcggcgctcggcaacggcggcctcggacgcctggcggcgtgcttcatggaaagcatggccagcctcgacatacccgcccacggctacggtatccgttacgaacacgggctgttccgccaggtgctcaccgacggctggcagcaggagcagaccgaaacctggctggacttcggcaacccctgggagttcgagcgcccggaggtcagctactacatcgacttcggcggcagcgtgcaggtcgacagcgagcacagcggtcgcgccatctggcggccggacgagcggatccgggcgatcgcctacgacaccccgatcgtcggctggcggcgcgccagcgtgaacaccctgcgcctgtggcgcgcccgcgccgaggaagacctgcaactggaccgcttcaacgccggcgaccatatcggcgcggtggtcgacgtggtcaaggccgagagcatctcgcgggtgctgtatccggccgacagcaccgaggccggccaggagctgcgcctgcgccaggagtacttcttcgtttccgcctcgctacaggacctgctggatcgccacctgcgccgccacgcagacctgcgcagcctgccggaacaggtggcgatccagctcaacgacacccacccggcgatcgccgtcgccgagctgatgcggctgctggtggacgtgcaccagctggcctggccggacgcctgggcgttgagcgtggcgagcctgtcctacaccaaccacacgctgctgccggaggcgctcgaatcctggccggtggcgctgatggagcgcctgctgccgcggcacatgcagatcatctacctgatcaacgccttccatatcgatgcgctgcgcgcccaggacatccacgacttcgacctgctgcgctcggtcagcctgatcgaggagggtcatggccggcgagtgcgcatgggcaacctggcgttcctcggttcgcaccagatcaacggggtgtcggcgctgcacaccgagctgatgcgcgaaaccgtgttccgcgacctgcaccacctgtacccgcagcgcatcagcaacaagaccaacggcgtgtcgttccgccgctggctgttccaggccaatccggaactgaccgggctactggtggagaccctcggcgcggacctgctggacaccccggagcggcgcctgcccgatctcgaggcgcatgtcgaggacgccaggctgcgcagccgcttcgccgagcagcgacgccacaacaagaccgccctggcgcgcctggtgctggatacccttggcgttgcgatcgaagcggaagcgctgttcgacgtgcacatcaagcgcatccacgagtacaagcggcagttgctcaacctgttgcacaccgtcgcgctgtaccaggaaatccgcaacgatccgaccgccgaccgcgtgccgcgggtgaagatcttcgccggcaaggccgccgccagctaccaccaggccaagctgatcatcaagctggccaacgacatcgcccgcaccatcaacgacgacccgaccgtgcgcggcctgctcaagctggtgttcctgcccaactacaacgtcagcctggccgaggcgatcattccggcggcggacctctccgaacagatttccaccgccgggctggaagcctccggcaccagcaacatgaagttcgccctcaacggcgcgctgaccatcggcaccctggatggcgccaacgtcgagatgagccagcggatcggcctggaacacatgttcatcttcggcctcagcgcccagcaggtggagcagcgccggcaggccggggaactgggaatgggcggggtgatcgcggcttcgccgcgcctggaggaggccctggaagcgatccgcagcgggttgttttcggccgacgatcgcagccgctacgaagggctggtggacggcctggtgcatgacgaccgcttcatgctctgcgccgacttcgaggactactggcaggcccagtgcagggtcgaggaggtgtggcgcgagcccgaccgctggtggcgctcggcactgctcaacgtggcgcggatcggctggttcagcgccgaccggacgatcagcgaatacgcccgggaaatctggaagctgtga

SEQ ID NO: 345233 - DNA, 165 bp, Pseudomonas aeruginosa
atgaaaccctacgagcatcccgtctacagagaccccgtggtgagcaacgaagagcccggccgcgattgccatgaatggaatttcgagccgggcgacagcgatcaggagccctatcccatatatcatggaaaggacgccgaagagacggcgggaggaatcccataa

SEQ ID NO: 345234 - DNA, 135 bp, Pseudomonas aeruginosa
atgaccttgcgttgcctgatcgtcggctgcgactggtgccggcaaccggcgttgctgctgggtgaggaagccttcgactgcgagcgctgccagcgttgcggcgccctgcgctacagcgggatgcgccgtcgatga

SEQ ID NO: 345235 - DNA, 306 bp, Pseudomonas aeruginosa
atgagcgccgacgaaaaacgcatacgagagttcgcctaccagatctgggaatccgagggtcgacccgaaggccaggccgagcgccactgggccatggcccggcaactggccgaggcggaagccgcggcgcccgcgccgaagaagccgcgcgcgcgggccaggcccggcgaggagactcccgccctgctccagccgccggcggccaagccgcgcaagccgagggccgccgcgccggcgcgaccggccagcgagaaaccggcggcggccaagccgcgcagccgccgcaagcccgaagcgggcgaataa

SEQ ID NO: 345236 - DNA, 177 bp, Pseudomonas aeruginosa
atgcgtctttccacttctgcacccgatgcgataacagccaccccacgcaacccttcccaggacccggacgaatacccggttcccgatcgggagagccacgtcccgcaggaattcccggaagaagtaccgatggagcaaccgagcgaagaacctctttcgcccatgccggagcgctga

SEQ ID NO: 345237 - DNA, 222 bp, Pseudomonas aeruginosa
atggccggccacctgttcctgatcagctacatactcgacgaccagccgatgaccaccgagctgcacagcgaggcgccgaccctcacccgcgaggacgcgcgccgccacctggaggcgctgcatcgtccgcgggacgccagggcgctcagcgacatccaggtcagcaaggtggagcggacccacgaagcggggaccactccgggacattaccagcagccctga

SEQ ID NO: 345238 - DNA, 264 bp, Pseudomonas aeruginosa
atgaacctttcctacctgtacctgaagaagatcctcgaggaggaattgcgcgaccacgactgccaatgccagctgaacgccgatttcaccgtgaccatcagctgccgcgtggacggcacccgcggcgcgctctacatagtgcccaactgcgatttcctgcagagcagcagcttcagcgatctcagcgccttcgtcctcgagctgcgcgaggaaatccgtcgcttcggcgaactcgaggccgagttgaagaccggaaccggctga

SEQ ID NO: 345239 - DNA, 339 bp, Pseudomonas aeruginosa
atgtccggacccgatgcgctcagccaggcttgcgctacgctgctcctggcactggccttcagcgccttcatcctgttcgtccgtggctaccggccggcgggcgtccgggccgcctggtacgacctggtcctggccttcatcgccgtgtggctgggcttctggccggaagccggggtgctggcgaacgcgccgaacctggacaacgccctcggcctggccctgcaggtcggcgcgaccgtcggcgggtgcgtgctgggctatggggtggcgaaagggttgcggcgggcgatgcgggaaacccggcggaaaagatcggcttcttcgccgtcgaaccgctga

SEQ ID NO: 345240 - DNA, 1380 bp, Pseudomonas aeruginosa
atgagcctgtcctcgcccctccctgccaccactgcaaacccgtcgccccgggtccgcgagctgtaccatgccctgctcgaggcgccgcaggaccatctcgacgccgccggcgtgttcctcgaccagcagctgggcctggccgccacccgcgacgacgacctgccggaacaccccgaggcctggcccgcctggctcgaagccggcgcccggcgcaccgccgaggcccatgtcgagtacctcaaggcgcgtcgacgcggcgaaggccggcgctatttccgcgtgccgtcgcaggcgatgcatttcatccgcagcgtggcgccgaccaagctggtcgatggcgcctggctctacgggctgttgccgcatcacgccgacgaacgcctgcgtccgctgttgcagaccttcctcgaggagctcggtgacggggttccggcgcgcaaccatgtgctgctctaccggcgcctgctggccagcatcggcagcgaggaggccgagggtctcagcgacctgcactacctgcagggcacccagcaactcgccctcggtcacctggcggcggactacctgccggaggtgatcggctacaacctgggctacgagcaaccgccgctgcacctgctgatcaccacccacgaactgcgcgaactgggtttggacccctattacttccagctccacgtcaccatcgacaatgccgccagcgggcatgcgcgcaaggccctgcgcgcgctgttcgacaacctgccgcagctcggcgggcgcgaagccttcctcgagcgggtgcgcaacggctatcgactcaacgacgtcggcctgagtagcacgcagataatcgacggtttcgatctggaggaggaactgcaagccatgctcgaacgcaagcgcgtctatgcggcgggcatgcattcggatcgctgccggatcggcgggcgcacggtgaaccagtggcttgcggtgcccggaaggattccggcgttcctcgcctgtctgcaggaggaaggctggatcaggcgcaacgccgatccgcgtggcagtcgcttctgggcgctggtggacggcgatcgggcggcgatgttcggggtcttcagcgtctacgagcggcagttgctgcacgactggatcgccggcgactggcaggcaccgccgcgcgccgccgacaccgtcccggcagcgctggcggaacccgcgctgccggtcggtggcgaggtggaggccgagcaggtcgcgctgcgccgcgaactcctgcgtctgacgcccgagcagggcgtcacccgcctgctgcaactgatggccccgcacctccaccaccgccccgccggcctgctcgccacgcggctgttcagccaacgctggagggccgcccatgcccagcctgaatga

SEQ ID NO: 345241 - DNA, 1137 bp, Pseudomonas aeruginosa
atgattgattcccgggccgaccacggccttcgcttcggcatcgaggaggaattcttcctgctcgacgccaccgacctggatatcgcccgcacggcaccctccggattcctcgaggcctgtcgcgccgccctcggcgagcatttcgccgaagaaatgttcgaatgccaggtcgaggtcgccagcccggtgttcgccgacctggcgcaagccgcgcgcttccatggccgggcccgccagcgcctggcgcagctggccgccggcttcggcctgcgtgcgctgtgcgtcggcacgcatcccttcgccgactggcggcgggcgcggagcaacccggcggcgcacttcgcccgcctgttcgaggaccaggggcgggtggcccggcgcagcctggtctgcggcctgcacgtgcacgtcgagattcccgcgagccacgaccgcatggtcgtgctccagcaggtcctgccctggctgccgctgctgctggcgttgagcgcgtcgtcgccgttccgcggcggccgccacagcggtctggcgagctaccgccgggcgctgtgcggcgagtggccgaggatgaacatccctcccgccttgcccgacgaggacgcctaccgccggcacctggcgctgctgcgcgagagcggctgcatccgcgaggatggccaggtgtggtggatggtccggccatcctcccacgttcccaccctggagttgcgcatctgcgacgcctgcccgcggctggccgacgcgctctgcctggccgggctgttcagggcgctggtggggcaagcgctgctggccggcgatgcgcctgccggaccggtcgcccgcgacgcctgcctggaagaaaactactggcaggcgatgcgccacggttgcgccggacgctatctcgtcgacggccgctgcgtgaacgccagggactggctggagagggcctggcggcaatgccacccgcaggcccgccagggcaacgagtgggcctatggccacgcccagcgattgctcgaggaaaactccgccgatcgccagttgcagcgctaccaggcgttgcgcgccgagggccgtgagcggcaggcggcgctgcggcggctcgtggaggaactgctggaggaaaacctccaggcgctgcccgcgatctag

SEQ ID NO: 345242 - DNA, 1395 bp, Pseudomonas aeruginosa
gtggaagtgcaccttgacccggccgtactggtcggtccagatctcctcgcccttgggcccgaccaccaccgcggtctgcgggccgcgcaccaccggcaccggcgtcagcggcaacggccggaacggctgggcggcatcgatgcagtccagttcgctctcgaactgcgctccggcgccgccattgccggtttcgagaagttcctggaccacccggtattccgccgccaccaccaggtactcgcggttctggtcgagccgcggatagttgctcaggtggaacaggtgcccggagccgatgcccctggcgcaaccgcgcaggcgtacccgctcgtgttgggtctggatcgcttcgatgcgggtccgcgcgtagtgttcgccatcctggctctgcacgtattccccggggtagtcgtacagcgggtagtccgccgccgcatgggcgcgccccacgttggagcgcacctccaggcgggtgccgggacgctggaaatcgtagtcgttgaggctcagcgaaccgggctggacctcgcgcgccacgtgccagtcgaagaaatggtcgcgctcgcggtggccgagggtcggcgggtaataaggcacgctggcgtagccgaccgggctctggtgcgcgccgtaggcgtcggagaggaccaggatgtggcgcttcttctcgtggcggaaccagtagtagatgccctcctgctccatcagccggctgacgaagtcgaagctggtctcgcggtactgcacgcagtactcccactcgcggtaggggcgtgtcagggcatcctcgaagtcggagaagccgagatcgcggaacacctgcttgatgatgtccgggaccttctggttctggaaaatgcgacagtcggaggtgcgcgtgagcagccacagccagggccgcagggtgacctggtagctggcgaactggccgctgccggcaccctggctgcagcgcgcgacgatgccgtggaaatgccgccggatgccgccgggcaattccagtgccaggctcatcggcttgcccagcagggcgtccaggggcagggcgtgattgctcgaaaccagctcgagctcgtggttgaacagcctgcccaactcttcgcggccttccagccgttgcagttgcaggacctcggggcccaaaggggaatccacgtggaccaggcgggtatgttgggagaacagcatgggaaatcttccttgatagtcacctgcgatggacggttcgaacagcgcgtgccaccgacgcggcgaatgatcgtacaatcccgcgccgccgcgaaaggctggccattcgccacacccctgcccgcctcctgcggacccgccgaccctatgccagaaaaaaaaccgaggcaacggcggttttgtcgaaaagtatttccgccgccatga

SEQ ID NO: 345243 - DNA, 831 bp, Pseudomonas aeruginosa
atgccgaacagattccttcctttcgccctggccgccctggtcctgggcggctgcgcccacaaggaggcgggcgaacccgccccgtcgtcgtccctcgccgaggaccagagccgcatcgtcggcatctgggccatgctgccgctgcgcaacggcatcgccaacgtcgccgagtaccgggcggacggcaaggtgctgctgcaccccttcaactgcacgaagctcgacgaacgtcgggagatcgaaacgtccgactaccgggtggccgacgatggcggctccatccatgtcaggtcgcccttcgacgagttcgacctgcgggttctggacttcaagccccaggcgatgcgcctgggcatgcgcatcgccagcgccgagctgaccttcgattacctgaaggtggacagggtcgcctcgctgtgcgggatgtacaacacggacgccgagcgcggcaggctgacgccgtaccgcagcggcgacttcctccccgcgccggcgattcccccgcatgtcggcctggagcgctatatcggccgctgggcgaacgacgacggcgtacagctcgaagtgctccgcgacgcggacggcggcgcccgcctgtacatggccgacagcgataactggcggcacctctacaacgacgtgcgctgggtcggcgacgagctgcatttccgcagctacgcctacacggaaaagccggcgctgttcagccacccctaccacaagaccagcactgcgacgatcctgcggcccctggccgacgggacgatgcagatgtcgttcttcatcggcaagcggcgccacgacttccaggtgaggcgtgcgcaggactga

SEQ ID NO: 345244 - DNA, 639 bp, Pseudomonas aeruginosa
atggaagcggtctccgcctcgcagcacctggctgcactgttcgactcccaccagatcgagtacgtcgcgcacggcgaatgggtggcgcccaacgggcggctgccggcgatccgcgccacctggtacccgggggagaagaccggacggctggatgtcgacgtgctgctggaggacgagcgccagttgcaggaggccttcgccggcatcggtggcggcgaggagggtttgcaggacgcgttgcgcaatttctgctccaattccctgcatgtcctgctctcggttttctggggacatgccggggaggaccaggtgctggtggagacctgggagatcggcgagcggcgtttcgaggcgcacatcggcaacctcggcctgcgcggtgccgagggcaaggcgccagcgctgccggcggggctgttcccgggcatcgagcgggcgatccgcgccgagccgctggacccgcgcctgcactggttccggcatttcttctgcgccttcggcaaccagcgcacggtggaagcgctgttcgacaaccagccgtgggaggccggcatgcagagcctggccgctctcgactggcgggattcgcagggttactacagcgtgcgcaacttcctgatgctcaagccgctggcatag

SEQ ID NO: 345245 - DNA, 393 bp, Pseudomonas aeruginosa
atggaccgatacaccggcggttgcctctgcggccagctccgcctggtggcgagcggccagccctaccgggtcggcctctgccattgcctggactgccgcaagcaccacggcgcgctgttccacgcctcggcgatcttccccgaggacgcggtgcgcatcgagggcgaaagccgcgactacgccgggcgctgcttctgtccgcactgcggctcgtcggtgttctcgcgcagcgccgacgagatcgaggtcagcctcggcgccctcgacgcccccgaccggttccgccccacctatgaactctggactatccgccgcgagagctggctgccggcgtttccgctggcccgccattatgaaggggatcgcccgggcaacggacgcagtgaagaatga

SEQ ID NO: 345246 - DNA, 312 bp, Pseudomonas aeruginosa
atgaagttcaaaccccaggaaaaaggtatcgccatggacgaatcgttcgaagaacatctggaactcgccaaggcactgttcgcgcggcgcctgccgtactggtgcgacgctttcctgcgcccggccgaccaggccttccacgccttcctgaacgcacatggccacgccaccacctacctggtgctcgaaggcttcgatccggtctatattcctcgcggctgcgacctggatgccgtacgcgcgaccgccagggccagggcgcgcctgagggaggaaggcgcggcggaggacacgctgcccatcctgctctga

SEQ ID NO: 345247 - DNA, 543 bp, Pseudomonas aeruginosa
atgaacccccagcccctgttccgtctcgccgcctgcctggccctcctcctgccggcggcctgtgccacgccccgccccgccccgccggcggaccccaccacgctgttcgccgacgccctgcgctgccgcggcgccttccccgacggccgtgacccggcgataaccggctacctgcgcgccaatggcgtcgaggtacaggaccgcgcgcccggcgggcccctcgacctgctctaccgcttcgccaggccgccgcgcatcgacggcagcctggtgaacgcggtgcgcgtgcgcggtggcaacggcgtgctggtgatggcctatgccgaaggcgacctcgaagacttcgcccgccgccagggtgcggcgccccaccccggcgaacacgccgccgcggatggcttcggtgaactggaggtgctctacagccggcccctgccactgcgccccggcctcgaccaacgcccgccgcgcctggtgatcggccgcggcatcgaggcggcgacgcgcgcgttccgctggggctgccggagctacgacggctga

SEQ ID NO: 345248 - DNA, 630 bp, Pseudomonas aeruginosa
atgccagcagcaagcagtccctcgcccgccagtaaagtccccacccgccaacgccttctcgatgcggccgtgtcgtcgctgatcgaactgggcgcgagccggaccaccaccctcgaagtgcagcgccgctcgggcgccagccgtggcgcgctgctccatcacttcccgacccatgcggcgctgctctcggccaccatcgaggagctggtgcggcgcaacgacgaagcggtgcgccaggccgagtcgaccatggccggggtcagcgacccggtcgagcgcgcgatacgcattctcgcggcgatgagcctgcgtccggcctttctcgccgagctggagctgtggggcgcctcgcgcaccgacgccgacctgcaggccgcggtcagggacgccgagcggcaggcctgggtcgagcgcgaacgggtggtcgacagcctgttcgcggcggtccgggaaacgcccaactacgacgcggtgaagtcgctgagcatccgtttcctgcgcggcatggcgctgtcgagcgtgctgctgggcaatccggaacataacgagaccctcatcgcccagtggctctgggcggtgcgcattctcctgcgggcccccggacctggaggcgatgggcgggacgcttga

SEQ ID NO: 345249 - DNA, 903 bp, Pseudomonas aeruginosa
atgccgaccttcgccaccgtcaagatcgaactggatccgcagtccccgcgcatcgcgcggctgctgctgaaccgcccggagcgcctgaacgccatcaccgaccagacgccacgcgacatccgcgccgcggtggagtgggcggaggcccacgacgaggtccacgtgatcgtcgtggaaggcgccggcaagggcttctgcggtggctacgacctggcggcctcggccgaacggatgctggaacacccctgccagcaggaaagcagcccctgggacccgatgctcgactacgcctgcatgaaacggaacaccgaggacttcatgagcctctggcgctgcagcaagccgaccatcgccaaggtgcacggccacgccgtggccggcggcagcgacatcgcgctgagctgcgacctgctggtgatggccgaggatgcgcggatcggctacatgccgacgcgcgtctggggctgtccgaccaccgcgatgtggaccttccgcctcggcttcgcccgcgccaagcaactgatgttcaccggcgacgtcctcgacggcgccaccgccgcggcctggggcctggccaacctggcggtgccggcggaggagctggaggcggcgaccctgaagctcgccgagcgcatcgccggggtgccccggtcgcacctggcgatgcacaagatggtggtcaaccaggtgatgctgaacatgggcctggagcagacgcaaagcctggccaccctgttcgacggcatcacccggcacaaccccgagggtgtctggttccgccgctacgcccaggccgagggcttcaaggcggcggtggaatggcgcgacagcggccggccgatccccgagcgggaagaggctcgcgagctgatccgcgacctggaggcacggctgaagccgtag

SEQ ID NO: 345250 - DNA, 1785 bp, Pseudomonas aeruginosa
atgtcgaccgccgtcccacgcaacgccgaactgcaccggcgcctggccgccacccccagccccttcgacctgctcgccgcgacggtgcgagaggtaccgcagcgaaccgccctggaatgcctccccgacgacctcgccggtgcgccgcaggcgctcagctaccgccagttgctgctggacgtgcagcgcttcgcggcggcgctgcgggcgaccggcatccgccaggaggaagcggtggccatcctgctgcccttcgttccccaggcggtggtcgcccttctcgccgccagcgccgtggccgtcgccttcccggtcaacctgctgctctcggcggaggcgatccgcacgcaactggagctggcgcgctgccgcgtcgtcgtctgcctgggcccgcatccggcgctggacgtacgggagcgggtcggccaggcgctcgccgcgatggccgggccgccgctgctggtcgaggtaccactggccggagcgacgcccggcgcgctgtgctgggacgctttcatcgctcgttccgccagcggcgtggacgcgcccggcgcgcccgagcgcctcggcgcgctggtccacaccggcggcagcaccgggcagccgcgcctggcgcgcctgtcgctgcgcaacatggccagcgcggcgctcatggccggcgccggcctcggcatccggcccgaggagcggctgctcagcggcttgccactgttccacgtcggcggcgccatcgacgccctgctggccgcgctggcggtgggcgccaccctggtcttcccgaccgcgctgggaatgcgcaacccggccgtggtccggcaggtctggcagatcgtcgcgcgctaccggatcaccctgctggcggccgtgccgacctcgctcgccgcgatccgcgacagcccgctcgcggatgccgacctcagccagctgcgggcgctgatgaccggcggctcgccgctgcccgaggaactcgcccggcacctgcgggcccgcatcggcaagcctatctaccagctctacggcatgaccgagtcgagcggcatcgccagcgcccagctcaccagcggccagcccgcggcccacgcggccggggtgcccgtgccaggggtcgagatcgccctcggcgagcccggcgtgtaccggccgggggcgaagggcgaaatcctcgtgcgcgggccgaacgtcttccatggctacctgaccgcccagggcgtggtcgacgatccgcgcggcggctggctcgcctccggcgacctcggcgaggtcacggccgacggcgagctacggatcgtcggtcgcagcaaggatgtgatcatccgcagcgggcacaacatcgatcccctgctcatcgaggagaccgcccaccagcatccggacgtggcccaggccgctgcggtggcgatgcccgacgactatgccggcgaggtcccggtgctgttcgtggtggcgcgcgcaggcgcgcaggtcatgcccggtgagatcgccaccttcgtcgcgcaacgcatcgccgaaccgccggcgcgtccccgccaggtcttcgttctcgacgaactgccgctgaccccgttcggcaagatcgcgcgcttccgcctgcgccagcgcgcggtggaacagcgggtcggcgaactgctggcggagcgcctcggcgcaatcacggtgagctgcgacgaccccgccgccaggcgcgtgacgatcggcagcggacaacgcctggaggaaccccggcgcgcggagatcgagcgcctgttgcagcgcttcgacctgcaactggagatccgccagcgctag

SEQ ID NO: 345251 - DNA, 387 bp, Pseudomonas aeruginosa
atggccaggaacaacaaggcgctgtcgctgatgctcgccattctgcttggtgtgtcagctcaatcccacgctgaattcagaggctgcgaggccaagaaggccaggatccgccagcagatcgactatgcccggatgcacgacaatacgcaccgtgaagccggattgcgaatcgccttgcagaggatcgaggcgcactgcaccgatgcctcgttgcttcgaaaacatgaagagaatattcgcaagaaagaacaggaagtcgaggaaaggcgggaggaactgctggaggcccaggccagcggcaaggaagacaagatccgtagcaaagcccgcaagctgaggaaggcccagcgagagttggccgaggcgagaagcgagctgcaggggtag

SEQ ID NO: 345252 - DNA, 1317 bp, Pseudomonas aeruginosa
atgtcctcactaaaagatgtatacaaatcttttgacagcgtatttgatcgcaccattcaaaaaagcatgggcgcaccaggatatggattggagtcactaaatgagggcttcacacgccggacaatggacagcaatataagcctcgctagctcaaacgttgccgaagccgagttcggaatacaggacgctatccgtgggctgtttggaaaaaagagaactaacgcccatagcataggaggtcatccagatttccttcaccttaacgacacaggcgaaactgaatacggctttaatgtatctctattcatggatattaaaggctctacaaagctaggcttaatttatagcccagaagaagtttttttcataaaaaacacgattatacgatgtgctattgaaacaatacgagcattcgacggccacgttcacagaatcatgggagatgccgtactcgcattcttccgagcggatggtatctccgctagaaacgccgctattgatgcaattaactgcggctgttatttagtcgaatttatgcgtcaactcgtagcgccaaagcttcgtgacaatcaagtctctgaagatgtaggcatacgtgtggggattgactatggtcaagaaaaggatgtcctctggggaatgtacggattccagggttcctcggaagtaacagcaacttctttttttgtcgatgttgctgcaaaactacaacagagcgcacctcgcaatagagtaatgattggcgaatcaataagatcactcttagacttacacgacgaagtcatcgaactcaaacgcattaataacggccaagataccgagcggtttgtcatgccaaactacacaggagtagatggcaaacctgtgaactacaaaaaacacgtcttaaagcaaagttcttatttcgcattactgccgaaacctggatgggaaaaatccccaatcaaaattaccgcattgctcaaagcgaaagagaatacaatctacgccgcccctgagacttatcaagcctgttccagagcactaccgaaaggggtaggaattgatttcaaggcaaaattcagcctaccttacactacaggtaaagttcagctacgctttactgtaagaaatcatggagaagaagcaggcgaagaccgctcacatgaaaaactcattgacgctcaatataaccgagagcgcgatgaatactggggcagttactggagggacacagcctatactgggctgcattatatgtgtatcgctgtgctgatagacagcaaagtagcttacaaggaccaggagtttggtgtgtacattggctcccctgcataa

SEQ ID NO: 345253 - DNA, 339 bp, Pseudomonas aeruginosa
atgcagcatatctgcggcctggcacggtgcgagatgaagcaggaggaggtcgacaggtttttcagcgccagcggcgaaacgagcgaggccctgaagaagaaaggcggggtgaccgcgctgctggtcagcgacaatgttcagggccagcaggtcgcctgtgcttccttcctggccacgacgccgctcatccaggtcgacagccatgacttcgtcgctgcgcagaaagccgccgatggcaagcttcaggtcaacccggctcgtctgggagaggtcacggcagttcgcatgaacgattcaacaagtccgtccattactgatagtttattcatgcggtactga

SEQ ID NO: 345254 - DNA, 1302 bp, Pseudomonas aeruginosa
atgaacacacaagcgtccgacgacaacgcgatgtaccttaagattagctggcgaatcatgccactgctgctggtggcttacgtagtggccttcctcgaccggatcaacgtcggctacgcgcagttgcagatgaaggaaacgctggcattcagcgataccgtctatgccatgggcgccggggtgttcttcatcggctacctgctgttcgaggtaccgagcaacctgatgctggaacgggtcggcgtgcgtcgtacgctcctgcgcatcatggtctgctggggtttggtggcgatggcgatgatgttcgtgcgcacacccttgcagttttatgttctgcgcttcctcctgggcgcgttcgaagccggctttaccccaggcgcccttctctatctgacctactggtacccgccggcacggcgtgcgcggatgattgccgtgttcctgctgggcgccatcatcgccgcgctggttgccggcccgttgtcgggcgccatcatgaagtacctgcacggcaccaacgagtggcacggctggcagtggctgttcctcctgcagggtctgcctgccccgctgctcggcctgctggcctggtacgtgctggtcgaccgccccgaacaggcttactggctgagcaccgacgaaaaggcccggctgcgccagcaattcgaggaacaagccgaggcgccaggcagcgctcgccatggctcgttgcttggcttgctggccgacttcaaggtctgggcgctgtcgctggtttatctgctgatggtcgccggtacctacagcatggtgttctggaccccgaccctgatccgcagttggggcgtctccgatgtcctgcagatcggcgcatacgccaccgttccacaattcttcgccatcgccggggtactgctcctcggtcgcagttcggatcgccaccgcgaacggcgctggcacttcggcttaggagcatcggcggccatgattggtctgctagtcatcacccttggccagggccagctaggcgtctccctggccggtctctgcctggcgatcttggggatagccgcggtcacgccggtgttcttcgccctcgcctccgagtatctgccgcgcgcctcggtagctgccggcatcgctatgattagcagcatcggcaatctgggaggcgccatcagcccgccgatcactaccgcactgaataccgccagcggcagcagcagctatagcctgttattcgtgatggggctctacatgctggccgccggcatcgtcctggcggttgtgcgcccggccgccatcccccttcgcgccgcttga

SEQ ID NO: 345255 - DNA, 1011 bp, Pseudomonas aeruginosa
atgtcccgcgtcaacccaccgccttccgccaccatgcggaccaccgccaaagaccgcgccgtgtgcctgggtatggtgacttccaatatcaagcgcacattcgacgagcattctcggatatcgcctgaactgcgctggcaaatcctcgccatccccgatgagctgggctgttggcccaacgctgttgcccactccttgagccggggcaagaccggagtcatcccgcagatgatcttcagtcaggacattcccttttgccgagcactacttgacgactttgccctacgtcttcgccagagcggccggcggttgctgatgttcgtcgcgccgcctggcggcgatgccgacgagtcgatgccgaaactcctgcagtatcaggtcgataccatcgtagtgactgccgcgaaactaacttcgcgcatgtccgaacactgcgagcaaaggcatcgctgtgatattcctcaaccggcgggtggaggagctgcgtgtttggtctgtctgctacaacaatcagcgcataggtcgcgaagtcaccacttacgtggccgggcagtgatcgccgagcctgcgcaatcgtctccggcgaacctggattccccgtcgctgccaaccgcctgcacgggttcgagcagggcctcacggagcactgtcaccggttcgtggccagcgatacgggctctacgcgtccgacgggctaaggcaaaccgccggccatctcttcagcaaagccgcacccgccatcgacgaggtgctttgcggcaacgacgtgatgtccatcgccgtactagcccactttcgccagaacacttccctgcggggcccgaggacatggcgctgatcggcttttatgacatccgtgacacatcctatccagagcactcactgactgcgctgcgccagccgctggaccagatgatcgattgcgccgtcgaactgatcgacgcatgccccactaatggcagccataccgacgctgtgcgctggttctgcgctctagcgcctgaagcttaa

SEQ ID NO: 345256 - DNA, 2703 bp, Pseudomonas aeruginosa
atgacaataaatcccgcccgacacctggtgtcgaccaagttctcgccgccgcgcatcggcaccaagcacgtgccgcgcgccaacctgatcgcccagctcgaccagatgcacgagtgccgcctggcgctgatcaccggcgccgccggctacggcaagaccaccttgctggcgcagtggcgccaggcccgcctgaaggccggtgccgaagtcgcctggatctcgctgaccgccgacgacaagggctacgcgcccttctgcaccgccctgttcgaagcgctgcgccggctgggcgtgggcgtggagttcgacctgctgcaggaagacggcaccgccaccgcgatggacgccaccatcgccgccatcgtcgatgccgcggagaacctgtccaaggagctgtacctgatcctcgacgactaccaccacgtcgaggtgccgctggcccacaagctggtgcagaaactgctcgaccagggccccggcaacctgcatctggtgatcgcctcgcgggtcgcgccaccgctgagcctgtcgcgcctgcgggtgatgcagcaggtggtggagatcgagagcgtcaccctccccttcgaccccgccgagacgcgcaccttcgtcgaggagaacctcggccgcgacaagctcaacgccgacgaactgaacctgatccacgaactcaccagcggctggccgtcctgcctgcagctgatcgtgatcatgctgaagaaccgcccggacacccgttccatcctgcatgacctgatctggcgctccagcgacctgcagacctacctcagcgaagaggtggtcgagcacctgccggccgagctggtggagttcgccgaggcgctgtcgctgttccgccgcttcaacgccgccatggcccgcgcggtgaccgaccgggccgacgccgccgagctgatcaagcgcatggaggacgagaacctgctgatctaccgtgtcgactccgacgaccgcctcgcctggtaccgcctgcacccgctgttcggcgagtttctcgccacccgcctggcccgccagggcggcgacctccagaagcaactgcaccagcgcgcggcacgctggttcgccgagcaccgctgcctgaccgaagccgtgcgccacgcaagcctgggcgaggacctggacttcgccacccaggtcatcgagcgcaccgcgccctcgacctggagcctggaatatctggggccgacgctgcacctgctggagcgcctgcccgaagaggtgctgctgcgccacaagcgcctgctcttcctcgcctgcctgacggtgtcgctgacctcgcggccggctcgggccaaggcctggctgcaacacctgagcacagcggacctgcagggactgccggaaatcgccaacggcctgccgatgatccgtgccgccatcgccgtgcaggacgacgacaccgatctggtcatcgacctgctggagccgctgcgcgatgccagcgtggagaaccccttcctgcgctacgtgctgctgtcggcgctgaccgtcgcctactccgcggccggccgttacagcgacgcccgccggctgttcgaccagcacccgatcccccccgaggaccgtggcaacgacatggccatggtcgccgaattctccagcgccaccaacctggttgccgccggcaacttccgcgatttcgagaaggtcggttcgcagctgctcgagcactccacccgtgagggtggcaaccgctccatctgcgccaacctctgcgccagcgccctgaccgaggtcttctacgagctcgaccgcatcgacgactcccgcgagaccatcgccaaccgcttcggcctgctgcattcctccgtgccggacgtgatcgtgcgcaccaacgtcacccgcgtacgtctggatctcttgcagaagggctccgaggccgcgctggcgttcctcgaacagcagatcgcccacctgcgttgccttggccaggtccgcccggtggcgcatctgctgggcgaggaaatccgcgtgctgctgctcaaaggcagccgcggccgggccggcgaactgctggaaaccctcgaggaactggcacgccagcatggcaccgagcgcggcgcccgtgccgaactgccggcgatcgccgcactggcccgcgcgcgagtcctcaaggcagaggactcggaacagaccctggctcagctggagatcgttcgcgcccacgccaaagccttcgatcgcggccgcatggcggtgctggccgacctgctcgcggcctccaccctggaggacctcaagcgcccagacgaagccctgcagcgcgcacgccaggcggtcagcgacggacagcggttcggcctggtccgcaccttcatcgatgaaggcccgctggcggaaagactgctcgcccgcctggtcgaggagcaggcactggaaggcgaggtgctggcctacaccgaagagctgctcgccaagctcaacgaccccttcgcggtcaacgccagcgctccccgcccgcgccgcgccttgccggccaaaacccaggccgtgctgaccaagcgcgaaatcgatatcctcgcactggtggcccaggccatgtcgagcaagcgcatcgcccatacactggacatcacactggaaacggtgaagtggaacctgcgcaacatcttcgccaagctcggtgtgtccagccgctacgacgcgatgatctgggcgaagaaccacaacctgatcgagtag

SEQ ID NO: 345257 - DNA, 747 bp, Pseudomonas aeruginosa
atgaatctgcacaacaaggtcgccatcgtcaccggagccgcttcggggctcggcctcgccacctgtcgcgccctggctgccgccggcgcgcgggtggtcggcctggacctgcagcaggagcgcctggacgtcgcgctgggcggagaaatccgcggcatcgccgtcgacgtggccgacgaggccagtgtcagcgccgccatcgagcaggtggtgggcgagcacggcggcctgcacctggcggtgaactgcgccggcatcctcggcccgtgcaagaccctctccaagggccagctgttccccaccgaactgtggaaccgcgtactggcggtcaacctgaccggcaccttcaacgtcatccgccatgcggccctggcgatgagcgccaatgaaccggacgagggcggcgagcgtggcgtcatcatcaataccgcgtccggcgccgcgcgtgaggggcagatgggccaggcggcctacagcgcgagcaaggccggggtcatcggcatgaccctgccgatcgcccgtgacctggccgagcatggcatccgcgtggtgagcctggcgccgggcctgttcgagtcgggcatgtccgccggcatgccggcgaaggtctccgaaaccatcgtcaacagcctgttgttcccccggcgcatgggccggcccgaggagttcgcggcgctggttcgccacgtggccgagaattcctacctgaacgcgctgaccctcgacatccagtgcggcacccgctga

SEQ ID NO: 345258 - DNA, 450 bp, Pseudomonas aeruginosa
atgagcaagccgcaacccgaggccctggaagcctacgccttcacccagccgatcccgacccgctggatggacaacgacgtctatggccacgtcaacaacgtcgtctactacagctacttcgacaccgtggtgaacagctacctgatccgccatggcgtcctggactaccaggccggtgacaccatcggcctggtgatcgagacgcagtgcaactacttcgcttcgctgagcttccccgataccatcaatgccgcgctacgcgtgacgagcatcggcaactccagcgtgcgctacgagatcgggctgttccgcaatgacgagcggacctgcgcggccaaagggcatttcgtgcatgtctacgtcgaccgcgaaacgcgccgcccggtgcccctgcccggggcgctgcgccaggtgctggaaggcttgcaggttcaggccgagccggcctga

SEQ ID NO: 345259 - DNA, 1092 bp, Pseudomonas aeruginosa
atggacaacgacaaccggccccggcacgacggcgggctgacctatccctgcggcccgcgtccggccttcggcgaaatgcgtgaagtggcgcccggggtgcagtggacccgcatgccgctgccgccgtccctggcagcgatcaacctgtggctgctggacgacgacagcggctacaccctgatcgacaccggcatcaacagccccgaggcccgccagacctgggagcaacttttcgatggcgcactgcacggacgggcgctgcagcgagtgctggtcacccacctgcatccggaccatgtcggcctcgccggctggctctgcgatcgcttcgactgccgcctgtggatgacccgcctggagtacatgcagtgccgggtactggccggcgataccggacgcgaggcgccacccgaggggctggccttctaccgccgggccggttgggacgaggatgcattggcgatgtaccgctcacgcttcggcaatttcggccggatgatctggcagttgcccgacagcttccggcgcatccgcgacggcgagtccgtgcggatcggcaatcaccactgggaagtggtggtcggcgccggccacacccccgagcacgcctgcctgtacgatccggcgcggcgcctgctgatcaccggcgaccaggtgctgccgaggatttcatccaacctctcggttcaccccatcgaacccgacgccgacccgataggcgactggctggtctcgctggtggtgttgcgccagcgcatcgccgacgacgtactggtgctgccggcccatggcgaacccttccatggcctgcacgcccgcctggatcagctgcgcgacagcctgctcgccacgctgcaacggctgcgccagggcttgcagcggccacggcgcgcgatcgatacgttcgaactgctgttctcccgaccgatacccataaccgacggcagcctgatgagcctggcgaccggggaaagcctggcacacctgaaccacctgctgcatcgcggcgaactggaagtcgagaccgacagcgacggcgtcgcctggtatcgcctgcgcagcgaagccgtcactgaggaaaccaagccatga

SEQ ID NO: 345260 - DNA, 1695 bp, Pseudomonas aeruginosa
atggccaacgacaagaacaagatgatgaagaatcagccagctgtatcccaggcactgagcgcgagcgtcctggtgttgtgcgctttgggtgcgggcaatgcccgggccatcgagatcgataccggtaacccggacctgcaactgcgcttcgacaataccttccgttacaacctcggcaagcgtatcgacgaccagaagcaggcgatcctgaagaaccccaacaacgacgatggcgaccgcaatttcaagaagaacagcatcgtcgccaaccgcatcgacatcctcagcgagagcgacctggtctacaagcagaagtacggtgcgcgcgtgagcgccgcgctctggtacgacgatgcctatgccgggagcctggacggcgacaacaccgccacgtccaaccacctcaacggcgacggccggccggcgcaaggtctgagccgctacgccaaccgctactacgaaggcccctcgggcgaaatcctcgacgccttcgtgttcggctccttcaacttgggtgactcgccgctgcagatgcgtgccggccgccacaccgtcaactggggcgaatcgctgctgggcagcggcgcgatccacggcatttcctacggccaggcgccgctggatcaaggcaaggccctggcgctgcccggcatcgaggccaaggagctgtacattccgcgcacccagctgtcgacgcagctgcaggtcaacccggagctgtcgttcgccgcccagtacttcctcgaatggcggccgtcgcgggtgccggaggcgggcacctacctgggcttctccgacatctacctgcagggtggcgagtcgttcatcctcaccccgaacctgcgcgccacccacggcgacgacatcgagccgcatgactccggcgactggggcgtcatggcacgctggaccccggaggcgctggacgccaccctgggcctctacgtgcgccgcttctccgacaccctgccgcaggtcatcctgctgcagacccgcaagccgcagtacttcatggactacggctcggacatcgacatgtacggcttcagcctgtccaaggaagtcgccggcatcagcttcggcctggacctgaactatcgccacaacatgccgctggtgagcagcccggcgcgggtgacctcgctggccgcgctgccggaccgtggcgacatcctcggcgcccgtggcgacaccgtgcacggcgtgctcaacgccatcggttcggtcagctccacgccgctgttcgacgccgcttcctgggccaccgaactgacctggagccgctgggtgtcggtcaatgacgacccgctgaacctgttcaagggcagctcgcagtacaaggccgtgtcgaccaacatcgacgccgtgacccgcaacgcctacaccatggcggtgaacttcacgccgacctggtaccaggtgttcccgggcggcgacctgagcatgccgctgagctactcggtgggtctgcagggcaactcggcggtcgcctccggcggcaacgaggacgccggcagctatgccgtcggcatggcgctggacctgtacagccgctaccgcttcgacctgaagtacgtcgactacttcggcgacttctcgaagaacgccaacggcgcggccctcactcccagtggcagtcagtccctgctcgaggaccgtggcgccctgtacttcaccttcaaaaccagtatctga

SEQ ID NO: 345261 - DNA, 1062 bp, Pseudomonas aeruginosa
atgttcagaagaatcctcggcgttccgctggccttcggcttggccgtgctggcgggcgcggtcacggcgcagccagccttcgtcgcgcccatggacgttccggcgccggcaagcgccctggcgctgaaagcgccgctcaacgcactggtcgtggccgggcagcgcctggtggtcgccgggcagcgcgggcacatcctgtattccgacgacggtcagagctggacccaggccgcggtgccggtcagctccgacctcaacgccctggcgtttcccaacccccagcagggctgggcggtggggcacgaaggcgtgatcctgcacagcgccgacggcggccacagctggacgcgccagctcgacggcccgcggatcgccgaactgctgcagcgccagtacggccgacctgccaacccggacgaccccgacgcggcgcgcctgcaacacgaggccgagctggccgttgcgcagggtgcggacaagccgctgctggacgtgtggttcgaagacgacaagcgcggttacgccattggtgcgttcaacctgatcctgcgcaccgaggacggcggccagcactggacgccctggctcgaccgcgtggaaaacccgcgtggtatgcacctgtacgccatgcgcccggcggccggcacgctgttcatggtgggcgagcaggggctggtgctcaagttcgacgcccggcagcaacgcttccgcgcactggagctgccttaccagggcacgctgttcggcatcgtcggcacgcccgaggtggtgctggtctacggcctgcgcggcaacgccctgcgcagcaccgacggtggcgccagctggcacaaggtacagaccggcaccgatgccgggctcaacaccggcaccgtgctggccgacggctcgatcgtcctgggcagccagtccggggagctgctgcgctccaccgaccagggcgccagcttccacccgctgaaggtcgcgcgcgcggcgccgaacttcgccgtggccgcagcgccgggcgccaaggtggccctagtcggcctgggcggcgtgcgcctggaaagcctgcaatga

SEQ ID NO: 345262 - DNA, 2478 bp, Pseudomonas aeruginosa
atggctatcgacaattccaccgaccacctgcagaccatcgccgacctgcgcgatttcgatcacgcatcgggcagccgtctggagcggttgatcttcaaccaccgcctggtggtggtgctgctgtgcctgctggccaccgcgctgctggcctggcaggcgcgcgggctgacgctgaacgcggcgttcgaaaagaccatcccgcacaaccagccgtacatccgcaacttcctggagtaccgcgacgaactcaagggcctgggcaacgccgtgcgcgtggtggtggagaaccgcaagggcgacatcttcgacccggcctacctgcaggccctcaagcagatcaacgacgaactcttcctcaccccgggcgtcgaccgcgccaacgtcaagtcgctgtggatgccggttgtgcgctggaacgaggtgaccgaggagggcttcgccggcggcccggtgatgcctgacaactactccggtaccagccaggacatcgagcagctgcggcagaacatcggccgcgcgcagctgctgggcaacctggtgggcggcgactaccgctccagcatggtgttcgtgccgctgctggacaaggacgccgacagcggtaagccgatcgactactgggagctgtccaagcgtctggagacgatccgcgcgaagtattccggggcccaggatggcgccgacatccaggtgcgcatcgtcggcttcgccaaggtagtgggcgacctgctcgacggtctgcggcagatggtcctgtacttcgccgtggccgccatcatcgccgcgctgatcatctatggctggacccgctgcctgcgcagcaccgctctggtgctaggttgttcctgcgtggcggtgctctggcaattggggctgatcgcgctgctgggttacgagctggacccgtactcgatcctggtgccgttcctggtgttcgccatcggcgtgtcccacggggcacagaagatgaacggcatcatgcaggacgtcggccgtggcacccaccgcctggtggcggcgcgctacaccttccgccgcctgttcctcgccgggctgacggcgctggccgccgacgcggtgggcttcgcggtgctgatgctgatcgacatcccggtgatccaggacctggccatcaccgcctcgatcggcgtggcgctgctggtgttcaccaacctcatcctgctgccggtgatgctgtcctataccggcgtcagcgccagcgccgccgcgcgcagcctgcgtgccgaacagcgcagcgctggtggtgtctgggccttgctggagcgcttcaccgagcgccgctgggccaagccgctgctgatcggcgccgcgctgctgggggccggtggctttgccctgagcacgcagctgaagatcggcgacctcgacgccggggcgtccgagctgcgtccgaactcgcgctacaacctggacaacgcctacatcaccagcaagtactcgctgtccagcgaccagttcgcggtgatcgtcaaaaccccggccgaaggctgcctggcctaccagacgctggtcgaggcggaccgcctgggctggaccctgcagcaggtgccgggagtgcagagcacggtgtcgctggccgacgcggtgcgcaagatcaccgccggttcctacgagggcagcaacaagtggctgaccctgtcgccgaaccaggacgtgctcaattacgcggcgcgcaccgccagcaccaccaacccggagctgttcaacaccgagtgctcgatcatgccggtggtggcctacctggccgaccataaggcgcagaccctggaacgggtggtcgaggccgccgcgcgcttcgccgccgagcacagcacggcagagcaccagttcctcctcgccgcgggcagcgccggtatcgaagcggccaccaacatcgtggtgaagaaggccaacctgagcatgctgctgtacgtctatgcggcagtggtggtgctgtgcttcatcaccttccgcagctggcgcgcagtgatcgtcgcggtggtcccgctggtgatcacctcggtgctctgcgaggcgctgatggtggtgctgggcatgggcgtgaaggtcgccaccctgccggtgatcgccctcggcgtgggcatcggcgtggactacgcgctctacctgctgagtatccagctggccagccagcgcgccggcgccacgctggtggaggcctaccgccacgccctgcgcttcaccggcaaggtggtcgctctggtgggcgtgaccctggccgccggcgtgatcacctgggccttctcgccgatcaagttccaggccgacatgggcatcctgctcaccttcatgttcgtctggaacatgctgggcgcactggtgctcatcccggcgctttcccatttcctgctgcgtggtgtcggtgcctccgggccccgcgccgcgtgcagcgtcgttaccacgccgaaggcgagcgtgagcgagcggcgcgacgaacccgtcgcccgttgcgtctga

SEQ ID NO: 345263 - DNA, 1149 bp, Pseudomonas aeruginosa
atgagtgatacgtccgcgatcttcctgaacgaacaggagcggctgattcgcgacagcgcccgcaaggttgccgccgaggtcctggcgcccagcgccgccgagcgcgaccgcaccggcgcctggccccgcgaggaactggcggccgtggccgaactgggcttcctcggcatgctggtgcccgaagcctacggcggctcatgcgccagcttcgtcgagtactgcctggcgatcgaggagttcgccgctatcgacaccggtttcgccaccctgatccacgtgcacaactcggtgggcctgaccatcgcccgcctgggcaatgaagagcagaagcgcaagttcctgccgggcatcgccgacggcagccggatcggcgccttcctgctcagcgagccccacgccggctctgacaccgcagcgttccgcaccagcgcccggcgcgagggcgacagctacgtgctcaacggcagcaagcagttcatctccaacggcaacgaggcgggcgtcggactggtgctggcggtgaccgaccgcaacgccgggaagaagggcagcagcctgctgatcgtcgaaccgaaggttcacgccggctacgtggtgacccgcgtggaacacaagatgggccagcgttcggcccaggtcgccgccatccagctggatgagtgccgggtaccggcggaaaacctgctgggtgccgagggctccggctaccgcaatgtaatgggctcgctgtccgaaggccgcgtggcgatcgccgccgtggccaccggcaccgcccgcgctgccttgcaggcggcggtcggttatgcccaggagcgcgaagcctacggcgcgccgatcatccagttgcagggcgtggccttcgacctagccgacatggccacccgggtcgagctgtcgcaccagtacctggtgcatgccgcgcgcctctgcgaaatgggcgtgccctgtgccaaggaagcctcgatggccaagctgttcgccagcgagatggccgagaaggtctgctccgacgcgctgcagatccacggtggttacggctacctggtggacttcccggtggagcgctactgccgcgacgtacgggtgaccaagatctacgaaggtaccagccacatccagaaactcatcatcgctcgccacctggcttga

SEQ ID NO: 345264 - DNA, 1134 bp, Pseudomonas aeruginosa
atgcataacgagatgccgagcgaagcacagcgtctggcggtagcgagtttccgcaagttcctcgacagcgaggtggcgccggtggcgcgggagttccgcgaccgcagcctgcccaaggggcgcatgcgcgagttggcccagggcatcgccgaattcggcctgcccggcgcgagcatcgccgaagagcagggcggcctgggcctggcacggctcaccgaggccatgttgttcgaggagctggggacactgtcggcggacgtggccctatgcgtgaagaccaacaaggccgtggccgccttcctcgccggcttgccggcgcagcgggccgcgattcgcgaacgctacctgccggatgtcctcggcggccgcagcttcggtgccttctgccttgatgcgggtgccacggcggattcgccccgggtgacggcccgccgcgaaggcgaggacttcatcctcgacggcgagcagacctgggtggccaatgggcactacgcggacttcgtcatcgtcgccgcgcgtaccgaggacgaccactgggtgcacctgctggtggaccgccgcgcccatggcttcgtcacgcgcaacgccgagtgcatcgcgctgcattcgcagtccaccgcccaggtcttcttcagccagacgcgggtgccgggttgccagtcgctcggcgaggatggcgtgggcctgcaggacagcctacgggcgctggacgtggcgcgcatcgataccggcctgctctgcgtggggctgatgcgcgccgcgctggaggcaagcctggagcccgcccggcagcgcctggcaggcgggccggacaccttgctcgccgcccagctcgctgagatggccaccctggccgatgcggcgcgtctgctctgccggcgtgcctatgggctgatcgatgcggggctgccgtgcgatccgcaggtgtccatggccaagtggtatgccagcgaaatggccgtgcaggtctgccgcaacgccgtgcagctgcagggcgccgatggcctggcacgggccggcgaggtggagcgcctggtgcgcgaggccctcagcctgccgttgagcgacggcgtcaccgataatcacaaaatgctgatcgcccggaccttgctgggcatctctacaccgatatga

SEQ ID NO: 345265 - DNA, 1971 bp, Pseudomonas aeruginosa
atgcaatgccgatatctcccgctgtccctgttggccgccctggtggcattcaccggccaggcttcggccgccgagcccgtcgcgccgctgccggcgagcccggccacgatcgccgccaaccacgccgtgctcggccgcctgccgttcgccgaccggcaggacttcgacgacgccaagcgcgggctggtggcagccttcgccgggagcatcaaggacgcccagggcaacgtggtgtgggatacccaccagtacgatttcctcgccgccgagaaggtgccggacagtgtcaaccccagcctctggcgcatggcgcagcttaatacccatgccgggctgttccaggtcgccgagcgcctctaccaggtgcgcgggctggacctggccaacatgaccatcatcgagggcgacgacggcctgatcatcatcgacccgctgatggtggcggagaccgcccgcgccgccctcgacctctactacagcaagcgcccgcacaagccagtggtggcggtgatctacagccacagccatctcgaccacttcggcggcgtgcgcggggtgattgacgaggccgacgtgcgcgccggcaaggtgcgggtgatcgctcccgatggcttcatggaccacgccatcagcgagaacgtgctggccggcaccgccatgctgcgccgcgccatgtaccagggcggcagcctgctgccgcgtggcgagcaggcgctggtggacagcggcctgggcaaggcggcgccgcgaggcggcagcgtcggcctgatcgcccccaccgaactgatccgcaagcctcaggagacgctgcgcatcgccggggtcgacctggagttccagctcacccccggcaccgaggcgccggcggagatgaacctgtacctgccgcagtggcacgccctgggcatggccgagaacgccacccgcatgatgcacaacgtactcaccccgcgcggcgcggaagtgcgcgacgccaaggcctggtcgaaattcctcgacgacagcctggtgcgctacggcgacaaggccgaggtgatgttcgtccagcacagctggccgacctggggcggcgagcgcatccgtaccgaactggccgaccagcgcgacatgtacgccttcatcaacaaccgcaccctgcacctgctgaaccagggactgacgccgctggagatcgccgatgcggtcaagcagctgcccggcgagctggaccgcaagtggtacctgcgtggctactacggcaacctggccttcaacgtgcgcgcggtgtaccagcgctacctgggcttctacgacggcaacccggccaacctcgcgccgctgccgccggagcaggctgacaagcgctacgtggcggccatgggcggcgccgacaaggtgctcggcctggtgcgccaggccatggagcagggcgactaccgctgggccgccgagttgggcaaccgcctggtcttcgccgagccggacaaccgcgccgcccgcgaggcccaggccgccgccctggaacagctgggctacgccgccgagtcgggcgtgcagcgcaacatgtacctggtcggcgccagcgagctgcgcaacggcctgccgccctacaagggccgcccggtggaagacctggtgcgcgccgcgaccccggcgatgttcttcgacctgctagccgtgcgcctggattcggacaaggccctgggccacgacatgaccctgaactgggacttcgacgagccggcgcagtccttcgccctgaccctgcgcagtggcgtgctgacctaccgcgagggggccagccatgccaagccggacgtcagcctgcggatgagcaaggcgaccctcgaccgcatcgccctgaagcagctggacttccccaccgcactcaagcaggatgcgctcaagttggagggcgatgccggcaagttcaaggcactgatggctgcgatgtcgagcttcgaccccatgttcaacatcgtcaccccctga

SEQ ID NO: 345266 - DNA, 708 bp, Pseudomonas aeruginosa
atgccccgcaagcccatcgacaaaccagcgcaggaaccggccgagccggtcctgcgcgtggcgctgccggcgccccagcgcaagcgtccgcgccaggcgcgttcggtggcgctggtggcggcgctgaagatcaccggccgggagatcctcgaacgcgagggcagggcggcgctcaccgtgcaccgcctcgccgaacacgccggggtggccatcagctccatctacgaatacttccccaccatggaatcgctggtggcggcgatcttcgacgactaccgcagcgaggcgcgggtcgaggtcatcgccagcatccacgcgttgccggattccgcctgcttgatggatggcatcgaactgctcctgcacaccggcctggctgcgctgcagcgctggctgcggctggactccgaactgagcatcaagaccgcctaccaggccgagctggtgcgcctggacatggtgcgcggggagggcttctgggtgtcccaggtgatccccgcgctggtcgagcgattttccaccgaagtgctggtgggtgatcgcgagctggccggctttctcgcctaccaggcggtgacggcgctgccgcgcgcgctggtcatcgaacgccccgacttcctgcagcaggaacagaccgtgcgcctgctggcgcgcatgctccatgcgctgctcaccgcagattcggaaagcgcctccgaaactagataa

SEQ ID NO: 345267 - DNA, 1431 bp, Pseudomonas aeruginosa
atgacaagaacaatcgacgaaaaggtcgacctgctgctcagcgaccccgtcgccctggtcggccattcccgccaggcctggaacgaactgccccgcgccgagatcgacgccctgcagatacgcgccctgcaacgccgcttcacgcaactgcgcgagcgcatcccggtactcaagcgcctggccgatgccgagggcgttgagcgcatcgagcggctcgcagatgtcgtcccgctgctgttcgagcacaccgtcttcaagtcctacccgccgtcactgctggacaacaacaacttcgccgcgatcaaccgctggttgtccaagctggtgactccggagatcggcgaggccctgcaggccgccgacgtgagcggctgcgaagggttggacgactggttcgaggcgatcgatgcgcaggtgccgcagttatgcctgagccatacctcgggcacttccggcaccctgtcgttcctgccgttgggcacccgtgaattcgagaaggcggcgagcgtgcgccggctgttcgcctgggacatgcagggcccggatacccctgatccgcagttgcatgcgctgtacccgtactaccgcaagggctacctgagccacgtgcgcggcaacatggcgctgatgcgcggcctgctgcccagcctggacaacttccacccggcctatccggcaacactctccagcgacgtgctgcacctgggcgccaaggtccgcgcggcccaggcccgtggcaccctcgaccgcctgcaactgagtccggcgctgctggcgaagaagcaggcctacgaccagctgcaggccgagatgccgcagcacctggcggccttcttcgaggagatgacccagcgtctgaagggccagcgcgtctacatcggcggcacctggaacctgctgcacaacatggccaaggcagggctggcgcgcggtctggaaggggtcttccaccccggttccttcatcgccaccaccggcggcgccaagggcgtcgtgcaaccggagggttggcgcgaagaggtactgcgcttcaccggcgcccagcgcatcaacgagacctacgcgatgtccgaggtggtcagcggttcccacgccctctgcgaccacggcaactaccacttcgcgcacaccgcgattcctttcgtgctcgacccggaaaccggtggaaccctgccgcgtagtggccgccagaccggccgcgcggccttcttcgacctgggtgcggaactgcgctggggcggcttcatcaccggcgacgaagtcaccgtcgagtgggacgcgccttgcccctgcgggcgccacagccgctatgtggtcgggcccgtgcagcgctacagcgagaagaacggcggcgacgacaagatcacctgcgccgcgtccgaacaggcccatcgcgaagcgatggacttcctcagtactctggaggcctga

SEQ ID NO: 345268 - DNA, 1458 bp, Pseudomonas aeruginosa
atgagccatcccatcgcaccgatgatcatccgtggcgaggtcatcaccgatcacctgatcgaggtcggcggccgcggcggcgacctgaccttcctcacccccgacgcgcaccgctacctggaccgcctgccgctgggcaacccggcgaagctggccgacctctacgcgctgagcttcgaggacatcctcgactactgcgaggcccttgccgagcgcctggacttggccagcaaccgttacctgcaggaagcctgcgagctgtcctacctgaccgcaccgaccaccccgaccatggtgcgcggcgcctacatgaacctgcgctacctgctgacccgcgaggcgatcatcgagatggccgagagcaccgtcggcatcccgtacctggagggctgggtgcgccagcgcctgctcgacggcaccgagctggagacccgctgcttcggctcccgcgcgctgcacatcgtggccggcaacgccgtcgcgctgtcgctgtggaccatcgtgcgcaacatggtcctgcgcagcgacgcgatcatcaaggcgccgtccaatgaccccttcaccgccctggccatcgcccgcaccatgatcgacatggcgcccgaccacccgctgacccggcacctcagcgtggcctactggaagggcggcgaccaggccctggagcagcgcctgtaccagccgcagaacatcgagaagatcgtcgcctggggcggtttcgccgcgctcaagcacgtcacccgctacatccagccgggattggagctgatctccctggaccccaagcgcagcgccagcatcatcggcagcgaggccttcgccagcgaggccagcctgcgcgaggcggcggtgcgcctggccaccgatatcggcgtgctgaaccagaagggctgcgtctgctcacgggtggcctacgtgcagagcggcaccgacagcgccggactggaacgtctcaaccgcttcggccagtacgtctacgaggcgctgctggcgttgcccaacaccgtcagcacgcggcccaagcgttacgacccggggctcaaggcccacgtcgatgcgctgcgcctggacgacgactggtaccgggtgatcggcggccgcgaaggcgagggcgcgatcatctgttcgcaactgcccgaggcggtgtccttcgccgccagcctggacgatcgcaccgccaacctggtgccggtggattcgctggagcagatgctcgatgcggtcgacgcctacacccagaccgtcggcgtctaccccgaggcgatcaaggatcagctcaaggatgtgctgccgttgtacggcgcgcagcgcatcgtttccctgggctacgcggcagcgatgaagttcgccgccccgcaggacgccatcgagccgatgcgccgcatgggcaagtggatcagcaaccagatcgcctccccggagaccaccccggcgccctggctgcgcccgtcgctctga

SEQ ID NO: 345269 - DNA, 1050 bp, Pseudomonas aeruginosa
atgtcccaatgcctcagctacgccgccagcgctgcccgcgcgccgctggctccgctgcgcatcgaccgccgcgagctgcgcgcggacgacgttgccatcgaaatagcctactgcggtgtgtgccataccgacctgcactacgcgcacaacgactggaacaacaccctgtttccctgcgtgcccggccacgagatcgtcggcctggtcagcgccgtcggcccggcggtcagccgctacaaggtcggtgaccgtgtcgcggtcggctgcctggtggacagctgccagcactgcgccgcctgcgaagcgaacgaggagccgcactgcgagctgggcgccacgcccacctacaatggccgcgaccggcagagcagtgaagtgaccctgggtggttattcgcagaacatcgtggtcagcgagcgcttcgtgctgcgcgtacccgaggcgctggacatgcgcttcaccggcccgctgctgtgcgccggcatcaccgtgtggacgcccctgcgcgagcacggcgtgaggcagggcagccgcgtcgcggtgctcggcctgggcggcctcggtcacctggcggtgaagctggccgtggccctgggcgccgaggtgaccgtcatcaccagctcccccggcaaggccgacgacgcccgtgccctgggtgcccacgacgtactgctgtccagcgatgcccaggcgatgaaggcggcggcgaaccgcttcgacttcatcctcgacaccattccccggcagcacaacctcaacccctacctgatgctcctcggccgccacggcaagctggtgctgatgggcgcgctggaaccgctggagccgatccacggtgcgctgctggcgcgcaacaaccgctccatctccggttcgctggtcggcggcctggcgcagacccaggaactgctggacttctgcgccgagcatgaggtgctgccgcaatgcgagctgatcgccatggaggacatcaacgcggcctttgagcgcatggagcgcaacgacgtgaaataccgcttcgtcatcgacatggcctcgctgcgggactga

SEQ ID NO: 345270 - DNA, 1326 bp, Pseudomonas aeruginosa
atgcggatgccccatgctctcagcgccgtcgcggccagcgtgctgctgacgacctgccccttcgtcctggccagcgaggccgcgcctgccgtggacgcgcaggcgatcagcgacgcctacgtctacctgctcggccgcgcgctggtgcttcgccagcaacgcatcgacctgagcgaaggcatgggctggaacaacctggtccaccgcaagcccggtgcggtggactggcccaaccccaacctcgatgtcgcctattccgaagcctggctggcgctggacgagcacagctgctccctgctcggcgtgccgaaggtccagggccgctactacaccgcccaggtgctcaacggctggggcgagaccctggccaacgtcaacgagcgcacctaccccgagcgtcccgacggccagttcgccttctgcctgaaggacgcgcagatgaagctgcctgccgaggtccgtcgaatcgacctgccggtgcgcagcgcgagaatcctggcccgcatcgaactgggcgccgacccgcagggcgccgagcgcttgcagcacgccttcaccctgcagcccaccggcaagcctgcgctgccccaggtaccggcggtggcggacttcgcctggccgaagctgcccggcgtggaaatcttcgacggcgccgaggcggccctggccgaacccgatatcaaccccggcatggcgccgctgcaagccaaggtgcgcgccgttgccgccgtgatcggtgatccgcaacagcgccagcgcatcgaccagatcatccgcagccgcgcctatgcggacctcgccaaggcctcgccgagcatcggtggcggcaccctgcgcaacggctgggtgcgtccgccggtcagcggcacctatggcaacaactacacgacgcgcacgctggtgaactatgggggcatctgggccaacaccctcgccgaggtgaactacttcaagggcgccgtggatgccgacggcaaatccctggatggcgccgcgagctacagcatcactttcccggcggaccagttgccagcgagccaggcccggtacttctggtcgatcaccgcgaccgacgccaaaagcttccacgtactgcccaacccgttgcagcgcttcctgctcaacaactactcccagctgacctacaaccccgacggctcgctgaccctgtacttcgctccgcagaaacccgccggtgcgcccgccggcaactggctgccgacccgcgccgacctgccataccgcctggtgttccgctactacggcgccaagggcgcggtggcagacggcagctacttcccgccggccatcgtcaaaggttcctga

SEQ ID NO: 345271 - DNA, 1023 bp, Pseudomonas aeruginosa
atgttcaaacccctgcgcctggcgaccatgctggccctgctgctggcgggcgccgcccatgccgctgacgcaccggtgccggtcacgctcgacaacttcgtgcgcgccgagtcggaccgttacttcgccctcaccgcgcagcgcggcggcttcggccagttcgcccattggcgcgagctgatgccggtggatgccaagacggtggtgcggcccaaccgcgacaccctgtattccaccgcggtcttcgacctggacgccgggccggtcaccgtggtactgccggaggccggcaagcgctaccgttcgctggcagtgatcgatgaagatcaccatgtgctcgccatgcattaccgcgcaggaagctaccgtatcgcccgcgaggacgtcggcacgcgctatgtgctgctcggcgtacggaccctgatcgaccccgccagcagcgaggacctgcagcacgcgcatgcactgcaggaccgcatcatcgtcagccagcccggcggccccggccagttcgccgttcctgcctgggacaaggccagccaggaccgcctgcgcgccgcgctgatcgtcctcggtacgacattgagggattcgcgtggcatgttcggcgcaccggggaaggtcgacccgctgcggcatctggtcggcagcgctatcgcttggggcggcaaccccgagcacgatgccttctaccagatcgtcacgccgcagcggaacgacggcgccaccgcctaccgcctggacgtgccggcggttccggtgggggcgttctggtcgatcagcgtctacgacgcacagggccgcttccagcgcaacgagctgggcgcctacaccctgaacaacctgacggcgcggaagggcgagggcggcaaggtcagcgtgcgcttcggtgattgcaaggcaggggcagcgaactgtctgccgatcatgccgggatggaactacatgatccgctattacctgccgcagccggcgattctcgatggcggctggaagatgccggagccgcagccgctgtcctga

SEQ ID NO: 345272 - DNA, 1572 bp, Pseudomonas aeruginosa
atgacaaccatgaatttctcgcgaaccatcggcaacctggccgtccgcttcggcgagcgtgaggccctggtcaacatcgagcgcaaccgccgctacagcttccgccaactgcatgccctgaccaaccgcatcgtcaacatgatgcgcgagcgcctgcaactgcgccggggcgacacctacctgtgcatcctggaaaacgacaacatcgcgctgctgcacgcctggaccgcgctcaagggcgacgccgcggtggcatacaccaattaccgcgatgctttcgatgagcaccgctggcaagtcgaattcatccgcccgaaggtggtgttcatcgagaacgccctgctcgacagccatttccccatgctccgcgaactgggcatcgtggtggtgtgcatggacccgccggcgaccccgcgcgacagcctgctgtatttctgggacctgctcgaaggcgtctcggacgccaacccggacgtcgagaacgacatccagcatgacgccctggtctaccgcttcaccggcggcaccaccggccagggcaagtgcgccacctacaccaccgacaactggctggccctgcgcgactcgatgtacacggagagcgagcagccttaccagcccgacacccgtttcctgcacatggcgccgatcagccatggttccggcctgggcctgctgccgacgctgttccgtggcggctgcacggtgacccagaacgtgcccgacatggcccagctgtgccgcaacatcgaggcggagcgcatcacaatgaccctgctggtgccgaccatggtctaccgcctgctggaaatgcccgaggccagccgctacgatctgagttccctgcagaccctggcctacggcgccgcgccgatgagcccggccaagctgcgccaggcccaggagcgcttcggcaacatcttcatgcagatctacggcgccaccgaaagcctgcatgcggtggccatcctgggcaaggccgagcacctgagcgccagcgagcagcaactgggctccgccggacgcatcgcggcggccgccgaggtgatcatcgtcgatgacgacggcaaggagctgcccctgggccagaccggcgagctgtgggtgcgctcgcgcggcaccatcggcggctactaccgcaaccccgaaggcactgccaacgagttcagcaatggcttctggaagtccggcgacctcggctacatcgacgaccagggcttcctgttcctggtcgaccgcaagaaggacatgatcatcaccggcggcttcaacgtctacgcggtggaagtcgaggcggcgctgaacgcccacgcggcggtgtccaactcggcggtggtcggcatcccccacgaggaatggggcgaggcggtacacgccgaggtggtgctcaaggccggtgcgcaggtttcggtcgaggagttgcaggcctacgtcaaggaacgcctgggacgcttcaaggcgcccaagtccatcatcctggtcgatgctctgccggtgagcgtggtgggcaaggtgctgcgccgccaggtgcgggacaagtactggaaggacaaggcgcggcgggtgtcgtga

SEQ ID NO: 345273 - DNA, 912 bp, Pseudomonas aeruginosa
atgaccattcgtttcgatgatcgcgtcgccatcgtcaccggtgccggcaacggcctgggccgcatccacgccctgcaactcgccgcgcgcggcgccaaggtggtgatcaacgacttcggcggcagccgcgacggcaccggcagctcctccgacgccgcccaggccgtggtcgaggaaatccgcaaggccggcggcagcgccatcgccaacggcgccaacgtcgccgactacgagcaggtccaggccctggtccggcagaccgtcgaggccttcggccgcgtcgacatcctgatcaacaacgccggcatcctgcgcgacaagtccttcgccaagatggagctggccgacatccatgccgtgctcaacgtccatctgctgggctcgatgtactgctccaaggccgtctgggacctgatgaaggagcagaactacgggcgcatcctgatgaccacctcggccgccggcatgttcggcaacttcggccaggccaactacggcgcggccaagatgggcctggtgggcctgatgaacatgctcgccatcgaaggccgcaagaacaacatccacgtcaacaccctggcgcccatggccgccacccgcatgaccgaggacgtgatgccggaagaactgctcaaggccagccgcgccgagcaagtgagtccgggcgccctgttcctggtcagcgagcaggcgccgaccaagctggtgctgggcgccggcgccggcgtgttctccgcggtgcgcatggaagagaccgcgccggtgttcctgggcagcgagctgaccccggaagacgtgcaggcgcacctggagcagatcaccgactggagcagcgccggcccgcgcaacgacgccaaccagcaggtcggactgttcatcgacaccgcgatgaaagccctcaagggcgcctga

SEQ ID NO: 345274 - DNA, 1245 bp, Pseudomonas aeruginosa
atggaaaacatctatatcgtcggcgtcgccatgaccgccttcggccgacacgccgacaagagcgtcaagcagctcaccgcctgggccgtcgaggacgccctgaaggacgccggctgcgatcgccggtcgatccaggtggccttctacggcaactgcacccagggccattttgacggccagcacatgatccgtggccaggtcgccctgctgcccctgggcctggacggcatcccgatcttcaacattgagggcgcctgcgcctcctccagccacgccttcaacctcgcggtcacccagctgcgcgccggcgctgccgaggtggccctggccgtcggtgcggagaaaatgttctacagcgacaagcagaagatgttctcggccttcgagtcggcctgggacatcgagaccttcgaggacaacaagaactacctggccgccatgggcaagggcatcgtcccaccgcccggctcgcagtccgagaagccctacagcccgttcatggacgtctacgccgccctcggccgcggcggcctgatggagcgcttcggcatcacccagcgccagctagcggcggtgtcctcgaagaaccacgggcactcggtgcacaatgagcgctcgcagtaccgcaatgccatgagcatcgaggaaatcctcgccgcgccgccgatcacgtacccgattaccttgccgatgtgctcgccgatctccgacggcgccgccgccgcgatcctctgcaccgagtcggcgctgaagaaatacggcttcgaaaagagccgtgcgatcaaggtcctggccagcgtggtgcgctcggcctccgcgcgcgccgccgacgatttcgccaacggctgcacgcacctggccggcaaggccgccttcgaacaggcaggcatcgccccgcaggacatcgacgtggccgaagtgcacgacgccaccgccatcggcgagctgctctccatcgaggcactgggcctgagcgagccaggcatgagcggcgtgatggccgagcgcggcgacttcactctgggcggccgcctgccggtcaacccctcgggcggcctggaatccaagggccacccgatcggcgccaccggcatcgggcagatcttcgaactggtcgagcagctacgcggcaattgcggcaagcgccaggtcgagggcgcgcgcatcgccctgcagggcaacggcggcggcctctggcgcgtcgaggagtccaccgagcacgtcggcatctttgcccgcgcctga

SEQ ID NO: 345275 - DNA, 774 bp, Pseudomonas aeruginosa
atgagcgaatccgttacgtttgaagtgaaaggccaggtgggctggatcaccctctcccgtcccaaggcgatgaacgccctgaacccggagatgctccaggccatggtcgaatgcctgaaggcctgggaaggcgacgccgacgtgcgcgttgtggccctgaccgccaccggcccggcgttctgcgccggcgccgacctcaaggtttccggtaccccggaacccggcgaaatggacctgctggacaacatcgtcaccttcttcgaccgcctgcgcgtgtttcccaagccggtgatcgccgcggttaacggcctggccctggccggcggcctggagaccgtgctgtgctgcgacttcgtgatcgccgccgagagcgcccgcttcggtgacgcgcactccaacttcggcgtgttccccggcggtggtggcgcggccatcctgccgcgcaagatcccggagaacgtcgccaagtacctgctgttcaccggcgactcgctgccggcgcaggacatgaagacctacggcctggtcagcgaggtggtgcccgacggccaactgctggcccgcgtccaggccatcggcgacaaactggcggacaagagcccgctggtactgcggcggatgaagcgcgtggccgacgaggccgccgacaagtcccgcgccgacgccctgcgtcacgagctgctggagctgcgcaaccaccagcgctcctacgacatcgccgagggcctgcgcgccttcgccgaaaagcgcaaaccggccttcaagggctattga

SEQ ID NO: 345276 - DNA, 2706 bp, Pseudomonas aeruginosa
atgcaaagctcgctgatgaactccgacgacctgctggtcgccaccaaattctccccgccgcgcctcaatacccggcacatcccgcgtacccagttgctggagcggctgcacgaggcgcgcctgggcaacctcacgctgatcactggcggcgccggcttcggcaagaccctgctgctcgcgcagtggcgccaggcgctgctcaaggaagggctggacgtcgcctggttgtcgctcagccatgacgaccgccagtaccccagcttcctcgcctacctgctggccgccctgcagcgcctgggcatcgcggtggagtccgggctggcccttgacgatgccggggaatccacgctggcggccctggtggcgctggtgacccgccaggccgagcgggccgggcgcgagctgtacctgctgattgatgactaccaccacgtcgaggcgccgctggcccaccgtctgctgcagaagctgctggaccattgcccagccaacctgcacctggtgatcgcctcgcgtagtacgccgccgctgagcctggggcgcctgcgcatgcagggccaggtggcggagatcgacttcgccgagctacccttcgacctggaggaaacccgcgccttcttcgagcacaacctgggcagcctcaggctcaccgccgacgaggaacagttgatccacgagctgaccggcggctggccggccagcctgcaacccattgccaccatgctgcgcatccgtccggcgcggcgcccgaagctgcgctcgctgctgtggaagtccagcgacctgcaggcctacctggccgaagacgtggtggcgtgcctggcgccggaattgatcgggctgctggagcagctgtcgccatttcgtcgcttcaacgccgacctggccgccttcgtcaccggcagcacccaggccgccgcactgatccagcgcgccgaggacgagaacctgctgatctaccgggtcgactccgaggacagcatgccctggtaccgtttccacccactgttcggcgaattcctcggacagcgcctggcgatgcgcggcgcggcggcggtggaggcgctgcaccgccgggccagccagtggttcgccgagcatgagctgctggtggagtcggtgcgccacgccaacctgggcggcgacctcgacttcgccgtcgcggccatggaacaggccgctagcaccgcctggagcatggcctgcatcagcccgatgctgcacctgctggagcgcctgccgcaggagacgctgttcggccatccacggctgttcatcgtcggctgcctgacctacgccttcaccgcgcgcccggagaaagccgagcgctggctggagcagatacgccgtaccgaggcggcgaagaatccggcgctgtcctcgcgcttcgccctggccgacgccgccgtcgccctgcaactggacaacccccggcgggtcatcggcctgctggagccggcgcaacgggcgccgctggagaaccgctcgctgcgctacatcagcctgtcggcgctggccaccgcctacctactgctgggccgggtggacgccgtgcaccggctgcacgaagacaacccaatcctcgccgaggaccgcgacaacgacatggcgctggtctacgaaagcaccctgatcctcgccctgctgcgcgggggcgacgccgcagaagcggcgcgcctgggcggcaacctgctggcgcgcgccgaggcgggctatgggcgcagctcggtgtcggccagcctgtgcgcggccaacctgtgcgacgcatactacgaactggaccgcatcgacgaggccctggcggtgctggccaaccgcaacggcatcctgcagtcgtcgatgcccgacgtgatggcccgtgcctcggtgtgccgtgcgcggatcgccgcgctgcgcgagtcgccccaggcgctgcaggagtttctcgagacccagaccgcgcacttccacaagctcggcctggatcgcccgcaggcgctgatgctggccgagcaggccaagacctggctggcccagggggacttgcgccgcgcctcggagcgggtggtgcgtctggaaaccctggccgagggctaccgtggcgattgccgcgacgaagtgaccaccatcgccgccttcgccagggcgcggctggccctggccgagcgcgagccggcccgggcgctggagtgcctggcgcgggtcggcggttttgccgagcgctatggccgtggccgcacggcggtgaaggcgcggctgctggcggccatcgcccataccgaactggggcaggagcaggagggcatggactgcctggcggcggtgctgcaggacgccgcgcgcttcggcctggtgcgcaccctgcttgacgaggggccgcgcctgtcggcgctgctcgaacgactggccgaggagggccggctggaaggcccctgcggcgcgtacctggacgagctgctgacccgtggcgggcgcgacgcggaggcggcggaaccggtagctgcccggcgcgcgccgggcgccgagccgcgcagcatcctgaccccgcgcgaagtggaaatcctcgggctgatcgcccaggccatgtccaacaagcgcatcgccctgaccctgaacatcaccttcggcacggtgaaatggaacgtgaagaacatcctcgccaagctcggcgtatccagccgttatgcggcgatttccctggctcgccagcagggggtgattccctga

SEQ ID NO: 345277 - DNA, 1146 bp, Pseudomonas aeruginosa
atgagcgatacatccgcagtgttcctgagtgagcaggaagctatgatccgcgacgccgcccgcaaggtggcccaggaagtggtggcgccgaccgccgccgagcgcgaccgcaccggggcctggccgcgcgacgaactcaatgccatcgccgcactcggctatctcggcctgcacatcccggaagagtacggcggtgtcggcatgggcttcgtggagtactgcctcgtcatcgaggaatttgccgctgtcgatgcaggctttgccaccgccctgcacgtgcacaactccgtcgccttgtcgatctttcgcgatggtacggaggagcagaagcgacaatggctgcctgccatgatccgtggagaaaggatcggctgcttcctgttgagtgagccgcacgccggttcggataccgcagccttccgtacctcggcccgccgcgaaggcgatcactatgtgctcaatggcagcaagcagttcatttccaacggcggcgaagcgggcgtggccatcgtggtgagcgtcaccaacaaggacgctggcaagaagggcgtcagcctgatcatggtcgacccctgcactccgggtttcgccgtcacgcgcaacgaggaaaagatggggcagcgaaccgccaacctggcggcgatccagatggagaactgtcgtgtgccggtgagcaacctgctgggcgcggaaggggctggctacagacatatcattgccggcctggacgaaggccgtgtggcgattgccgcgctggcgaccggcattgcccgtgctgccctggaagccgcggtgaaatacgcgaaggaacgcgaagcctacggcgcgccgatcatcgatctgcagggcgtggccttcgatctggccgacatggcgacccaggtggaggtgtcgcacgtgtacatgctgcatgcggcgcgcctgtgccaggccggcatccgctgctcgaaggaagcctcggcgatcaagctgttcgccagcgagatggcagagaaggtctgctccgacgcgctgcagatccacggcggctatggctacctcaacgacttcccggtcgagcgctattaccgcgatgcccgcgtgaccaagatctacgaaggcaccagccacatccagaagctgatcatcgcgcgcaatctgggctga

SEQ ID NO: 345278 - DNA, 798 bp, Pseudomonas aeruginosa
atgaccgacgcttcgctacgccttgagaagatcggcaggaccgcgctgctcaccctgaaccgcccgcagcgccgcaacgcgctggacgccagcctggcccaggccttgctggagggcgtcgaggcggtgcgggcggacagctcgctacgctcgctggtgctcaccggcgccggcggctccttctgttcgggggccgatctcgccgatgacggtgcccatgaggacccggcgttcttcggccgtgacctggtgctgagccaccagcgctggcacagcgccctggcgacactggagatgccggtgatcgccgcggtggacggtgccgcggtgggcgcgggattctccctggccctggccgccgacttcgtcttcatgacgccgcgagcccggctgctaccgtccttcgtcggcatcggcctggttcccgacctgtcgctgctgtacagcctgccgcgcctggtgggtctggccaaggccaaggaaatcctcttctcggcacgtccggtggcagcgcaggaagcgctggagctgggcattgcccaggcgatcctgcccgaggacagtctgctggagtcggccctggcctatgcccggcagttcgatgaggcgccgcccagggccctgggtctgaccaagaccctgctcaaccgcgccttcgaaaccgaccgcgaggccatggtccagctggaagctgccgcccaggcgctgtgcggcaacagcctctaccatgccgaggcggtgcggcgtttcctcggcaagcaggggctggcctacgccggggcggtgttgcccggctag

SEQ ID NO: 345279 - DNA, 1281 bp, Pseudomonas aeruginosa
atggtgggcatccctatgctggaggctcactggcgcaggccgggtctggaacccgccgcgggcgccgccaacgcagagatcgaggagaagcagatggggcagaaagtagtggtcgccggggttggcatgatcccgttcgtcaagccgggccagaacgagaactacgtggccatgggcgagcaggctgtgcgcctggcgctggccgatgccggcgtcggttacgagtcgatccagcaggcttacgccagctacgtcttcggcgactccacctcgggccagcgcgtgctctacaacgtcggcatgaccggcatcccggtgatcaacgtcaacaacaactgtgccagcggctccacggcactgttcctggccaaccaggcgatctccagcggcatggtcgacatcgtcctggccttcggcttcgagcagatggtgccgggcgccattcccagttccttcgccgaccgtccgagcccgctggagctgttcctcgaccagtgcgacgcggccattcggggcgccgcgcagattccggcggccctgcgcatcttcggcagcgccggcgtcgagcacatgaagcgcttcggcacgcctctggagaccttcgccaagattcgcgccaaggccagccgtcacgcggcgaacaatcccaaggcggtgttccgcaaggtggtcagcgtcgaggatgtgatggctgaccaggtggtctggccggaagtcatgacccgcctgatggcctgcccgccgacctgcggcgcggcggcagcggtgctgtgcagcgaagcctacgcgcgcaagcatggcctcgacggcagcgtgtggatcgccggccaggcgctgaccaccgatggcgcagagaccttccgttccggcgacatgcgcgacgtggcgggttactccatgtcccgcgcggccgcgcagaaggcctacgagcaggccggcctcggtgccgaggacgtcaacctggtggaactgcacgactgcttcgcccagaacgagctgctgacctacgaatccctgggcctgtgcccggaaggcggcgcgcagaaattcgtcgatgatggcgacaacacctacggcggccgttacgtggtcaacccgtccgggggcctgctgtccaagggccacccgatcggcgcgaccggccttgcgcagtgtaccgaactggtccagcaactgcgtggccaggcggagcagcgccaggtggaaggcgcccgcgtggcgctgcagcacaacatcggtatcggcggtgcctgtgtggtcaccctgtatcgcaaagactga

SEQ ID NO: 345280 - DNA, 1197 bp, Pseudomonas aeruginosa
atggattttcaacctgatgccaatctgcaggccttccgcgaggaggtccgggcgttcatcgcgtcgcgcgttccgaaggaactgacggggctgccgcgctgcacgcgctcacctcgcgatcaagtgctgcgctggcagaagctgctcagcgaacagggctggagcgctccctattggcccaaggagcacggcggtaacggctggacggtgcagcagcagctgatcttcgatgaagaatgcgtcgcccatggcacgcccacgctcgatggattcgtgcacaccctgctcgggccggtgttgaatgtctttgcgacacaggagcagcgtgacgagcatctgcccgcggtgttccggggggagcgcttgtggtgccagggcttttccgagccgggttccggatcggacctcgcgtcgctgaaaacccgcgcagtgcgagacggcgatcattacgtcgtcaacggccagaagatctggaccagctatgcccacgaagccgactggatcttcctgttggtgcgcacggataccgaggtgaagaaacaggcgggaatcagcttcctgctggtggacatgaaatccccgggcgtgagcgtgcggccgattcgcagcatcgacgatgcccatcacctgaatgaaaccttcttcgataacgtccgggttcccgtcacgaatctggtgggtgcggagggccagggttgggccattaccaagttcctgctcaataacgaacacgcctttgcggcggacttgcccgcgctccggcgctatatgcgcgaactccgtgagttcgccagcaaattgccggtggacggcacgccgctgatcgagcgcccggagttcgccttgaagctggcgcggctggatgcggagctgcaagcgatcgggatgctggtgcagcgggttgcgcagctggagcagcgacacgatccctcatctccgattctggggtcgatgctcaagatgcgcggtacggagttgcagcagcgcctcacggaggcgcaggtcgaggcgctgggcagctatggcgccgtcgcctatgcgcatccgcatgccgaggcaccggagcggccgtaccccctgcagcaactggcgcgcggcattgccaacgacatgttcttccgtcgcgcttccactatttacggcggcaccagtgaggtgcagcgcggcatcatcgtcaagatgctgttccaactttga

SEQ ID NO: 345281 - DNA, 1140 bp, Pseudomonas aeruginosa
atggacttcgtattgaattctgagcagcagctcctccaggacagcgttcgacgctatatcgacaagcagtacagcttcgaggtgcgcaccgcgctggtaaaggccgggcgcaacggctgcgccgacaactggggcatcttcgcggccaatggctggctgatggccgcgctgcccgaggagcatggcgggttgggtggctcggtgctggacagcgtgatcatcgcccaggagctgggccgcggcctggtactggaacccttcctcggttgcgccgtgctggccgcacagacgctgctggccagcgccgccgaggaacagaaggcacgtttgttgccgcaactggccgagggcagtctgcgcatcgcgctggcctacgccgagccggcttcccgtggcatgccggagcctgtgggcctggtcgccgagccccagggcgagggctaccgtctgagcgggcgcaagaccctggtgctgggtgcggtggatgccacggcgttcatcgtctcggccagcatccccggcgtgccgggcatcagcctgctgctggtggacggcgccagtgccggcctgggtcgccaggcgctgcgcctgcatgacgacacgtgggtcgaagaactgaccttcgatggtgtgcaggtcggcgccgaggcgctgctgggccagcccggccagggcctgcccgcgctgcgcgagggcctggcccagggcaccgtcgtgctctgcgccgagctgatcggggcgatggaaaagaccatcgaagtcaccgccgaatacctcaaggtccgccagcagttcggtgtggccatcggtagcttccaggccctgcagcaccgcatggccgacatggccgccgaactggaactggcccgctcgatgctgcacggggcgctggcctcgctggcgaacgatgacgagccgacccggcagaagaccttgtcggctgcgaagatgctggtctgccgcgccgccaagttcgtctgcggccagggcatccagctgcacggcggcatcggcatgaccgaggaatacctggtcggccactactacaagcgcgcgatcgtcgccgacctgcaactgggcagcagcgaccgccacgaagccgcctgtgccgccgccctgcaggcggaactgcgtggctga

SEQ ID NO: 345282 - DNA, 459 bp, Pseudomonas aeruginosa
atgaaaaagagctacgaaagcatcgcgcaactcaaggccctggtgggcgaagtcatcggcagcagcgagtggctgaccatcgaccaggcgcgtatcaatacctttgccgaggccaccggcgaccaccagtggattcacgtcgaccctgagcgcgctgccaaggggccgttcggcaagccgatcgcccatggtttcctgaccctcagcctgctgccgccgctgatgaccgacgccttcgagatccgcgacgtgaagatggggatcaactacggcctgaacaaggtgcgcttcgtccagccggtgccggtggacagccgcgtgcgcgggcacttccgggtgcaggcgtgggagccgctggaaggcaatggcgcgcagatcacctacgaaatgaccgtcgagatcgagggtgcggccaagccggcctgcgtcgccgaagccatcctgcgggtgttcgcctga

SEQ ID NO: 345283 - DNA, 1119 bp, Pseudomonas aeruginosa
atgagtcaagaacaacaaccccgcggcccgctgcacgggctgcgcatcctggagatcgccggcctgggtccggcgccgttctgcggcatgctgctggccgacctgggcgccgacgtggtgctggtggaccgactgcaggccggccccgaggacctcgacctggagcgccacgccgtgaccaaccgcggcaagcgctccatcgccgtggacctgaagagccccgagggcgtggccaccgtgctggacctggtggccaactgcgacgcgctgctagaaggcatgcgcccgggcgtgatggaacgcctgggtctgggcccggaggtctgcctgcaacgcaacccggcgctggtctacggccgcatgaccggctggggccaggaagggccgctggcccaggcggccggccatgacctcaactacatcgcgctctccggcgcgctgtggtggtccgggcagccgggcgaggcgccgatgacgccgcccagcctggtcggcgacatcggtggcggcgcgctgtacctggcggtgggcatcctcgccgggatcatgaacgcccgcgccaccggccagggccaggtggtggacgccgccatcgtcgatggcagcgcgcacatgctgaacctgatgctcggcctgaagtcggccgggcagatgcacaacgaacgcggccgcagcctgctggacggcccgcactggtaccggacctatcgctgcgccgacggccacttcatctccgtggggtcggtggagccacgcttccacaagctgttgctggagaagctgggcctggctgacgatccgcactacgccaacgcctacgatccgtcgcgctgggagacgttgcaccagggcttcgccgagctgttcgccacccgcacccgcgaccagtggtgcgagctgctcgaaggcagcgacgcctgcttcgcgccggtgttggacatcgacgaagccgcacagcacccgcacatgaccgcgcgggtcgtctattcgcgggtcgatggcgtgctgcaggccaacccggcgccgcgcttctcggccactccggcggccgcaccggggcccgtaccggtgcgcggcgcggccggcgaggagatactgcgcgactggaacctgcgctga

SEQ ID NO: 345284 - DNA, 1668 bp, Pseudomonas aeruginosa
atggacaacaacaatacgacaaccttgctccatcgattcctccactgggaggagacccagcccgacgccgtctacctgagccagccggtgggtgaggaagtattcgactacagctggcgagaagtcggcgaccaggcccggcgcatggccgcctacctgcgcagcctggacctgccggcgggcagcgccgtggccatcctcggcaagaacagcgcgcactggatcatggccgacctggccatctggatggccggccacgtttcggtgccgctctatccgaccctcagcgtcgaatccctggcctatgtgctggatcacgccagcgtgcggctggccttcatcggccgcctggacgtctgggacgagggccgccaggccgccgtcgcgggagtgccgcaagttgccctgccgctggcgccggcgctacatgcgccgagctgggaagaactggccgccagccacgcgcccttgcgcgagctgagcctgccgcgtcccgagcagctcgccaccatcatctacacctccggcaccaccggcatgcccaagggcgtgatgcacagcttcggcagcatgtacacctacgcgcagctgggcggcggcgacttctgccagttgacacccgacgacagcatgctgtcctacctgcccctggcgcacgccgccgagcgttcgtcggtggagtccaactcgctctgccacggtgtgcgggtgctgttcaacgagagcctggagacctttgcccgcgacctctgccgggcgcggccgacggtgttcatttccatgccacgactgtggaccaagttctatcaaggggtctgcaccaggctcggccatgagcagcgcgaggccctggccggccccgacgcggggccgctgaagcggcagatcctcggcatgctcggcctggaccgcacgcgcatcgccttcaccggttcggcgccgctgccggcggagatcgtcgactggtaccgcaacctcggcctggagctgctggaggtctacggcatgtcagagaacttctgctactcgcattacagccggccgggccaggtgcgcctgggctacgtcggccaggccctgcccggggtggaatgccggctttcggcggaaggcgagatcctggtgcgcagccggacccagatgatgggctactaccgcgacccggagctcaccgcgcagaccctgaccgaggacggcttcttccacaccggcgaccgtggcgagctggacaagcagggccggttgcggatcaccgggcggctcaaggaactgttcaagaccagcaagggcaagtacgtcgcgcccggaccggtggagaaccgcctggtcaacgacctggtggaagccgcctgcgttaccggcatgggccagccgcagccgttcgccttgctgctgctgtcacccgacggccgttcgcggctgaccgatgaggccgggagggagatcctgcgcggcgagctgctggcgttgctggagcaggtcaacgccagcctcgagccccacgagcagctggactacctggtggtggtcaaggacgtctggacggtcgacaacggcttcctcacgccgacgctgaagatcaagcgcagcgtcatcgaggatcagtaccagcatcgcgcggccgcctggctggcggcgggtgagccgatcctcttcgaagcgtcctga

SEQ ID NO: 345285 - DNA, 1155 bp, Pseudomonas aeruginosa
atgaaagtcaatttgccgagccaggaacagaagctggcggtggagagtttccgcaagtacctggaggcggaagtccgccccgtggtgcgggagttccgcgaccagcacatccccaaggcgcgcatgcgcgagctcacccagggcatcgccgagttcggcctgcccggggtcagcgtggcggaggaacacggcggccttgggctgtcgctggtcaccgaggccatgctgttcgaggaactctgcgcggtgtcggtggatgtcggcctgtgcgtgatgatcaacaagggcatggcggtcaccctggccgagctgcccccgtcgcaggcgcacctgcgcgagcgctacctggccgacatcatggccgggcgcaccttcggcggcttctgcatcagcgagccggacgtgggctccaacgtcatcgacatcaaggccaccggcaagcgcgatggcgacagcttcatcatcaacggcgagaagacctggatctccaacggccactactcggatttcctgatcaccaccgtgcgcaccggccccaacgagctgtcgcacatcctggtggaccgcgaggagcacggctaccagagcgccaacatcgacaagatcgccctcaacggccagtccaccgcgcaggtgttcttcgaccaggtgcgggtgccggcgcgcaacgtcgtgtgggaggagggctcgggcctgaagaacaccatgaaactgttcgagaaggcccgcgccaacgtcggcatgctctcggtggggctgatgcgcgcggcgctggaagcgtcgatccgctattcccaggagcgccaccagttcggcaagccgatcgccgcgcaccaactggtggcggccaagatcgcggagatggcgaccctgctcgacgcggcgcggctgatgtgtttccgcgccttctcgatgatggatgaaggggtgcgttgcgacgtacagtcgtcgatgtccaagtggttcgccaccgagatggcggtgaaggtgtgccgcgacgcggtgcaactgcacggcggcaacggcctgaccaaggagttcgacgtcgagcgcctggcccgcgaagccatcgtcatcccgattccggacggcaccaccgagatccagaaactgatgatttcccgtgccctgaccggcatctcggcgttcgtctga

SEQ ID NO: 345286 - DNA, 1182 bp, Pseudomonas aeruginosa
atgagtcagaaagtcgtagtcgccggcgtcggcatgatcccgttcatgaagccggggcagaacgagacctacgtggccatgggcgagcaggccgtgcgcctggcgctggccgatgccggcgtcggctatgagtcgatccagcaggcctacgccagctacatctacggcgactccacctcgggccagcgggcgctctacaacgtcggcatgaccggcatcccgctgatcaacgtcaacaacaactgcgccagcggctccaccgcgctgtacctggccaaccaggcgatcgccggcggcatggccgaggtggtgctggcggtgggcttcgaacagatgaatcccggcgcgctgggcgacaccttccacgatcgtccgtcgccggccgacctgttcctgcgccaggccgagcgcgtacccgaggccgcggggctgcctgccgcgctgcgcatcttcggcagcgccggacttgagcacatgaagcgcttcggcacgccgctggaaaccttcgccaagattcgcgccaaggccagccgccacgcggcgaacaaccccaagtcggtgttccgcaaggtggtgaccgccgaggaagtgctggctgaccaggtcctctggcccggcgtgatgacccgcctgatggcctgcccgccgacttgcggcgcggcggcggtggtgctgtgcagcgaggcctacgccaagcgccacggccttgacggcagcgtgtggatcgccggccaggcgctgaccaccgacggcccggagaccttcggcgacgacctgcgcaacatcgccggctactccatgtcgcgcgcggcggcgcagcaggtctacgagcaggccggcctcggcgccgaggacgtcaacctggtggagctgcatgactgcttcgcccataacgaattgctgacctacgaggccctgggcctgtgcccggaaggcggcgcgcagaagttcgtcgacgacggcgacaacacctacggcggccgttacgtggtcaacccctccggcggcctgctgtccaagggccacccgatcggcgccaccggccttgcgcagtgcaccgagctggtccagcagctgcgcggccaggccgaacagcgccaggtggaaggcgcgcgcgtggccttgcagcacaatattggcatcggtggcgcttgtgtggtcaccctgtaccgcaacgactga

SEQ ID NO: 345287 - DNA, 168 bp, Pseudomonas aeruginosa
atggattttcagccgggtgccgggctcgaggcgttccgcctggaggtccgcgactccctgctggcacgcaccgacaccgacgtgaagaagcaggtcggtatcagcttccttccggtgcgcatgaagagcccggatgtcagcgtcgccaaggcgccgttccggctctag

SEQ ID NO: 345288 - DNA, 849 bp, Pseudomonas aeruginosa
atgactgaaaaaagatcgattacccgtcattcgttgggtggtttgactctgccgcctactgtgagggccctcagcggagcggtgttcgatccgagcaccaaacgatggatataccatgacggccttcactcaatcagtgtgaacttcgaaagattgaatagatgtgccacggacgagttaattgcggcagcgaagttccccttgatctggtatgccgaaaacgctgaagggacaacagttgtttcactttttgaccatctgaggcggtttctcgaatccgtatcgattgcgcagggccaggtagttggaaacattgacgcgccgcagctcgcgagttttcgagcttccctctcaacggatactgaatggaaattaggcgccttgagcgcctttctcagaaagtggaatagcttgggagtgccatgcgtgacgaatgctgctgtgcgctttctcaaaagtattcgcctcaaagggaaccgcaagggcgcagcagtcctgacgatggatccgctcaaggggccgcttacggacattgaacgctcggccacacaagcggcactgaacgatgcctttgccgccaacaaggtcgcattggatgactatcttttggcttggctttgtttgctcttggggcagagaaacatccagttcgcaatgttgaaggtctgcgacgtcaaagagattgcgaaaacggatgggagccacgagtacgtacttcgagtgcctagggttaaacaagcaagtgcccaggcgcgacgggagcaattcaaggagcgactgataacccccagcatcggaaaaaatgcttataggctacgcgagcagtgttcgcgaacgattcgagcttga

SEQ ID NO: 345289 - DNA, 1110 bp, Pseudomonas aeruginosa
atggtgctccatctattcctcgactcgaatcggattgatattgagcagcgcattcaaaacggcggtgtttttcgtttaagcgagcttgacgagcttgttcggtactgcaagcgccctgtcgccgatcaactgaagtgcgattcgatttccccttcccatccatccgctcttagacgcgccgctgaaaacgtgcgcctttttcaacgaaaacttgcaccaccagaggtggcaggtcataccgcagctaaccgtattcgggtcatccgggactatcttgattggctcgtgcgataccatatggctcgctatcacccgggtgcaactgagggcgcgaggctttggaatgagtggacctcttgcaaggatgcgctgggcgcgcgactgccgcgccataaagggagaaatactattgggcagcgggaagggcttcagccagaggtggtggagagacttctcagtgttacgtcgccaacatcaccggacaacccttggaaggggaagagcacacgcattcgaaatgctctcctagttcgctggttctacgagcttggcctacgtcgtggcgaacttttaaatgtaaaaattcccgacattaacttccagtcggaagagctgattgtggccagacgggcagacgatccggaggatccccgaaaggatcagccattggtcaagacacgtgatagaaaaattccgttatccccaggtctttgcaggctgacgcacgaatatataacgaatacacgccgaaacactgaaggcgcaaggcgtcacccattcctgttcatcgccgtgggcacagggtcgcccctgtcgctcagtgccatgaatgctgttttcgccgaacttcgaaatgcctttaatggcgagttcgatgctgtgactccgcatgttcttcgccacacgtggaacgaccgcttctcggacatcatgaacaatgcgaaggtctctgacgccgaggaagaacgcatgcgctcgttcttgatggggtgggcgccgacctcgaaaaccgctgggcaatacactcgtcgacacgttcgactgaaagctcagcaggtgtccttagcgatgcaagccaagcaagtagacggtgtgacgagcgatgactga

SEQ ID NO: 345290 - DNA, 369 bp, Pseudomonas aeruginosa
atgaatgccaaggcagaagccaaagaatcacgttttgatctcttgaaatggctcttggttgccgttctggttgtggttgccgtcgtaggtaaccagtacttttcggctcaaccaatcctgtatcgcgttctcggtattctcgttctggcggtgatcgctgccttcctggcgttgcaaacggccaaggggcaggccttctttagtcttgctaaggaagcgcgcgtcgagattcgcaaggtcgtatggccgagtcgtcaagaaacaactcagaccacgctgatcgtggtcgcggtagtgctggtgatggcgctgctgctgtgggggctcgattccctgctgggttggttggtttccatgattgtaggttaa

SEQ ID NO: 345291 - DNA, 750 bp, Pseudomonas aeruginosa
atgattcttgagctcgactgtggaaactcgctgatcaagtggcgggtcatcgatgggggcggcggacgctcggtcgcgggtgggttggcggactccgacgaagccctcgtcgaacagctttccctgcgccgggacctgccggttcgtgcctgtcgcctggtgagcgtgcgcagcgagcaggaaacctcccagctgatcgctcggctggagcggctgtttccggtttccgtcctcgttgccgcgccgggacggcaactggccggtgtgcgcaatggttatctcgactaccagcgcttgggactggatcgctggctcgccctggtcgccggccatcacctggcgcagaaggcctgcctggtcatcgacctgggcacggcggtgacgtccgacctggtcgcggcgaatggcacccacctgggcggctatatatgcccgggcatgtcgctgatgagaagccagctacgtacccatacgcggcggattcgctacgacgataccgaggctcgccgggcgatgggtagtctccatcccgggcaggcaactgccgaggcggtggagcgtggctgtctgctcatgctcagggggttcgttcgcgagcaatacgccatggcctgcgagttgctaggcgcggactgtgaaatcttcctgacgggaggcgatgccgagttggttcgcgacgagttggctcgggcccggatcatccccgacctggtgttcgtggggctggctcttgcctgtccgatagaatga

SEQ ID NO: 345292 - DNA, 882 bp, Pseudomonas aeruginosa
gtgctgggcatcagccgtagcgcggtctggaaacgtctgcagcatctggaggccgaacatggcctgcagttccacaaggtgcgtggacggggctaccgcctggcgagccccatcagcctcctggatccgcaacgaatcgaggggttctggcccgtcgagattctttccgccatcgactcgaccaacagcgaggccatgcgcaggctggcggcaggtgcttcgacgcctttcgtcctcgtcgccgagcagcagacggccggccgagggcggcgtggccgcgtctggatcagtccctatggagagaacctctattattctctggccgttaccgtcaggggtggggcccgggagctcgaagggctgagcctggtcgtcggcctggcggtgctcaaggtgctggatctgctgcaggtctccaaggcaggtttgaagtggccgaacgacctcctgcaggatggtcggaaaatcgccggaatactgctggaactcagtggggatccggcggacctgtgccaggtcgtcatcggcatcggcatcaacgtcaatatgaaggttgccaccgatatcgaccagccatggacatccttgcgcgaggcgctgggtgggttggtggatcgttcgcacctgctttccgtgctcaatcagcaactggcgtggtacctggacaggcattcgcgtgagggcttcgcggcgagtcgcgaggaatgggaggcgcgcaatctctggcaaggtgccctcgtcagcctgtcgacttcctcgacgtccatcgagggtcgggtgttgggcgtcgacgctcgaggtgcgttgcgcctcgaggtgggaggagtggagcagagcttcagtgggggagagctaagtttgaggttgcgcaatgattcttga

SEQ ID NO: 345293 - DNA, 930 bp, Pseudomonas aeruginosa
gtgaaaatcatacttgcccaaccgcgcggcttctgcgcaggcgtggagagagccatcgagagtgtggagagcgccctggagcagttcggcgcgccggtgtacgtgctccatgaaatcgtgcacaaccggcatgtggtgcgcagcctggaaggcaagggcgcgcgcttcgtcgaacggttggacgaggtgccggcgggtgcggtcctgctgttcagcgcccatggcgtggcgcagagggtcgaggaccaggcggcggaggcgggcctgcgggcctttaatgcgacctgcccgctggtactgaaggttcaccgccagggacgccagtatgccgccaagggataccggatcatcctgatcggcgacatcgatcatcaggaagtgatcggcaccgttggccagatccccgcgccagtgacggttctgcgcaaggtcgaagaggtcggggcgctgccgttcgccgccgacacgccgctggcctacatcacccagaccaccctgagcatggacgatacccgggccgttgtcgcggcgctgcgccagcgctacccgcagatcgtcggtccggatacccgcaacatctgctatgccgtgcagaaccgccagttggcggtgcgcagcctcagccggcaggtgcaactcgtgctggtggtgggcgggcacaacagcgcgaattcggaaaccctccgctgggtcgccgagtgcgagggcattcccagctaccggctggccaacggcagcgagttgcgccgggagtggttcgacggaatctcgacggttggcctcagcgccggtgcctccacgccggaagcgatgatcgacgacgtactggatcgcatcggccagtggatgccggtggaaatcggcctgcagccgggcatcgaagaatacgcgcagttccagttgcccgcgggactgatcgctcgccagtga

SEQ ID NO: 345294 - DNA, 1872 bp, Pseudomonas aeruginosa
atgtcttccatccccaatcggagcaagcgctcccccctgcggttcggcaaggacctcaccgcgctgatcccggactttccctttcactaccagcgctacctgcgcaacgccggcagcgctccgctctgcgatgtccccgaggaggcgcacggcaagaaggtgctggtgatcggcggcggcgtcgccgggctggtggcggcctacgaagtgatgcgcatgggcttgcagccgatactgctggaagccagccaaaggattggcggccgtttctgcgcgcagccgcgtggcaacgcgagcgcgccgggcggacagacgctctgcgaactcggcggcatgcgtttcccgctgtccggcaaggccctgttccactatttcgacaaggtcggcatggccctgaactctgcgcccttccccaacccgggaaccgaggcggcggtcagcacgctggtggactaccaggggcgccagcagtactacgaggtgcgcccggcaggacaacccaacccgttccccaagccgccggagtacgaccagctggaagaccagttcttcggcacgttcctcgaagccttccagttcaccgagatggaggcggccatgaccgagccggtgaccgaggccaagcagcagcggatcaaggcgctgtggaaggacatcgtcgccccggcgcagggccgcagctgggatgacgtgagcttctacctggccctggtggaaaagtccgggtggagtcgggagcagatcgacctgttcggccagatcggcttcggcaccggaggctggaacaccgactacccgaacagcattctcgaagtgctacgggtgctctataccggcctggatgtcgaccatcgactgatgtacgacggctcttccgccctgccggagcgcctgctgaacacgccgcccgccgatttcggcgaccagtgccggcattgggggtcgcgggagtccgtgctgtcgctgacccgacgctgtgtcgactcgccgctgggcaaggaggtgttgcgcatcgccaggggcacgcacggcgggttcgtcgccaccctgcgcgatagcgccagcggcgccgaaagccagctcgatgccgacctggtcatccataccccgcatgtacgcctgctcgacaagctgcgttacagcggcacgccggcacagatcgcggccgccgacgccctgctcggcagcgagctgtgggaagcggtgatgtatacccactacatgcagtccaccaagctgttcgccgccacccgctcggctttctggaccgagcgtggcagcgacgacaggcggatcttcagcctcaccctttccgatcggctgacccgtggcacctacctggtggactacgccggcagcagcggatgctacaagggcgctggcatcttcctgtcctatacctggaacgacgattcgctgaagttccttggccgctgtcccgatctgctgacgggcgacagcccgccggcttcgccgttgccggaagacatcgggttgtgcacgcacctgctggaaaagctctatccgaacgccgagttgcgcagccactacaccgacgtgcagcccttcgcccaggtcaactgggaaaaccagggccactacctgggtgccttcaagatgaatctgccaggccagtacgagctacagcggcggatcttctcgcagttcatgcagggggtggccgaaggcgcaccctaccgtttcatcctcgccggcgatgacgtgtcctggaccggtggctgggcggaaggcgcggtcggtacggcgctcaacgcggtgaacaaggtggcggtctgcctgggcggcggtagccggcccgacaacccggggccggtggagtcctgggaaagcttgcagccggtgccccgctga

SEQ ID NO: 345295 - DNA, 1638 bp, Pseudomonas aeruginosa
atgcaccaacctgaaaacccggctcgccgcaccctgctggggcaggccgtggccggctccgcggcgctggccctgggctcgctgctcggtagcgcggccggcccggccgctgccgcgggagccagcccgcgcaaggccttcgacggcggcagcatcgacctgctgatcgtcggcggcggtgccgccggcgcggtcctggcgcgccgcctgagcgagcgcggcgagcgccgcgtgcttctgctggaggccggcgaggcctacccggcctgggactatccgaaggtcatcgccagcagcgacagcgtcggcggcgatacgagctgcgactggggctaccagagccagccgggtgcgatcggccacccgttgcacgcgatccgcggcaaggtcctgggcggtagctcggcgatcaacggcgcggtggcgattcgcgggcggcgcgaagatttcgccaactggaacctgccgggctggtcctacgaggaacttctgccggccttccgccgcctggagaaccgccagggcggcgatccggcgctgcatggccaggacggcccgctgccggtgcggcagctgacccgcgaggacctgacgccgatgcagcgcgccttcgtcgacgcgacccgggccaacggcttccgggccatcgccgacttcgacggcgccgacgccaacggcgtcggcgcgtacccgatgaacatcgtcaacggcgtgcgcgtcaacaccgggatggcctacctcgacaatccggtgcgcgcccgcgccaacctggcgatccgcgacaacgccacggtcgaccgggtgctgttcgacggcaggcgcgcggtcggcgtgcgcctggtctcgggcgaggagatccacgccagcgaagtcatcctcagtgccggcgcctacggcagcccggcgatcctgctgcgctcggggatcggcccggccgaccagttgaaggcgctgtcgatcccgctgctggccgacctgccggtggggcggcggctcaaggaccatccgttctactacaacgcctacgcggcccgcccggagcgaatcggcgcgcaatcgccggtgatcggcgccaagctctggacccatagctcgcgggcgaagaacggcgagctggacctgcacatcaccgccacccacctgttccccagcgagatgagcccgaccggggtcggcttcgtcctcgccgtggccctgacccgcccgcaatcgctgggcagcctgcgcctggccagccgcgacccggcggcggcgccgctgatcgacctgaacttcctcgccgaggccgaggaccgtgcgcggttgctcgaaggagtcaagctggcgcggcgcatcggccagaccgaaccgctggccgatctgatccatgccgagctcggcccggggccgcaggcacgcagcgacgcacagatcgaggaggcgatccgcgccaccctcgacacctaccaccatccgacctcgaccgcgccgatgggccgcgtcggcgatagccgggcggtggtcgacctcgaaggccgggtgcacggcctgcaggggctgcgggtggtggacgcgtcgatcttcccggacaccatctcggtggccacccatgtcaccaccctcgcggtggccgagcacatcgcccggcgcatcgcctga

SEQ ID NO: 345296 - DNA, 1518 bp, Pseudomonas aeruginosa
atgaacagacatgccagacactggatcgacgccgaatgggtcgactccacgcaacaggggcaatccttcgacccggccagcggccaaccgatcggcacctatgccgacggcgggcgggccgaggccgatgcggccatcgacgcggcattgcgggccttcgaagaaggcccgtggaaggaggaccatgccttgcgggcgaaggtcctcgaggagatcgccgccgccttcgagcgccacgccgaccggctcatcgagctgctggccctggagaacggcaagatcaagcccgaggcggccttcgaggtcggcatggtgccgggcaagttgcgctactacgccggcctggcgcgcagcgagcgcggcgccagcggcacgccgcggcccgacgtggtgtcgctggtgctgcgcgaaccgatgggcgtggccgggatcatcgtgccgtggaattcgccggtggtcctgctggtccgcgcgctggccccggcgctggcagccggcaccaccgtcgtggcgaagatgccggcgcagaccgcgcagaccaatgccctggtggcgcagatcatcgccgaggcgccgtccctgcccagcggggtggtgaacatcttcagcgagtccggttccgaaggcgcccgccagttgatcgcctcgccggcggtgccggtgatcagcttcaccggctcgaccgccaccggccgggcgatctccgccgccggcgcgcaacaactgaaacgcttcggcctggagctgggcggcaagactccgcacctggtgttcgacgacgccgacctcgacgccgccctgccggtgctggagaagtcgctgacggtgttcgccggccagttctgcatgaccggttcgcgcctgctggtccagcgcggcgtcgccgggcgcctgcgcgaacgcctggcgcaacgcctggaggcggtgcgcgtgggggcggcggcggacccacgcagcgagatggggccgctgatcgacaaggccagcgtcgaacgcgtcgagcgcgcggtgcggcaggcgatcgacgccggcgcgcgggtcctggtgcgcggcggcccggtccgcgaggggccgttggccgccggcgccttctatcggccgaccctgctcgaagtcgacgacccggcgctggacatcgtgcagaaggagaccttcggcccggtgctgaccctccaggtgttcgacagcgaggaggagggcgtggccctggccaacgacagcgaatacggcctcgccgccggggtctggacgcgcgatgtcgcacgctcgttccgggtggcgcggaagatccgcgccggcaccgtgtggatcaacgactgggcccgggtctacgacgagttcgaggaaggcggctaccgccagtccgggctcggccgcctgaacggcgtcgccgccctcgacgacttcatcgagtacaagcacatcagcctgtccaccggcgccgggaccggcgtcattcccaggagcgcgaatactcgtggtcgcggaacatctcgggcagcccggaaacctgcttga

SEQ ID NO: 345297 - DNA, 633 bp, Pseudomonas aeruginosa
atgccacagacaaccactctggcggagcgcgccgaagcgctgttccgcgaactggacgacttgccgcttgccgagcggattgagacgctcaaccggctccgcggactgctgcacgcccacagcccgttcgccgaccaaccggtggactgcgtgcaatgggtgcgcgccgaacaggtcgcggggaacgactacaaccccaacagcgtcgcgcctccggaaatgcgcctgctgcgcctgtccatcgaggcggacggcttcacccagccgatcgtcgcctatccgcaggccgatggccgcttcgaggtggtcgacggatttcaccgcctgcgcgtgggcagcggcaagggtctgcgccaacgtctgcatggctacctgccgctcgccagcatccgcccttcccgtactggcggcagcgagcgcatcgccgccaccatccgccacaatcgcgcccgcggcgtgcacggcgtgctgccgatgacggcgatcgtggtcagcctgttgcgggccggctggagcgaggccgacgtggcccgcgaactgggcatggacaacgacgaagtactgcgtttcaagcaggtttccgggctgcccgagatgttccgcgaccacgagtattcgcgctcctgggaatga

SEQ ID NO: 345298 - DNA, 642 bp, Pseudomonas aeruginosa
atgaacgctccgcaatccgcccagcgttcaaccgccgccgtggtggtgcagagcctgctctggctttggctgttcggcctcagcgtcttcgtagccctcggctaccaggccatgcacgaccaggccgaccaggagaggctggattcccgcctgcaacgcctcgaagcgcaggcaacaggcctggccgagaccatcgagaccatccaacagcgtccggccgtcgcaacggcggtagacctcaaagacacccgccaaatccttgaagcacgcgcggcccaggtcgagaaagcgctgagcggctatgccgctgccgacgaccttcagtcgctgcgcgccgaggtcgagcagctcaagacgcgccagaccgcagcacgcgccgcggcaccggcccagtcgcgcgcaccgagcaaggctgctgccaggcccgagccaccgccgctcccgttccgcatcgtcggcgccgaactgcgcgccggccagcgcagcgtgtccgtcgcgccgagcaatggggacttcacgcctgaccagcttcaggtgctgctgcccggcgatgcgatcggcctgtggcgcttgctggccgtcgaaggcagcaccgcggtgttccaggccggcgaccagacccgtcgcatggcgattccctga

SEQ ID NO: 345299 - DNA, 354 bp, Pseudomonas aeruginosa
atgcactacaagctcgacggtcgtcgtgccgtaccgtgcgagagcattgccgagtggggcgcctggttttcagtagctgatcggcgggtggtggaaacctgggtcgatgacgtccgtatctccacggtctttcttgggctggaccacaaccacggacttagtggagatccactcctgttcgagacgatggtctttgtggatggtgtgacgcaccagatgcgccggtacttcatctgggaggaagcggaagccggccacgccgagatgactgagttgatccgagccgaaatgcaggaagcgcaggtgcgcgctgcgcaggcctgggaacaggtgcgtgcgcggatgaaggcctga

SEQ ID NO: 345300 - DNA, 495 bp, Pseudomonas aeruginosa
atgtctctcatcgccaatggctcctgcgtggagccacgtttttcctcagcgtcccaatctgatgaccggatcatccggcaagccctcacgctgctggagcagcgggtcttcaagaaggggccatttttggaagggcccaacgctgtcaaggattacctgcgcctgaaattggccgccgagccgaacgaaatcttcgccgtcgtgttcctcaacaacaagcacgaggtactcgcctacgagccgatgttcaagggcacggtccattcggccacggtacatgcgcgcccgatcatgcagcgtgccctggaactgaacgccgcagctgtcattttttcgcaccaacacccttcaggctgcacggagccgtcaagcgaggaccgcgcgatcacccaaacactgagggccacgttgtcgctgatcgacgtgagggtgctggatcacctcatcgtcggccaaggcacgccttactcgttcgcggaatccggcctgctgtag

SEQ ID NO: 345301 - DNA, 360 bp, Pseudomonas aeruginosa
atgagtccgacgcgcgcgacctggctgcgcccgcgctggctgttcggccggcgcgcggcgaaggcgctgctgtgggcagtggtgctcgccgccgccgccgtgggcgccaacatcgtcggcatctccctcgtcggcagcgtggccggctgggaacggtggctggcggccgcttcgggctactttctggtgtggcggctgtgcttgtacggcgcgacggtctacggatggatgtggatgcgccgccgggtgctggcgcgcgataccgacgacacccaggcacggcgccgcctggtgcgcagcgagatcgccggcgtcatcgccatcgtggcgctggaagccagcctgctgatgcaaggctga

SEQ ID NO: 345302 - DNA, 591 bp, Pseudomonas aeruginosa
atgtgggatgaacggtactccgacgaaaattatgtctacggcaccgcgccgaacaccttcctggcagagcatgtgcagatgttgcagggcccggtactcagcctggccgagggagagggccgcaatgccgtcttcatggcttcccatggtctggacgtgcttggtgtcgatggctcggcggtcgggctggccaaggctcgccaactcgctcagcgccacggcgtgacgattcgggtggaacaggcggatctggcatcctacgtgccaccggaagcaacgttcggcgcggtggtctcgatcttcggacatctgcccggccaggcgcgaaaacggctgcatgcgctggtggagcggtcgctcaggcccggaggcattttcctgctggagagctacagcaaggcgcagattgatcgcgataccggcggcccgaagaatctcgacatgctggtgcggcgcgaagacatcgaacgggagttccaggcttgcgaaatactcctgtcgcaagagatcgagcgcgaagtgatcgaagggcaattccatacggggctggccagcgtggtccagttcatcgcccgcaagaaagcgccgtaa

SEQ ID NO: 345303 - DNA, 822 bp, Pseudomonas aeruginosa
ttgcacgctggcgtggcgcatggcgccggcgtcctgatggacgcattgcttcagacaatcgcctcgatcgggtccggtgcgctggtgggcttcgtcctcgggctgatcggcggcggcggttcgatccttgccacgcccctgttgctgtacgtcgtcggcgtcgcacagccgcacatcgcgatcggcaccggagccttggcggtttcggccaatgcctatgccaacttcattgcgcatgcgcgcaagcgcaacgtgtgctggcgctgtgcgatcgtctttgcgctcgtcggtacggtcggcgcgctggctggctccaccctgggcaagacactggatgggcagaagctgctgttcctcttcggtctggtgatgatcgccgttggcctgtcgatgctgcggccgcggcgcgaccacgatgcggcgcgggaagtcaccaccctacggaattgcctgcggaccgctgcggctgccctcgtcgctggagcggcatcaggcttcttcggcatcggcggtggtttcctgatcgtgccggcgctgatgctcgcctccggcatgtcgatgagcaatgccgtcggttcctcgctgctggcggtggggacattcggcctggccacggccctgaactacgcggcctccggcctggtggactggaagatcgcggggctcttcatcctgggcggcattggtggcggcgtgatgggtacacgcctgtctctgcgattgggggggcaccgcaatgcgcttggcaggatcttcgcaggcatcgttttcgcggttgccctgtacatcctctaccgtagtgcgtcggccctgttcgggtga

SEQ ID NO: 345304 - DNA, 702 bp, Pseudomonas aeruginosa
atgagtagttgtgccgattcctcccccaaacctgtcgcgcccgcacccagcgccggcaccgatagcgccgtgacggccatgccgcgcatcaacgagccggccccggacttcacggcgcagaccacgcacggttcgcgctcgctcgccgactacaaggggaagtggctggtgctgttctcgcacccggccgatttcaccccggtctgcacgaccgaattcatcgccttcgcgcaggccgccgatcagttccgcgccctcgacaccgaattgctggggctgtcgatcgactcgatctactcgcacctggcctgggtccagaacatcgaggaaaagttcggcgtcgagatcagcttccccatcatcgaggacctggcgatgaatgtggcccgcgcctacgggatgatccaccccggtgcgtcggacacgtccgccgtgcgcgccacgttcgtgatcgacgaccagggcctgctgcgcgcaatggtctactaccccatgaccaatggccgctcggtcgccgaaatcctgcggctggtgaaaagcctgcggcacagcctcgccaatggcgtggcgacgccggaaggatggcagcccggtgagcaggttctggtcggtgcgccgaagaccgtcgaggaactgaagaagcgcctcggcgagggcctggagaccaccgactggtatttctcgaagaagccgctggcctga

SEQ ID NO: 345305 - DNA, 1014 bp, Pseudomonas aeruginosa
atggatgaatctagtatcgcaaaactcgatcacggagtcagtttttattcgtttccattgattatgaatcgcgcctatcgtgtccccatgccaaacgcatccgaatggagaaaaagcatggcaagcatgattccacatccagtcgacctgggcatcagcccggaggtcaccgccttcttcgacgaggcgaccaacaccatcagctatgtcgtcaaggacccggccagttcggcttgcgcgatcgtcgattccgtcatggacatcgactacgccgccggcaggatctcgttcgagcacgcggatcggatcgccgagcatgtgcgcgcccagggcctccaggtcgaatggctgatcgaaacccatgtccatgccgaccacctctcggcagcgccgtatttgcaggagcaactgggcgggaaaatcggcatcggcgagcgcatcgttcaggtgcaggagaccttcggcaaggtcttcaacgaaggcaccgagttcgcacgcgacggaagccagttcgaccgcctgttcgtcgacggcgatagctaccggatcggctcgatgacggctttcgccatgcacacgccgggccacaccccggcctgtatgacccacgtgattggtgactcggctttcgtcggcgataccctgttcatgcccgatggcgggacggcgcgcgccgatttcccgggaggcgacgcccgcacgctgtaccggtccacccgcaggattctggcgctgccggacgcaacgcggttgttcatgtgccacgactacggccccggcgggcgtgatatccgctgggaaaccacggttggggagcagcgggttcgcaacatccatgtccaggatggcgtggacgaagacgacttcgtgcgcatgcgcacggaacgcgatgccacgctggcgatgccccgcctgatcctgccgtcgctgcagatcaacatgcgtgccggcaggctgccgccccgggaccgggatggccgtctgtttctgaaagtccccctcgacgccctctga

SEQ ID NO: 345306 - DNA, 969 bp, Pseudomonas aeruginosa
atgaagccattgcccaatctgcgtcacctgcgctacctggtggccctgcacgaccaactgagcttcagccgcgctgctgaagcgtgtttcgtcacccagtcaaccctgagcgcgggtatccgcgagctggaaaacgcgctcggcatcgctgtggccgaacgcagtcggcattcggtggtgatcacgcccgctggacgcagcttggtgggacgcgcacgcctgctgctgcaggacgccgagtcgctgatggccatggcgctggaggaaggcaaaccgatgtcgggcacgatcgaactcggcgtgttgccgacgatcgggcccttcctgctgccacgcctgatccgggatatccgccagcgatttcctcaccttcggctacggctgcgcgaggacaagacccgcgacttgctcgaccggctgactgaaggccgtctggatctggtgctgatggcgttcccctacgagaccggcaatctcgacacctatccgttgttcgaggatgcctatcgctacgtgtgcgcttcgtcccttgcaccgcagccgggtatctgtgccgcaccgattcccgaccgcgatatccagtcccaggatatgctgctgctggaacccgaccattgcctgcaccgccatgcgctcccgatcctgcaacgcgcggcggaaagcgatcacgcctgcttcgcctcgaccagccttcataccctcgtggcgatggtgtccgagggcatgggtgccaccttgctgccggacctggcgatcaacggcggcatcctgcaaagcgccgacgttctcgtgcgccccctgcgtcaggatgcgaatgcgcgcaccatcggcctgtgctggcgcaagggctcgccccgcaccgagatgttccagagcctggggcaattcatgcgcgaatgggccgtacaacacatccgcccgtgggtgccagtggaacgcgacaacgtaccgcgaaagcgcatcacctga

SEQ ID NO: 345307 - DNA, 1836 bp, Pseudomonas aeruginosa
atgctttcgctgttccagcgtaaacggacgtcgccgaccaccggctcgccatccacgcccctcgccgagctgccgaaagggctgacgcggccggagccggccgcgtcgctgttggcgaccccgcgccggcgacgtctgctggaacacatctggcagcgcacatcgctgtcgcgtcggcagttctccgcgctctacctggcaccgctggaacggtatgccgaactggtccagcagttcccagcctcggaagcgcaccaccatgcctggcctggcggcatgctggatcacgggctggaaatcatggcattcgcactcaagctgcggcagtcgcacctgatgccggtcggcatcacgcccgaagctcaggctgcgcaggccgaggcttggaccgccggcactgcctacgccgcgctgctccacgatattggcaaggtcgcggtggatctgcacgtcgagtatgccgacggcaacatctggcatccctggcacgggccgctgcgaaagccgtatcgcttccgctaccgcaaggaccgcgaataccgcctgcacggcgcggccaccggactgctctacacgcgcatactcgacagtgacatcctggattggctcagcgactaccccgatctctggtctgcgctgctgtacgtgatggccgggcagtacgaacatgccggcctcctgggagaactggtggttcaggccgaccaggcatcggtcgctcaggcactgggcggcgacccagccaaggcgatgacagcgccccggcatgccttgcagcgcaagctgctcgatggcctgcgccatctgctgcgccaggagctgaagctcaaccagccccaggcctcggatggatggctgacacaggacagcttgtggctcgtcagcaagacggtttccgacaagctgcgtgcctacctgctgtcgcagggcatcgacggaattccatcgaacaacaccgcggtttttaccgtgctgcaagaccacggcatcgcgcagccgaccccggacggcaaggctatctggaaggccaccgtcaccagcggcgcgggttggagccacagctttaccttcctgcgcctgtcgcccgcgctgatctgggaagcggccgagcgccccgagcccttcgtcggcaacgtggtcgtagaggagagtgtgtcgtctggggacgatgttcctgccgctggacccgaggccgcgactgcgactgcgcccgctcatgcccccgcgatcgcttcggctccgccgaccactgcatcacggcccccggcgcaggccgacccgcttgctgatgtgctgtcgatgttcggcgtcgacgaaacgcccgccggcgagccaccggtctctgaagcacccgtcctgcaacccacggcgacaccggagaccgccatcgaaccgcagctggccacgccgcccgagaccacgccttctggggagcacttcatggcgtggctgcgggctggcgtcaacgcccgccggctcatcatcaacgatgccaaggcgttggtgcacacagtcgatggcaccgcctacttggtcagccctggcctgttccagcgctacgcccaggagttcctgcaggtcgcaatgctcgctaagcaggacgatgtgaccgactggcaatgggtccagaaacggttcgagaagctgcagttgcaccgtaagcagcccagcggcctgaacatctggacctgcgaggtgacggggccacgcaagtcccggcggctgcatggttacctactgcaagaccctacctgcctgtttgaagaaagtccgccgaataatccttacctgtgcctgcaaccgcaaggcactgcaaggacgcggcaaaccgattga

SEQ ID NO: 345308 - DNA, 258 bp, Pseudomonas aeruginosa
atgaccacctttgaagtcaaagacatgacctgcggccactgtgtcagcaccatcaccaaggcgctgaagtcggtcgacgaacaggcccagttcaccatcgaccaggccagccagcgggtcacgatcgagtcgagtacggccgacccgcagacgcttcgcgatgccatcgccgaggctggctacacgcccgtttcggtcgaggcaggcgcacccaagtcggacgatcaggcgaagacctgctgcggccgcggccagtga

SEQ ID NO: 345309 - DNA, 561 bp, Pseudomonas aeruginosa
gtgcaggggcaccgcatcggctacgtccgggtcagcagcttcgaccagaacccggaacgccaactggaacagacccaggtgagcaaggtgttcaccgacaaggcatccggcaaggacacccagcgcccccagctcgaagcgctgctgagcttcgtccgcgagggcgacacggtggtggtgcacagcatggatcgcctggcccgcaacctcgacgacctgcgccgcttggtgcagaagctgacccagcgcggcgtacgcatcgagttcttgaaggaggggctggtattcaccggcgaggactcgccgatggccaacctgatgctgtcggtaatgggggccttcgctgagttcgagcgcgctctgatccgtgagcggcagcgcgagggtatcgccctggccaagcagcgcggcgcgtaccggggccgcaagaaggccctgtccgacgagcagactgttaccctgcggcagcgggcggcggcaggtgagtccaaggcgcagctcgcccgcgagttcaacatcagccgcgaaactctctaccagtacctccgcacggacgactga

SEQ ID NO: 345310 - DNA, 540 bp, Pseudomonas aeruginosa
gtgatccgccgcaccctgacccgcaccggctttgtcatcgaccacatccactactacgccgacgccctcaagccgtggattgcccggcgcgagcgcttgcccgccttcctgatccggcgcgatccgcgcgacatcagccgcatctgggtactggaaccggaaggtcagcactatctggagatccactaccgcaccttgtcccatccggccgtcaccctctgggaacaacgccaggcgctggccaaattgcgtcagctcgggcgcgagcaggtggacgagtcggcgctgttccgcatgatcgggcagatgcgcgagatcgtgaccaccgcccagaaggccacgcgcaaggcgcggcgcgacgctgatcgccgccagcacctcaagacgtcggagccaccggccaagcccataccgccggatgtggacatggctgacccgcaggcagacaacctgccgccggccaaaccgttcgatcagatcgaggagtggtcgccgtcgatgaatataagaggacttgccatggaatgctctcggacatag

SEQ ID NO: 345311 - DNA, 1251 bp, Pseudomonas aeruginosa
atggttaaatggattattccctcgatggctcccgttgtcgctgaggccatcgccaaaattaggcgtttgacggaagacgctcgtcgtattgctcaatggtatgagtttaatcctgaaaggctgtatctgccccacgatttggaacacctcaggaggcaagagctgctgacaatggatgaagttcaacaggtgattttgctgggggaagggtcggcttcatttgcgaggctatggtgcaatgcaaataatgtgttgttgattaggaatggcagcggtgtatgcgcgcgatttgctgatgttgaaaaggccgctatagcgcaacttccatccgggtttccgctgctaaacacggagatgggactcaaatattcggaggcgctcatcgtagtgcggcgtaatgaactccactctgcaagaggtacatttggctgtgtcattgagccggtcagcatcaatcaggtgaatactgcactcggcaccagaagtgagcatggctttgagtcgatgtttgagcgccttggcttcactgagccagatggcagccaaatccgagtatctacccatcagttccgtcactacctgaacaccctggcgcaggcgggggggatgagccagttggatattgcgaagtggtcggggcgcttggatgttcgtcaaaacgaggcttatgaccatgtgagcgcagatcagatggtggcaaagattcgtgagtccattggcgacgaatcccatatgttcggcccgctggcaaagctgccgaagaatatcccgatttcacgagatgagtttgcacggcttaagattccgacagcccatacgactgactttggcttctgcgtccatgattacacgatgatgccatgcgaccggcatgccgactgcatcaactgcaacgagcatgtatgtgtgaagggcgatgaaggtaaggccatgatggtcaaacgtcggctacaggatgcgcaggaattgctggcgcgtgctgaagctgcgacggtgaagggctactacggagcggatcgctggatggagcaccataagaagactgtactacgtctgatacagcttacagagattcttgataacccagcagttccaaccggctctgtaattcagctggctgatgttccgatcatttcttcgacgggagtggagcaagcgctcgaggatcgggccgcattggatggttattcgacgctaaagcgcttggcgccgactaacgcgagccgaatgaagcggagcaagcatggctaa

SEQ ID NO: 345312 - DNA, 276 bp, Pseudomonas aeruginosa
atggaactgaaacaagcattcgggcaggctcttaagcagctcagaatgagccaagggctcactcaggaggatttttccgacgtaagcagtagaacctatctcagcacgcttgaacgaggcctgaagagcccgaccctcgataagcttgacgagattgcatatgtcatggaggtgcaccccgtgtcgatccttgtccacagttacttgctgcgcgatagatcaatgaccatcgagcaactgttcaaacgtgttcaggaagagcttggaaacctctga

SEQ ID NO: 345313 - DNA, 471 bp, Pseudomonas aeruginosa
atgaatctagatcagcaggatgaagtgtctgtccttcagttaatcaacgttatctgttcgcggagcccccgacaggttcctgaagatgccctaaccgacttcgcaaagcaggtctggtatggagagctggatctggttcctctgcttagggagcacctggtgcggtcgggcatggccgacgagcaaagtcgacgtctgctctacgttgtcgatcgactgacctgttacccctgcatgctacgttcgaaggccgctcagctcagggaggttttgggagaatgggctgagctgaagcccgcccaaccaaccccttatgctgtcgaactcgccgctcggcacatgcttgataagaaggccttcgagtggggcctagaagaggacatcacgccgcagatgaagtcagtgctgcagtaccagacgcgtcattacgctgcatctctggggagggtgactggatattctgagtcatag

SEQ ID NO: 345314 - DNA, 198 bp, Pseudomonas aeruginosa
atgaagcgttgcgagttggaacaggaattctttggaggccatgacatctgggctcaaaggcgggacaggctcggcaggctcgtcgaccatctccttgagctgattcacgtctcgttcgaactcagcctcaacagggcctgctttgagccttctgagaaacggcaaaagcatccgcagctctttcctcaagactattag

SEQ ID NO: 345315 - DNA, 1212 bp, Pseudomonas aeruginosa
atggatggaacagattcgaacactgttcatgacgcatcggcggctgcgctaggtttttactatcagagccagtatgcgctactaatgttggtacggctgaaaacagacgatgctgctgtggccattgagaggcttgatgacgttgaaatcaagtccaatggacagtccttgctgtaccaactcaaacactccatccaagaaaacccgcctccagttacgctcgcatgtgtggcgctatggaagaccatcaaggtttggatagacgccctccctttggtatcgctcgctgatacgaggttccacctcgtcgcagtgggccccgtacccgacggctctccgttgatggcactgtgcgacgaggaaactgatcgagagcccttcctcaacgcaatgcttgaggaggcgcagagggttgtcgcagagcgtgcggacgatcgagcaaacaaagtcagtcttcgccatgctgctcgtgccaaaggctgtgaggcctttctcgcgcttgacccgaccatcagatccagtcttctcaagcgaatcttcataaagcctgatgaagtcaccatcggagagattcctgctgaattatcccgacacttgcatttgctgcccaaagagcaccgtctacgtgccgctgagagcctgcttgcatggtgggatttgcaagtggtctacacgctgtgtggtaaacgcgaccgggttgttcagcgaagtgaagtagagcacaccctatcgtcgatcatcccccagttggacgaggacaagctgaccgctgacttcgatatggtgaaccatccagacgactatcaggctgacagcatgctgtatcgtcagatcgctttggtcggcggcaagccctcggacatcagcaaagctgttcgtgagcaatggcgggctgcacaccagcgatcaaaatggattcgtgaaaagcctcaactacgctcgaaaatcgccaagtacgacgacaagctcaaggagtcctggtcggatattcacacccggatggttgaaaattgcgaaatgcgcagccccgaagagatcgcatccatggggcttgatgtcttgcgttggactcatgactttgcgccgaaagaggtcgagccgatctcatcaagctggagcggacactactacgtgcgaggaacctaccagctgctggctatcgatctgacggtagggtggcatgcccagtacctgacgcttctcaaggaatag

SEQ ID NO: 345316 - DNA, 486 bp, Pseudomonas aeruginosa
atggccatcacacacgatatctatgccgaaaccaacccggcatattgcgccgcattgctgacccacttcgttacagggtatctgtcgtttggaagtagcgctcccgacatcacgttgtgctatgcggctctgccggtagcactctcgggtgacctggcttcgacctttgatcgcaccaatcgaagcacaggcctattggagtggctgcaccgtagcccggtcatccagatccggctcgcggacaggattaacggctcactggaaattgtgaccgaagcaatccagtttgcctgcttcagccagttgttaatgctcaaccccgaaggccgtgtagttcacggggcgtcctcgatgcctcgacatctcaccgcgcaactgagtgaagacactcaacaaatcttcaagaaaattcaccgcttgggttactggtttgcctcggcgggtactacacggacagtattcgacatgatggggctggagctatga

SEQ ID NO: 345317 - DNA, 1941 bp, Pseudomonas aeruginosa
atgagccgctggaatatttcaaacatatttttcatcggcgagggtggtcggctacgcgacctaccgctgaaattgggagaggtgaatatcttcaccggtgcatccggtacgggtaaatccaccctgatcaaagccattgattactgtcttggctccagcaagtgcgagctggcggcgcacgtgaagcgacatagtctcgcggtgggtgtgaaatgggtgctcggagatgcgcagatgattactgcgcggatagtaccgccagtgggtcaggccaccagcaccaaaatgtacgtgagcaacggacgggatctgccaattccaagtcatgtcgagcagctccaaggcttgacgacacttgaggcagcaaagggcttcatcgagcgcgcctttgggattgctggtgtgcccgatgcttccgatgacaaagctgcccgtaaatggcgtcccacggtacgtcacgcgacggcttacatgttcgtgcccaaggatgtcatttataacgaaactgctctgctgcatggactggatcaggctgatgaagccccggctattgtcgaaacgatgccctacttcctccgcgttgtgagcgaagattcggtgctcaaggagcggcgcctgcgtgagcttcgcaagcagcttgagcgagaggagcggcagcaacggtctcgccaggcagccggtagcgactacaaaaagcacgccttgcgtttgctgcatgatgcaagccgaagtggcctgtgcgacaccccttctcaggagtcttccgagaaagaactggagggcgtgctcaaacgcgttcagcgctctgccagcagaaccggttcgaacccgaatgagagtgagctcggcaagttgtacgacactcgtcgaggcttgctgagtacacttgaacagacgaagagacaatcacgtgcgaccagctcagcccttcaggacatggtggggttcgagggtacggtgcgacgccaatatgaaaagctgaaaattgcagagcatctcaagccagcggcagacacatgcccgatatgtgacagtccgaccgaacgtggtgctgcaatctccgaggctatccgccactccatggccgtcattcggtcggagagtgtggcggttgagaacgtgcggcctcgactgatcgagcaccaagactcgttggacatggaaattgatcgcctgaatcgccaagtgaatgagattgatgagcgtatcaagacctggattcgccagagtgaggaggccaagcagttgaacaccttggcccagtaccatgcgaacctgcagggcaaggtttcacagtttctggagatgaatccaaccacgccgcagcctgggtcagatttgggtgtcctgcgagaccagatccagagtttggaagggcaaatcgacaccgaagccaaggaaaaactgctgaggtttgccgagcgcaaagtgtccgaatacctgtcagaagcgttcggccagctgccgactgtggctccctgtattggggccgaccttcagttttcctccagaccaccagatgtcgcgatcatcgagcaagactcaagagctttattgcggctgcatgacgccgggtcggacgaaaactatctggctattcacgttgccctgtctttcgcgctgcagaagtacctgggagagatcaactcgccagtacctgcctttcttgcgtttgaccagatcagtcggccctattacccgcaacgtggggaagacgagtcgaccatcgaggagaacgaagaggtctcagccatgcggcggcacctcgacttccttttcgatgaaacggctgctcagaagggcttacaggtgttgctgatcgagcacgcgtacttcggtgacgatcccaggtacgtcaaggccactcgtaagcgatggaacaaggagtcagaggatgcactgattcctagaaattggcctagacggccagacaccatttga

SEQ ID NO: 345318 - DNA, 2046 bp, Pseudomonas aeruginosa
atggtggacttcaacaaactcagatcgcagtctcagcgacctgcaccgatagatcctctggaaatcttcagacgcatgcccaagcctcagggcatcaatgatctgtacaccagtcaagcggaggtgctggaggcatggttcgagcgtaaggatgagcgtgacacggtcgtcaagctccacactgggggcgggaagaccctggttggtctgctgatcgctcagtcaaccctgaatgacctcaaagagcccgttctgtatctggctccgaccacgcagttagtcaaacagaccttggagaaagcgagatcgctgggaattctcgctgtcccatacatccggggccagcccctgcacgacgactttgtgaacggcaaggctgtcatggttgcctcgtacaaagctttgttcaacggccatagcaagtttggggttcgtgggcagaaaatgcccattcgagtaggtgcagtcatcctcgatgacgcccacgtagcattttctgtggtgcgcgagtcattcacccttgaggtttcctctgaggatgacaacgaaacgtacaaggcgctgtgcaccttgttccgcagtgcttttcgagagatcgatcgactaggtacgtttgacgataccgtttcaggcctcaacagtggtgtggttgaggtgccatattgggcctggaatgagcagttggataccgtaagggagatgttgcgacgcgacggtgcgaacgttccctttgcttggccattgctgcgagacaatctgcatctatgccatgcgctgatcagtggcaaggccttcactattacgagtgttctgcctcaggtaaacaatttccccacattcgctgatgctccccggcgtatctacatgtcggcgaccatcgctgacgatagtgaaattgtccgcacattcgacgccgatcctcagctcgtaaacaacgctttaacctccaggtctctcgcggggatcagtgagcgaatgatcctgatcccaagcctgatgcccttcgatttcgatccgcaacaggtcgctaagtcaacgctcaagcaagtggctgggatgaacctgggggctgtggctttggtgcacgccaactatgccgcgcaggcatggactgacactgcgcagttcgcggaaggctcagaccaggtggagattgcgatcgaggctctgcagtcgcgtagaaccaatgggccattcgtatttgccaaccgctacgatggaattgatctacccggtgactcttgcagagtcctagtgatggaagggcttccctccggcacgtctgattatgagctgttacgtgctgcgaccctctatggtggagctaccatcagtcgcatgctcgctcaacggatagagcaggggatcgggcgcggagcgcgtggggctggcgaccattgcgtagtgctgctgcttggctcggacttggctggctggattgccaaggacgcgaacttcaggctgctcacgagcgcgactcgggcgcagctcgaaatggggtcgacggtcagcaaagaagtcagcgacgtcaacgagttgaccaatacgatcgcgctcagcatcaatcgggacatcggatgggttgagtaccatgccgcaacccttgcggaaaacgttgggccagaggcgccagacccgaagcggttcaatacggcctcaacggaacgcaaggccttcaacctttgggccgatgggttttatgacaaagctatcgaacgcctggatcaggtagcaggtgctcagggcgcggtggatgatcagacacgtggctggttgtaccaattggcaggccgtatcgcggaaaactgggggcaagccgagcgcagtgacgagctccaacgatcggcattttcggcgaaccgcaaccttttgcggccacgcactgctcctccctaccggcccctggcgtctcctggcgcacaaggcgcagcgattgccgttcagctacgtggatacgtgtgcacgagatcaatgcccagcgcggcttcggtgatagcgccgaggagtccgtcactgagggacgaggtggttcagggaaaaaactaa

SEQ ID NO: 345319 - DNA, 1236 bp, Pseudomonas aeruginosa
atgcgtctgcccgaaacatccaacggcctcggttaccagaacctgatctcgatgattttccagttgatggcatttcgggatgagtggctgaggaagtacaaaaataccgaggagcagtccgacgccggcattgcgccgatccacctcgtgctggttgaggagccagaggctcatcttcatgtccaagtgcagcaggcctttatcaagcacgcgtatcacgtcctatgtaatgacccgcttctcaagaaatacccaaggctcaaaacacagctggtggtcagctcccactccagtcatgttgctcatgagacggattatgcaaaccttcggtatttccgaaggctacccgcaggaatggccggtgtgcctatcccagtgtccaccgtctctaacttgagcaccgtgtttggcgacaaaaaccgtcataggcaaaccaaggagttcgtgactcgttatctgcgggcgcagcatgccgatctcttcttcgctgacgcagtgatcttggttgaaggcgctgcggagcgaatgatgttgccgcatttccttcgcagtcattttcccttccttgatcgttgctacatcaccatcctggatattggtggcagtcacgcgcatcgcctcaggccgttagtggatgcgctgggaatagtgacgctggtgatcactgatctggacgctggactaaagaaatcagcggtacccgttaagcgcgaagcccaacaagaaaccaataaccccaccctgcgcggttgggtcaccgccctgggaatagggcacgatgtcgacacattgctggatctggatgcggagaagaagtcgcagcagatagaccacttgtttgcgatccgcattgcgtatcagacgcccatcaacgtcgttctgcccaagaccgaaggtgaggcccaggcgctgcccaacacgtttgaggacagtctggtgctgagcaatgtgcagcacttcgcagcgaagcaaggtcggggtctgaccaaagctttcgccaaagcgctgcgtgattccgccacggcagacgacctaggtaaggctttgtttgacgcgcttaggacgggtgacaaagcagagttcgcgctacaggtgcttggagatcccgacttcgccaaggtgactgttcctgagtacatccgggaagggctcgtctggctggaagaaaagctgcagaagaagagcaaggagctcttgatcatcccgactgccagtgtcgaggtgactcccacatga

SEQ ID NO: 345320 - DNA, 1875 bp, Pseudomonas aeruginosa
atgagagccataaaagatgtcgccgatgaagacacgccgactgcggatgacatgatcaagcaatgcctgaatcttgagacgccacgcagttttttcctatatgccggcgccggctcaggaaagacccactccctcgtcgtagcggtgaaatcactcaaggaacgtgaacgtcagcgcctcacgtttgaaggccgtcaaatcgcgatcatcacgtacaccaacgcagcctgtgaggagattgcacgtcgccttgagcacgatccgctggttgaggtttcaaccatccacgctttctcttggaagatgatcaagggcttcaacgacgatattcgtgaatggttacgtatcaagcttgcggacgacatcgctgggctggaggacaagctcggtcgggcaaaatcggtgaataagacctacctggctaatcaggtgagtcgggatagcaaagcccgtcgtttagcggccctggatgaaattcacgaatttacctatagcccaacaggagacaatcggagcaggcaatcgctgaaccacagtgaagtcattcaaatggccgcagcgtttctaccccagccacctttactcgatgttatggcggatcggcacccggtgctgctcattgatgaaagccaagatacgaacggctcgctcatggatgcatttctgaaggctcaggcagcgattcctgcgagattttgcttaggactgctcggcgacacaatgcagcgtatctacactgacgggaagtcgaagcttcgtgaggcaataccttccgactgggccaagcctgaaaaacgtatcaatcgtcgttgcccgattcgggttgtcgatttgatcaacaagatccgcgcgggggcggatgatcatcagcagataccaaagccgggagcggcccaaggttcggtacgtatgttctgcatccggcaagcaccagggcaagatttcagcttggaagaccagatcgctcatcaaatggcagcgatcacgggcgatgctcagtggtctaatggcatggagggccgcaagacgctgatcctagagcataaaatggctgcccgccgcatgggttttgaaggggtattcgctccactctatgccgttgagcatctgaatactgcactgttggacggtacgttacccgtcctcaaggtgttctttgatggcgtcgctccaatcgtcgcagcagcccgctcagatgatttcacgctcatggaggcagtgcggctgcgctcccctttgcttgatccaaagcacctggaggcggctggaatcaatcaattcgagctgttggaatctgttggcgcggcgacccactcactctgcgggctgctggaaggcaacgacccgttgattgaggaggtgatccacatcctccagagcaccggtttgcttacgctgcccgatcgactcgttgccgcaatggctcaaggtgccacttcagaccctgcaccggaaacaacggatcgtgaggcacttgaaatccatgcttatcgggttgttctggggcgtcgttactccgaaatcgcggccttcggtggctacgctaatggcctctcgccctacggcactcaccagggggtgaaaggcttagagtttcctcgggtgatggtcatactgaacgatgaagaagccggtggctttctgttcagctatgagaaattgctcggtgttacgcccgcttcggcgaacgacatgaagaatgagcgcgaaggaaacgataattcgctatcacgcacgcaaagacttctctatgtcacttgcagtcgtgcagaggagagcctggccatcgtcgtctacagcgcacagcctgagattgcgaaagatacagtcattgacgctggctggttaacagccgaagagatcgtggtgctttaa

SEQ ID NO: 345321 - DNA, 852 bp, Pseudomonas aeruginosa
atggcgccactattttgcctttatactggcactatgctacaaagcctcccgctcaggcgctggaacacagctttcccccgtaagctcccccctggtggcctgggctccctgccccacctgaggcttttgccaggacgcatcgctcatgcttcgctcgctgtcgtttgccaagaaaatccttctcgccgccgcgctggtggtggtcttcgccttcacctgcttcatcctctacaacgattaccggcagcgcgaggccgtgcgcacggacacggaaaactacctcggggaaatcggcaccctgaccgccagcaacatccagagctggctggaaggccgcatgcacctggtgcaaggactggcctcgcagctcgcgctgctcgagcagcccgacgaggcgggcatcgcgcgacagctggaacagtcggtgttcagcagcaacttcgcctcggtctacctcggcgaggcagccaccggggcgttcaccatgcgtccctacgatgccatgccggcaggctacgatccgcgtacccgtgcctggtacaaggaagcgctggcagccgaccggctgatcgtcaccgagcccttcgtcgatgccggcaccggcgagcagatcctcgccatgtcgctgccggtgcggcacaacggccaactgctgggcgtcgccgccggcgacatgaagctggaaaccctgaccgcgatcctcaactcgctgaagttcgacggcgccggctatgccttcctggtcagcgacgccggcaggatcctcctccaccccgactccgggctggtcctgaagagcctcgccgaagcctatcccaagggcgcaccggcaatcgcccccggagtccatga

SEQ ID NO: 345322 - DNA, 912 bp, Pseudomonas aeruginosa
atgaatagcaaggtgctgatggtgctggccgggctgctgctggtcggtgccgtactgcttggatacctcggcgtgtccatcgggcgtgcgccttcgaccgtccaggtccccgcggtggcgccggcgacttcggtggtggacgcgtcgctggagaaactcgaacgcaagccggtgctggtggccagccgtgacctgccggcgctggcggtgatcggcaaggacgacctcgtcgtggaaatgctgcgcaccgcgccggccggcagctacgacaagcccgaggcgctgctcggcaagcgggtctgggtggcggtgccggcgggcagcatcctctccgcggcgacgctcgagcccggcggcccgctggcccgcaccatccgtgcggacgagcgcgccatggcgatcgcggtggacgaggtgatcggcggcggcggcttcgtcctgcccggcgactacgtcgacgtgatgctcttcgtccgcgacgagcgcggtggcgagtcgacgtcgctggcgcagttggtgttgcccggcgtgcgggtgctcacctacggcgaacggatcgccgtgggcggcgacggccaggaccgttcggccacggaaaaggatccgcgcccgccgcgtaccgccgtgctggcggtgccggcggaaggcgtggcgcggctgatgctggcgagccaggccggggcgttgcgcctggcgatccgcagccaggacgaggaactctaccgcagggaacaggaaggcccgctgctgcgggcctcgctgggcgctccaggcgcggcgctgaccctcgaccagttgctcgagcggcgcaaggccacgccggccggcgtgcgcagcgcggcgccgcgcgcgccggccgccgccggggtggcggtctaccgtggcagtgccatgacccatgaagcgccttga

SEQ ID NO: 345323 - DNA, 882 bp, Pseudomonas aeruginosa
gtgaacggggcgcagttgctggtgctgttcagcggcctgctgggcctcaccgcgctgaccctggcgttcatgggctggcgtgccgggcgcaacgagcaggtgctggagcgcctgctcgggcgtccggaaaccgccgaacggccgcgcagcagccactggctggcccggcagctgcgtcgcgccggaatccagcattcgcggccgtggctggtcggggcgctactggttgcgctgctgctggccggggccggacagcggctgctggggttccccggcctgctcgccgggctgctgctggcgctgctgctgttgcgcggcatcctgggcatgctctaccggcgccggctgaagcggatgatccggcagatgccgcgcttcctcgaccaggtggtgcgcagcctgcatgccgggcgcacgctgggcgacgcgctgatgcaggcggtggaggatgccgaggacccgctgcgcgacatcttcggcctggcgcgcaaccacgtgcttctcggcatccacctgccggaggctctgcaggaggtcgccgaactctacgaggtggaggagctgcgcatcctcgcccttggcgtctcggtcaaccaccgctacggcggcaacaccaccgacctgctggacggcatcgtcaggctcatccatgagcgcgagaagctcagccggcagctacacgcgatgaccggcgagacgcgcatcagcgcctatgtcctggccggcgtgccgagcgccctggggggctacatcctggcgagcaacccgggctatctgctgaacatgtgggccgacggcagcgggcgtttcctgctgctggcctcgctgggcctgcaactgctcggctgctatgcgctctggcgcatgctcaagagcgtctag

SEQ ID NO: 345324 - DNA, 762 bp, Pseudomonas aeruginosa
atgaaaggcttgatcggcattgccctgggcgccgccctgctcggcggttgcgccagcctgccggggctgcctccggggccgggcgccggaggcgagtgtccggcccagctcggccaggagcaggaactgcagatgaacatggtgcgcgacatgatcagggaagggcgcctgcacgcggccctggccaacctggaaagcatgccgccggcgttgctcgacgtgcgcgaggaaaaggcactgatcctgcgccggatcggcgacccgaaggccagggccgagtaccagtcgctgctgcggacctgcaaggcgccggaagcgcaccacgggctgggcctgctcgccctgcgcgccggcgacagcgcccgcgcggtcctcgagttgcgcgaggcggcacgcctgcggccgaccgagagccgcttccgcaacgacctcggcgtcgccttgctcaagcgcggcgaccgggtcggcgcgcgtttcgaattcatcaccgcgctggagctgcagcagggcggcaagctgccggccaccaacctgctcggcctgctctacctgcagggcgagcggcgggaggcgcaacgcctgatcgagcgcctgcaactggaccagcgggacatccgcgaggccgaggcgcgggcgcgcaactggggcgccccggcgcagccgtccggcccggcgccggagcaggagccactggcggacctgccggccgctccggcgcggcccgcgcacctgcgtaccgcgatgaccaacgaggcgccgtga

SEQ ID NO: 345325 - DNA, 285 bp, Pseudomonas aeruginosa
atgcacaagccaatcctgatcggcgcgttgctgctggcctccgcactggcccggggcgcggaaaggccggttgtctatcccgccgccccgccgccggccgagccgcagactgccagccgcgcctggctggccatccaggccagcggccaggccgccagcccggtgcgccagggcgcgaccgcggcggagcgcgaacgcgcctatcagcgctacctgaagagctacgagcacgagattcccgagtacctgctggaagatcgcggcttcggcgaaagcaagaactga

SEQ ID NO: 345326 - DNA, 1671 bp, Pseudomonas aeruginosa
atgaacggatggcctgcgagacagcgcggggcgatcggcatcctggcggcgaccactctgctgctggcgctgatctgcctgctgctggtggtggataccgggcggctctacctggagcagcgcaacctgcagcgggtggcggatgtggcggcgctggaaagcgcttcccagggggccttgtgcggtgaccagacaagtgcccaggccacgtctttcgccagggctagcgcatcgctcaacggtttcgatgcgaacgccgccggttccggtctgcaggcggaggtgggcggggtacaaagcctgggagggctgcgcagattttcctccagcgcctcgaacgtgtccgtcgacaacgaggcggtgcgtgtggtcgtcagcaagagcgttcccggcagcctggtggccaacctggcggggttgttcggcggtgccaacgccaacgtgaacctgcgcgcggaagcggtggcccgacgtctgccgagcgccacgatttccgcaggcaccggtctggcgagtttgaacagcagccagtcggccctgctcaatcccatactgagcggattgctgggaaccgacatcagtctttcggcggcggcctataacggcatcgccgatgccaagctcagtgtgttggacatcctcgggccggacggaatggggttgatcggcgtcgataccagcctgggcaccatcgagcagttgctgaataccaatgtcggactgcagcaggtgcttgccgccagcgtgaatgtcctggcgaagagcggcgtggcttcggtcgaggcgctgaagacgcagttgcttggagtgaagtcggccacgctgaagctgggggacgtgctcgggctgagcgccggcgaggtgaacagcgtgtcccagctggatacggcgatcaacgccctggacctcatcatggcggtggcccaggtcgccaacaagaactcggcggtcgccgtgggtctagggataccggggctggccaacgtccgggtcacggtcatcgagcccaagagggtggtgtccggtcctccgggacgagatgccgccggggcatggcgaaccgaggtgaaacaggctcaactgaggctcaccgcggatatcgactccggtttcctctcgatccttgccacaacgaaactgcaactggccatcgaaggggcgtcaggggcgctctggctggagagcatgacctgctcccggcccgacactcacctggggctcgggtggaacagcagcggggcgaccatacggatcggcgccccgggcaacatcgaccaggctggtgccatcctggtgcttggaggcctggtgaagctgaatctgaagttggacaccaccctcgccaacagctccggtgacagcgcagtcgtggtgaaagccgatggttccgatctctctcgaagccgcaggctgccggaaggcggctccctcggcagcacgctcaagtcccggatcagcgtacagcctgaggtactggggctgtgcctgccgttgctgtgtgggccgacggcgttgaccgacctcatcgtcaactcggtcgtcgcgccgctggtggacaatctgctgacgccgctcctgaacctggtcctgccgctgctgggtatacagctcggctacatcgatgcggaaatcctcgaggtcgatgtagggcaggcggaactgctgatctag

SEQ ID NO: 345327 - DNA, 483 bp, Pseudomonas aeruginosa
atggaacaattagcattggcgctatgggcaagcgtttgcggttatcaggacatcaaacgtttgcgcgtttcaaactggcttaccctgggcggccttcttatttcctttatttatttatatgtgaaagagtcaagcctggccggcggcacggttaatatggcaatgaccgcacttcttataggtgtcgcgctcacccttcccgggtatttctccggtagactcggcgccgccgacgtcaagtaccttgccgctctggggctggccagcgagccgctcacggtcctctacagcctgtccttcggctgcctgacatgcataacgatattcatgctccgaaaactattcgaacgcgcagttggaaaatccgtaatgcatgaggaagttggtaatccgcaggcaccgtcaaaaaacaagacattcccctttatattcgccatgagcgtcggccttttggcacacctgactatcaatgaaattacctga

SEQ ID NO: 345328 - DNA, 465 bp, Pseudomonas aeruginosa
atgcacagaaaagctttccggggaggccagaagggagccgtcgccatcgaattcacggtggtcttcctgctgttcttcgcgctgatctacggcctgatcagctacagcatccccctgctcatgctgcagtcgttcaacgatgccgcggcggtgggtgcgcgcgcggcggtcgctgtggatccttcggagccgggctacgaggcgctcgccgaaacccgcgccagggacgagctgctggcgcgcctggcgtggatgccggcgacctggcgggcgaacctggagccctgcgccggaaatggccagtatgccgactatgtcggtgccacctcgcggatcgaagtctgcgtgcagtaccagtacggagatccggccaaggcgatcattccggtgctgcgttttcccggcatcggcgcgatccccaacctgccgcagaccctgaaggcgagcgccaacctgttgctgtga

SEQ ID NO: 345329 - DNA, 2772 bp, Pseudomonas aeruginosa
atgttcgagttttcccgttcgtcttccgccgcggacgcctgcgaggcgcgcgagccactttcgccggaaggcgccggccaatgggcgggcgcgctgaagagctgggacctgtgcctggagctggacgagcaggaccgggtgatccgcgtcggtggtcgccaggcctatcgcctgcagcgcccccacggtcgtggcgacggaccgcggccgctcgccgagtacctggaacggcgcgctcccggcgcgccggcgctggcggccctgcgccgcggcgaacggctcgacctggccttgcgcagcgatgcggcggcgcccttcacctgccgtttccagccgatgcagccgctcgatggtttggggcgttcattgctgctgggcatggatatctccgacctgaactggcagtccgacagccagctgcatcaactgcagagcctgagcctgggcaagctggtcctctcgcgcctgcggcatgtctcccagggccatctggcggaggcgacccaggagatcctcgaatcgctctccggagccttccggatgcaggcgatcgccttgctgctgggggatggcgacggcgcctgctcggtcttcgccagccatgtccggcccggtagcgacagcctgctgcggcccgggctgcatctggccgatggcgagctgcgcgaggagcgtggggtacgcctgctgcgcagtggcgatggcgcttcggcgctgctgcggcagatcggcgaggaggctgtctacctggtgccggcggccatgcgcggcgggcgcgtcggcgccctgctggtcaagcccgtctcgctggagcagttggccgaggggccggcgccgcaggactggcagtatctcgcggagctgctggcgaaccaggtggcggatcgctgcgaactccacgcgcagcgcgacagcgcccgcaagctgggcctgctgcaggagatgatcggtggcggttggtggtactaccgggcggagcaggagttgttcgagctgtcgccggcgctgctgcagagcctgggcctgaccggcgagcagcgtcgcgtgccgctggagcaactgcagaacctgttgcagccggccgacgccgacgagttgggcctgcgcctgcgcgccagcctgcgcagtggccaggcgctggcccaggatctctgcctgcgccagccggacagccgtggagagcgccgctggctgcgcatcgaaggccgcccgcaggggggcggcagtgcgccggggctgtccggcgtcctcctcgacatcagcgaaggccggcgccaggaggagcacgcccaggcggcccacgcgcggttgcgcaacctgatcgatagcgcgccggtggtgatctatgtccagcgggtcgagcaggggcggctggtgccggagttctacagcgagagcgcgagcaacctgctcggtctcgacctgcagggacagaactggcaagcgctggcggagcgcgtacatccggacgacctggagaccttcttcgcccgcggacgcgagttgctgcgcgaggggcgggtgaagacccgctaccgtctcgccgatggccagggccagtggcattggctatatgacgaagccaagctgctgcgtgacgcccaggggttgcccagcgaagcggtcggcctgtggctggacgtcaccgagcagcacctggcggcgcagcgcatcgccgcgagcgaggagcgctaccgggcgctggtggaggattcgccggcgctgatctgccgctataccgccgacctggtgctcacctacgtgaaccggacgttcgccgactgccttgcggcgcacccggaggaactggtcggccggcggctcgacgagtggctggcggcggaggacggcagcgccctgcgggcgcggttgctggatgcgccacgggagggcgcgatcgaggtctccgaggtgcgcttcaacctgccgggacagcgcttcctctggctggtgtgggccgagcggccgctctacgatggccgcggccagctactcgaggtgcaggcagtcgggcgcgacaacacgccggtgcgcagggcccagcagcaactggcgcagggcgccaagatggccagcctgggagaaatggtcagcggcctggcccacgaggtgaagcagccgctgcacgtgctgcgcatgaccctgttcaacatgcgccagcggatgaacaacgtcggcctcgacgaaagctatctggacgagaagctggaacgcatggacgcccaggtcatgcgcatcgaccgactggtcagccacctcggcgtgttcagccgcaaatcggcggtcgaggcgctgccgttcgatccctatgccgccttcgaaggcgccctcggcctgctcggcgaaggcctgcagcagcacgccatccaggtcgaatgccgggcaccggcgcagcgggtggtggtcagggggcatgcggaccagctcgaacaggtgatcatcaacctgctcgccaacgcccgcgatgccctgctcggcaaccccggactggccgaacggcgcatcgtcctggcgcaggaggcctgccgcgagccgggctgggtggagctgcacgtgcgcgacaacgccggcggcatcgagccggccctgctggagcggatcttcgaacccttcttcaccaccaaggcggaaggcaagggtaccggcctggggctttcggtgagccacgacctggtgcgcaacatgggcggcagcctggcggcgagcaacctgccggaaggggctctgttcgtgatacgcctgccgctggcgccgccgtccggcgaggcgtag

SEQ ID NO: 345330 - DNA, 1206 bp, Pseudomonas aeruginosa
atgcctaccaaccgccgccatcccgacaccgcccgcacggtattcttcgccttcctcaagctgggctgcagcgccttcggcgggcccatcgcgcatctcggttacttccgcgacgagttcgtccgtcgccgcggctggctgagcgaaagcagctacgccgacctggtcgccctctgccaattcctgcccggccccgccagcagccaggtcggcatggccctgggcctggcccgcgccggctaccccggggcgctcgccgcctgggtcggcttcaccctgccctcggcgctgttgctggtgctcttcgccctcggcctgggacgctggagcgcgctgttgcccgctggcgtgctgcacggcctgaagatcgccgcgctggcggtggtggcccaggcggtctggggcatgggccgcagcctgtgcccggaccgcccgcgcctggcgctgatggcgctggcctgcgccactgtgctggcctggccgagcgcctgggcgcaggtcgcggtgatcgccggcgcaggcctggccggccttggcctgctgaaaaccgaccccggggcaggccacgagggcctgccgatcgccgtcggctatcgcgccgcgctgttgttcctcgccctgttcgccgcgctgctggtctgcctgccgctggccgcgggcctgtggccggagcagtggctgcgcctgttcgatgcgttctaccgggccggcgccctggtcttcggcggcggccacgtagtgctgccgctgctgcaggccgaggtggtacccagcggctgggtcgatggcgacaccttcctcgccggctatgccgccgcccaggcggtgccgggaccgctgttcaccttcgctgcgttcctcggcgcggcttcgtccagcgggccgggcggctggagcggcgcgctgctgtgcctgctggcgatcttcctgccgtcgttcctgctggtcgccggcgccctgccgttctgggagcgcctgcgccacagtccgcgggcacgggccgcgctggccggggtcaacgcggcggtggtcggcctgctgctggcggcgctgtaccagccgctctggacccaggggatcctcggcgcggccgacttcaccctgctcctcttcgccctgctggccttgctggcctggcgcctgccgccctggctggtggtgctcggctgcgccatggcaggcggtctgctggcggcggccggctag

SEQ ID NO: 345331 - DNA, 636 bp, Pseudomonas aeruginosa
gtggacacggataccacgctcaatatcggcaccgataccgatcatctgctgcaggacgtccagggcaccctcgccgatctcgccggcatggcccagcagctgagccaacagaaacaggaagcgctcaagcagcaggagtccctggaatcgcgcaaggcccagttgcacgagcgggaacgcctgttgcaggagaaggaaaagcagctgaagcaatggcacaagcgcctgcaggacgaccgccaggcgctggagcaggaaaccgagcagagcagtcgcctcctggccgaacgcagcgccgccctgcagcagctggcggaaagcgtcgaggcgcgcgagcgcagcagcgcccgtcgcgccgaggtgctgcaggtcgagcaggaacgcatcgaagaacagcgcaaccagcagaatctgcgccaggccgagctggaaaagcgcgaggccggcgtgcagcaacgcagcctggaactcgccgaacgctacaagaagctggaaagcgcccgcgagaagctggcgcagatcgtcaagggcttcaacgagaccgtgcagttcaacaccaccctgcacgccatcagcaataccgcgttgaacaccccgcaggcgcgccaggaagaaagcaccgccgaactggagtga

SEQ ID NO: 345332 - DNA, 171 bp, Pseudomonas aeruginosa
atgagcagccatcgcaacgacaagcaccatttcgccgacgatccgcaaaaggtctcggaggccggccgcaaaggttcccgacatgccggcggcaatgtcgaggccgataccaaccgtgccgaacgagcgcgcaagggcggccagcacagccacggcggcaaccgtccctga

SEQ ID NO: 345333 - DNA, 630 bp, Pseudomonas aeruginosa
atgcgcggcgccgccgactccgccgaacgccgcatgctgctggcgggattcctgctggtcttcgccctgctcgggctggccccccacgaacgcggcgactggctgctggagaatctgctggtcgccgcgctcggcctcggcctgtactgcgtccgtggctggttccgcccgtcgctggcggcatgccggcgattgttcctgttcctgctggtccacgagatcggcgcccactacacctattcccgggtgccctacgaccaggcctgggaatggctgaccggcgcctcgctggacgccgccctcggctggcggcgcaaccagttcgaccgcctggcccatgcgctctatgggttgcttctggtgctgccgttccgcgaactgatcgaacgcctcggcgtgcggcggccgctcgccggcgccctggcggtggacctggtgttgtcgacctcggcgctctatgaactgatcgagtggctgggtggcgagtacctcggcggggcccgttccgcggcgttcgtcggcgcccaggaggacccctgggacgcgcagaaggacatggccctggcattcgccggcgccctgctggccagcctgctagccatggccggtgcgcgctggcggcggcgctag

SEQ ID NO: 345334 - DNA, 708 bp, Pseudomonas aeruginosa
atgcatcgactggaattttcagccgtcctgtttgacatggacggcgtcctgatccgctcccgagaggccatcgccagcgcctggggcagcgtcgcccgcgaacagggcgtggcgctggatgcggactgcctgcgcgaccacgtgcacggccgcccgggcggctacaccctggactacctgttcggccacctgccgccggagcgccgccgagccctcaagcagcaggtcgataccctggaggaacgcgccgattgcccgctgctgcccggggtcgccgatttcctccgccagttgcgcaggctggacgtgccgctggcgctggtcaccagcagctggccggcgcgcatcgagcacgtgctgcgccagcacgacctgcagacggcgttccgcaccctggtcagccgcgacgacgtcgctcatggcaagccggcgccggatggctatcgcctggctgccgcaaggctagggctgccggcggcgcgctgcctggtgttcgaagactccctcagcggcgtgcaggccgcctgtgccgccggcgcggcctgcgtggcgatcggcgacgaagccgggctgctcgacgccggcgcgcgttggtcggcccgggacttccgcgagctgcggatcgcccgcgaggagcaggcgctgtattgcctgcgccggcaacccgccgcaccggccggcagccagaggagcgttggcgtcccatga

SEQ ID NO: 345335 - DNA, 1092 bp, Pseudomonas aeruginosa
atgagccgccagacgaaacccgcccgcctggccggcggcgcccttgccctgggcctgctgctgggcctgccgactctcgtcgaggccgcgcaggacggcggcatggatcattccgggatgaaccacggggcgatgcccggcatggaccatggcagcccaccatccgctgcgccgtccacgacgaagcccgcgggccaccagggcatggaccactccgggatgaaccacggggcgatgcccggcatggatcatggcagcccaccatccgctgcgccgtccacgacgaagcccgcggaccatcagggcatggaccactccggcatgaaccatgacgcgatgcccggcatgcggcgggcgccggcgcaggccgcgacgcgcgagagtcgcacgccgatcccggtcctgaccgacgccgaccgccgcgccgccttccctccgctggagggccacaagatacacgacagcgcgctgaacagcttcttcctgctcgaccagctggagtaccaggacgccgacgacggcagcgccctggcctgggacgccagcggctggatcggcggcgacatcaatcgcctgtggctgcgcagcgaaggcgagcggctcaacggcaagaccgaggatgccgaactccaggctctgttcgggcatgccatcggtccctggtgggacctggtcgccggcgtgcgccaggacttcaagcccggctcgccgcagacctgggcggcattcggcgtgcagggcctggcgctctacgacttcgaggcggaagtcaccgcgttcctcggcgagaacggccagagcgcactgcgtctggagggcgagtacgacatcctgctgaccaaccggctgatcctccagcccagcgccgagatcaacctgtacggcaggaacgatccggcccgtggcatcggctcgggcctggccgacagcgaggtcggcctgcgcctgcgctacgagatccgccgggaattcgcgccctacatcggggtgacctggaaccgctcctacggcaacaccgccgacctggcccgcgccgagggcgaggacgacgacgaggcgcgcttcgtcgccggcatccgcatgtggttctga

SEQ ID NO: 345336 - DNA, 663 bp, Pseudomonas aeruginosa
  misc_feature (313)..(313): n is a, c, g, or t
atgcgcgacatcatcgacggctttctcaggttccagcgcgatgcctacccggcgcgctcgcaactgttcaagtccctcgccacccgccaggcgcccaaggcgctgttcatcgcctgctcggacagccgggtggtccccgagctgcttacccagcgcgagcccggcgaactcttcgtgatccgcaacgccggcaacatcgttcccggctacggcccgcaaccgggcggggtcagcgcctcggtggagtacgcggtggcggtgctcggggtcgccgatatcgtggtctgcggccactccgactgcggcgcgatgngtgccatcgcctcctgcgcctgcctcgaccacctgccggcggtggccggctggctacgtcacgccgaggcggcgcgggcgatgaacagcgcccatgagcattccagcgacgcggcgcggctggacgccctggtgcggcacaacgtgatcgcccagctggccaacctgcgcacccaccccagcgtcgcccgcgccctggaacagggccggctgaacctgcacggctgggtctatgacatcgagagcggccgcatcgacgccctcgatggcgccagccggcgcttcgtctccctcgccgagcatcccggggtgcgcgccgtcggcggcgaacccgggcaagcggtcgcctga

SEQ ID NO: 345337 - DNA, 246 bp, Pseudomonas aeruginosa
ttgatatcctggtttgtggcgagatttccgcggcctattccgttcggggtttcgcatgccgcccccgacgcccgcggttcgaggcgcagcagcgcgctggagcaggccggggtggaggcggcgacgaccctgttcatcgacgaccacctgcccaacgtggagtcggcgcggacgctgggcatcgtcgccgaacactacgacggcagcgccgcctgcctggagcggatccgcgcgtgcctggcctga

SEQ ID NO: 345338 - DNA, 297 bp, Pseudomonas aeruginosa
atgccagcgttgaacccggccagccatgtggtcagcatccgcgcccgcaggggccagtcgcaacttctcggccagcgcctgcacgcactggccttgctgggccgggcggtgcctggctgtctgcgctacgaggtcagccaggccggcgaggatgccgacctgtggttgatccacagcgcgtggagcgacgaggacgcgttgctcgcgcatctctgcggcgaggcccagcgggtcttcgccgaggtgctctggcaggcgctcgccgcgaccctggagatagaggagcggatcctctga

SEQ ID NO: 345339 - DNA, 933 bp, Pseudomonas aeruginosa
atgagcgaaaccaccgtcccgcttgccaccgagctgcccgccgccctgcgccagcgccagagcgaactggcgcacctgctgctgaaacactgcgccgacgatggcatctacgaaaccgccatcgccccgctcgcgctgatccgcgccaacggccccacgctgccagcgcgcggcatgcataaacctgcgctgtgcatcatcgcccagggccgcaaggaggtgcagctggccgaggagcgctacatctacgatccgctgcactacctggtggtctcggtgaccctgccgctggccggccaggtgatcgacgcctcgccggaagcgccttacctgtgcgtgcgcctggacatcgatccggccgagatcacccagctgatctccgaggccgggcccatggaagtgagcggccgccgcggcgaccgcggcctgtatgtcgatcgcatcgatgccagcctgctggatgcggtgttgcgcctgatccatctgctggacagcccgcgggatatcgcgatgctggcgccgctggtgctgcgcgagattttctaccggctgctgcgcagcggccagggccagcgcctgcacgagatcgccatcggcgatagccaggcgcaccgcatcacccgcgccatcgactggatcaaccagaacttcggcaagccgctgcgcatcgagcaactggcccaggtggtcaacctcagcccctcgaccctgcaccaccgcttcaaggccgtgaccgcgatgagcccgctgcagtaccagaaacagctacgcctgcaggaagcacgccggctgatcttcagcgagggcctggaagtggccgccgccggctaccgggtcggctacgaaagcccgtcgcagttcagccgcgagtacagccggctgttcggcgccccgccgctgcgcgacctggcgcgggcgcggaccagcgcctag

SEQ ID NO: 345340 - DNA, 906 bp, Pseudomonas aeruginosa
atggatatccgccatctacgttattttctcgcgattgccgatgccggcagcttcaccgccggagctcagcggttacgggttgcccaaccttcgttgacgcgccagatccaagcgcttgaagcacatgtcggttgcacgctttttgtgcgcacgtggcaaggtgtacacctgactgaagcgggggaggttcttcgaaaggaggccctgctggctgtcacccagttcgatgcagccctgaaacgcacgcaagacagcggaaaacaggtatgccgcctagtgctgggcatgattcctggcacggaagatgaattgatgggattagtctcggcggcgctggcttctgaaacacgctgtattggggttgacgttcaaagcaagctacctctcgagctgatcagagctctggagctgcgcagcatcaatgccgcattcattcggcgcggcgatgtgcctcctggatgggcaagtcaggtcgttcgaaaggaaacccttatggccattcttccgcgcgggcatcgcttattgcacaaaaggaaaatttctccgtcagacctctgcaaggagcgcctagtagcgattagcgcctcggcggcacctgctctccgatccaccatcgacgaatttctccaccaaaacggcaatgcggtcgttgaaccgctcgaggccgatggaatgttgagtatcttttccatggtggcggcaacggggctttgcagcctagtgccctatcatttctgcaacatgttacccaagagcataaccattcgtaggcttacatcagtggatcactcagcactagacctcgttctggtgcattccggcaaggaaacgtcgccgcttttggagcgcctactggtgtacatccaagacatgaggcccccctgctgttgtaaacaacagccctga

SEQ ID NO: 345341 - DNA, 954 bp, Pseudomonas aeruginosa
atgagcaattcaatcacgaaagttgcagtggtcggtactggcgtcataggtgcgagctggagcgctttatttttagctagggggctcaaggtaacggcaaccgacccagcaccgggggctgagactattctgcgtgaatacatagcgaatgcttggccggccttggaagagttagggctggcggttccggcagcttcgccatcaaatctaacttttactaaagacctcgccgaaattgctggtgttgatttcgtacaagagaatggccctgagcgactggcctttaagcagagcctgtatcaacaactggatgagcttctggcgcctgaggtgttgattgctaccagctcgtcggggctgatgatgacggaaatccagaagggctgcgcccttcatccggagcgatgcttagtcggccaccctttcaatcctccgcatctcattcctctggttgagttagtggctggagagaggacttcaccggattcaatcaaacgagcggacgctttttacaccgctcttggcaagcgaacgatccggttgaataaagaggtgccggggcatgtagccaatcggctacaaggtgtgctgattcgtgaggtgatgtcgcttgtcaatgagggcgtcgtgacagtggccgatgctgataccgcgtgttcgtgggggccgggtctgcgctggggggtgatggggcccgtgctgctcaaccatcttggtggcggatcggggggcattgagcacttttatcagcagttcgccggaccactggtcacatggtggacacccttgagggaggtgcagctaaaccccgagatgcagaaaaaaatagtcgacggcctgtatacggaagtagatggacgaaacattgaggaattggcctgcgagcgtgatcgtttattgatgatccttctcaaagcgcgcttggcagccgagaccgttgaaaaatccgggtaa

SEQ ID NO: 345342 - DNA, 912 bp, Pseudomonas aeruginosa
atgtacagagagatgacgcgacggaactttgttggtacctacctgagcacaggcacagccctaatagctgcctcgatggcgccatctgtttttgcaaacacctcaaagcccattccgatcgagcaaggctccatcaccacaccaaatggtctgcgaatagcctatgaacggcagcgcaatggtggacatccagtcttgcttattcccggcaccatgtgtgatcgaggggtctggcggccagtacaggaagctttccagcgcttcgacaccattttactcgacaatagagactcaggacagagtagtttgagcccgagcaactacaccttgcgcgacatggctgaggacgctctggcacttctcgacgagttgagaattgagcgtgttcatctggtaggacactcgatggggggacagatagcgcaggagcttgctttgatggcaccggctcgcgtcagccgaatgctgctggccaatacctgggctcgcactgacgacaagatgaatgccatgttcgatagttgggaggtccttcgtaattatcaaagcgatgaggcttttgccaagtctatgacaatttatggaaatggttccagcactctatcaaggcggactgttgatgaactacttgaagcgtctgcgaagatacttgcaccacaagagccagcggcttttcttcgtaatgtagaagctgatagaaaggctgacactctaagtcggctcggagagattaaagctcgtactttagtgctctggagcgaggaagatcgctgtttgctgcctcctcatgccaagcagttggagaaaggtatacccggtgccaagtccgtgcgcataaggaactgtgggcataatagcatgggggagagaagcaatgtttttatgaagattgctgaagattttcttatctga

SEQ ID NO: 345343 - DNA, 384 bp, Pseudomonas aeruginosa
atgaatatcgacacaactgagtatcccttcgtacgtatggaaaactcccccgcccgcgccagacctatcgaggaggtgctggagtgcatctcggaactgttggcccgcggccgccctttcgtattcgtcagccaggatgcccccgacgacgccgaagaccatatcgatacccgacgcaagatcgtcacctggatgaaggcccaccggaccgagattcggcgtctgatcaaaggccacctgcagatcgtcccggagccggaccagcgcgccgagatgcaggggttctcgatggtctttgccaagttctggggctaccccatgttcgttgtcgccagtgccgaggccgctcgcgccaaggccgagtcgctgctggccggtgcctga

SEQ ID NO: 345344 - DNA, 945 bp, Pseudomonas aeruginosa
atgaaatctatagtcctgtctgcttttggaaccatgccgatcgtggacgagcgcccgcttccggtcgccgggccgcaggaaattctgattcgaatgacccacgccagtctgaatccgattgaccggcggatcgcagaaggttttttcaaggaccggtttgaacaccgctttccgctggcgctcggtatcgacggtgctggcgtcgtcgagtcgattggcgaacaggtgagcgacttcgaggtcggcgattccgtgttcggacggtttctgcacagctatgtcggtaacggcagcttctctgaatatgtagccatatcggctgacgcaacgctgctgcatacgccgctcggcgtgccgccagctttggcggcagccctgcccaccgcggcgacgactgcccttcaggccgtcgagtccctcggcctgccgcctggcagcgttgttttgataatgggggccaccggtggagtgggcacgttcgctgtgcaactggcacgtgccaaaggctaccaggtgctggcgagcgcatcgtccgaagcggctccatggctggcgcaattgggcgtcgagcatgttttcgacagaaagcagaatgttcctgagcggttgagcacgggttggcctgctggcatcaacggcctgatcgacctcgtcaatcctgcgccggcctttgctgagttggtttcctgcattgctcccggcgggacggcgctcagtagcatttggtccgccactgccgatgtcgcggcagcgcgcggagtacgcgtcgtcaatctggaaatgctgcccaaccgcgaggatcttcggacccttgcgcaacaggtgctcagcggttcccttcgcgtcgtgatcgataagcacatctcgctcgaagccgtgcccggagtcatgagccaacggcagcccggtggcgcacggggcaagacggtgatcgacatcgcctag

SEQ ID NO: 345345 - DNA, 1113 bp, Pseudomonas aeruginosa
atgaaagttacttcggcggtcgctgtaagaagcgacgacgtactacaaattcttcctctggaattggaccctccgggattcaacgaagtgatggtgcgcatcgttgccaccggtatctgccatacggacattgcggtgcgagacgaactcgtcgatgtgccgatgccggtcgtcctgggccatgagggagccggtgtggtcgagtgtgtcggtcccggtgtcgagcacctgcaaccgggtgatcatgtggtgctgtctctggcctcatgcggaacctgcaggaaatgtgcaagcggcctgccaacctattgcgaatcgcatgctgcactcaattgggcggcctgtcgcagcaatgccacgacctgcctgcatgaactggacagcggcaaagatgtccacagccacttctttgggcaatcgtctttttccaattacgcgacagtcaacgtcagcagtgcggtcaaggtcgatcccaaggcgccgctggaatatctggggccattcgcatgcggcatcatgaccggtgcgggtgcggtactgaacaccctgagcccacgcccgggctctacgcttgtggtgttcggccttggtgcggtagggctggctgctgtaatggcggcacgcgtcgccggatgtgggcatattgtcgccgtcgatatcaaggacaatcgtctagcgctggcgaaacaagtgggtgccacccactgcctcaatccgaaaacggatgatctgacggccctgttgggggagttgacccaaggccgcggtgccgattatgcggtggaagccgcaggcaacaccggcgtcatgcagtcggcgatcgcctgcctggccgagaacggccagtgcgccttgacgggtgtggtcaaggagcacacgaccattccgcttgatgtaatgcatgtcatgcgtggtcgccatatcaagggaacgatcatgggcgacgccgcaccgagggaattcatcccgcaattgatcgaactctttctacagggccgttttccagtcgatgctctggtccgcttctatccgatcgacgagataaaccaggccatcgaagactctctttcaggtgcgacgatcaaagctgtcattcaaatgcgacatccatag

SEQ ID NO: 345346 - DNA, 585 bp, Pseudomonas aeruginosa
atgaagcttgttaaacctgtcctgttcgctctgtcgctggcgatggttgccagcggtgtttttgccgatacaccagcggaaaacggaaagagccatatcgtccaacgaggtgattataagtatctggcgccgggttatgacaccgaagatgtggcgcgcttctttcgggaaagcctgaatggttggtcggagacgccagccaacgtcgcacgttactttaccccgtcggggacatttgaactggcctatgcgccagcggacgacttcccgatattttcgcgctccaataccgggcgggagaatatcacccgctattttaccgagatgagcgcctatctagggcggctcgaatattccgagataaagaactggacccagctcaagacgaacgagccgggtacgtatgtcttcgaatacaccagccgcggtctgatcaaggccactggcggagagtacaaccagaagttcatttccatcgtcaaggtggcggatggccagatctcctacgtccgtgaatactgggacccctacgtggcactgcgtgacttcaatctgatccagcgcacgcccgcaacttccaactga

SEQ ID NO: 345347 - DNA, 1530 bp, Pseudomonas aeruginosa
atgaagaacgcgttcctcgagtttgaccttatcgtcgttggtggtggttcggcgggtgcagttctagcgtcgcgcctgagtgaaacccctgggttccgtgtgctgctcatcgaggcaggtcaccactacggctctcatgagttcccagaccgactcgcatcggtagattcggtcggcggcgacgccgagcatcgatggtcaccgacacgggatgtcgcccgggggcgcccgactggagggttgcgagcaaaggtgatcggcgggggctcaacgatcaacgctggcgcatttgtgcgtgcaccacgagccgatttcacacgatggacggaacatggactgaagggttgggcgtatggtgacgtactgcctttttataaaaaatgcgaatcttccgattatggcgatgatgcgcttcatggtcgtgacgggccgattcccgttcatttgcgcaccctggatgaactgactcgagatgcgcgcgagttcattgcggcggcgcaactcgccggtttcccttatgtcgatgacgcgaatgggccctcttcgtttggagtatccatttatccggccaatgttcgcgacggcgtgcggataaacaccgccatggcatatctcggtggcgaagtggttgcgcgcgagaatctcacgcttgtcgctgacgccagcgtcgatgtcctgttgtttgcaggcaagcgcgtggtcggtgtcaggctagccgacggcagagagtttcgcggtcgtcaagttgcgcttgcggctggtgcggttggcagtgcggcagtgctgattcgctcaggcattgggccgcgagcgaagctcgaacgacttgggattccacttgtagaagacttgccggtggggcaggcgctgatggatcagccgcatgtctacttgcaggttgtgacacgcgatggaggtgagcggacgccggcggtgggcggcaaggtgtggggacgttcgccactcgcaacgggagaggaactcgatttctaccttggcttcaatcattacgcggacgagtcagtcgcgtcctccggacatgcgttcggggtcatagtatgcgcctgtcatgtggagtctcgtggaacgatggaattgcttgcccgtcaccctgatgcggaaatcgatgtttcactgaacctgcttcaagtaccgaacgataccgtccggctgatggcgggcatcgaggctgcgttgcgtgtggtacgccaggctcctttgatcgagcgcgtggagagtgtgacgttccgcgacgggaccccggtgccggacgacccggatgttctgcgtgcagctttacagcaacatgtggaacccaccctgcacatcacatcaacggcgccaatgggggccgcgcgcgacggtctcagcgtgacgaactgcgaagggatggtgtggggagtcgaagggctgcgtatcgtggatgcgtcaatctatccagagacaccttccgtggcgacgaacccgactgtaatcatgggagctgaatacttggcacacaagatcaccgtatcggagcagcgacgctga

SEQ ID NO: 345348 - DNA, 360 bp, Pseudomonas aeruginosa
atgagcacgacgacccgcatcagcaccgcagaacgcctcggccgcagctttggccgtgggtggcgcgcctatgcgcgtggcgaacggcgggcgtcgaactggttggtatccaagggcgtgccgatggcaggtgccaccgtgctgctgtggacggtcaagctggttgtgctgggattgctgttctatgcagtcttctggatggcgctgctactggtgttcgtcatggtggttgcctggatggcgcgcaatgccgacttgaacgatgaactgcccgaaccagaatggcgaaacgggcctgccggattcggcctgtacacctacgatggttttcgcattgaccctcatgtccaggacgattag

SEQ ID NO: 345349 - DNA, 465 bp, Pseudomonas aeruginosa
atgaacccctgcccctgcggctacctcggcgatcccagcggccgctgccgctgcaccccggagcaggtccagcgctatcgcggcaagctctccggaccgctgctcgaacgcatcgacctgcacgtcagcgtgctccgcgaaagcaccagcctgcagccgggccgcggcgaaaccaccacccgcgaggtcagcgagcgggtcggcgccgcacggcaacggcaactggcccgccagggctgtgccaacgcccacctcgacctgctgggcatgcaccgcaactgtgcgctcgccgaagcggaccgtcgctggctggaggctgccggagagcgcctggaactttccttgcgcgccttgcatcgcatactcaaggtagcccggacgctggccgatctggacgaaaggcagcacatcgagcgcaagcacctcgcggaagccctgcagtaccggccgtcagcgtcaggttga

SEQ ID NO: 345350 - DNA, 2097 bp, Pseudomonas aeruginosa
atggctaagcgcgcacgctccaccaagggaaaagcttcatcagggaaaaagaagtctgggctagaactgaaggtcaggaacgatggccgccagtcaggatttacggtcgtcagctttgacttcctgactgagtggttgggtgaggatgcagatccctttttgaaaggcatttcgcgcttctctagacgctacacaagtgcggcccctacatacgctatacggcgtattctccagtattgggcaatgatgcatagaaagagaggctggaaaaaacctaaggatacagatgcggatgacttcaaacttcaactatctgagcttcggagaagcttttataccgatgagacagaaaaggggttggccctcacaacgacctcaaataagtggatatctttcgtaagactaattgagattctagtagttgcagaagttatccccaatatcactataggtgcatacgttcgagctccaggaaaatcagaaatattaactgaaaggcaatcagtggttgatggtgctgcggttgtttcggtgccgaaatcatttagaccggataaaaactcatacaatgacgatctttttgagtcaatatctttaactgcttctgatgaaaggtacctgaccgagtacactgctagaataaatcgtgtgctggatacaattaagtcgtgcgcgctagaggactttaatctactaaagtcgaaacaggcagaaggagatgcgctgataaagaataccggctgtggttatctgacggctatgaaagagaatccgtggcttatgaggtattttgatttttccactaggcgccattactttgaggcagacggtggacatcctaacttgcttggaaacctactttctgttgttcatcatgagatgggggggatccctaagcctcatcgaaaattcaagtcgagtgacagaaggccggtatcaaacagcggaaattctcattggcaatatgttgctaaatacggaaagaataagctcatcccgtatttaggattaatgaatagcgaggctgcggcagtttgcatgctcttgataatgatagagcatccaaagttcaattcgacttcattgtacagagccaaaattgaagacgcggatggattcgcaatcctcctgtcgtctgccgatggaaataatttgcgccttacggttaaaaagccgagagctagggagcagaaatcagaaatattgagtgacttggcgagagacgttatttcgaaagtaatggagtggactgcccctatccgagaagagttgagaaagcaggggcgaaacgaggaggcttctaatctttgggtgggaataagctctttgaactatgacttgaagtccttttctgagaaggcgttggtaggagcgctttatatgaatccaatttggcgttcgacaggtaaggaagagtttagtacaagggcgtattcatttgtagatagacacccggtgctcatgccgtggagagataagatcaactataaggcaattcgtgtaaatgtgggtgtggcgacatatcttaatactaatggcgacttggttgctacagctaaggcatttggccataagcacattaaaactactattaataattatattccgcttgcgctgcagcgtgcaatttttgagcggcagatccgtaggcatcagaatctactaatcacttcagcgatggatgaagaaagcgaaatgctgaagatttcggactttagaacagtggaacaattacatgaatttcttaagtccatcgataattatttgtttgaaagtgaattggaagcgcaaagaagggaaacatccgaaaagctaacctttgattttgccaccttgtccagactcgtcatatctaatgatcctgaatcgcttgcggttgcaatgctttatcgggatgctctcgacaaagcaaccccaaccttcctaaataggccagacagtcttactggcatcacaccgaaattttggatggacttcattgacgcagttatggcaccacttccgttatcaatgagcgatttaagtaatcttgtcaagaaggcgcttttgaagaaagaagcgatgtcggctatggttatcctgccagaggtggggtga

SEQ ID NO: 345351 - DNA, 966 bp, Pseudomonas aeruginosa
gtggcggaccatcacgcctttcggctggccggtggaaccggaggtgtagatcgcgtagcagagactgtcgggcgcctgcggcaggtccgggttttccgccgggtagccttgcaccagtcgctccaggtcatcgagcagcaggcttcgcagcccatccgcccgcggcaggcgcgccagcacgctttcctggctgagcaacaggcgcagcccgctgtcatcgatcatgtactgcaggcggtccgcgggatactgcgggtccagcggcacgtaggcgcctcccgccttgagcaccgccagcagggccaccaccatgggtacgccgcgctccagcgcgatgccgaccagtacgtcgctaccgacaccctcctcgcgcaggcgccgggccaggcggttggccaacgcattgagttcggcgtaactcaggcgttcctcgccgaacagcaaggccggcgcgtccggggtcaggccggcctgggcctcgaacaggcgatgcacgccctgcccggcgggatactcgctcgccggcagacggctgcgttgcagcagcgcggcgcgctcctcggcgtcgaacagcggcaggtcgccgaggcgtcgccgcggctcggcgacgatggcctcgagcaggttgcgccagtggcgcgccaggcgctccacggtcgtggcctcgaacaggtcggtggcgtaggtgaactcggcgtgcacgccctgttccgactcgtaggtgtccagggtcaggtcgaactgcgcgctgtgcgcgccccacgagaggtcctcgacgttcagccccggcaattgcgctgccagcgactggcgacctgcggaacccaggttctggtggttgtacatggcctggaacagcgggctgtggctgagactgcgctccggctgcaaggcctcgaccagttgctcgaacggcaggtcctggtgggcctgggcgccgagcgcggcgacacgggtctgctgtag

SEQ ID NO: 345352 - DNA, 549 bp, Pseudomonas aeruginosa
atgcaggagcgcctggaacgaggccagcaggagcatgaacagcgtcgccccttcgcgctgcgccagcgcctgcaactgtcggcccaacgcctgcggcaaccgcagttcatggcgcgcgccacggtagctcggcagcgccgggcgctggcggtccgtcggcagttcgagcacggtctgccctccgcccagccgcgccatccagtactccaactggcgctcgcgttcgccggcctccagccagtgccgttgccagatcgcatagtccgcatactggatcggcaaatcgggcagcgtcgcctcgatgccttggcggcgcgcgccgtagagggcaatgagctcctccaccagtacccgcatggaccaaccatcggccgccgcatggtggatggtcagggtcagcacgtgatcgtcggccgccaaccgcaacaggcgcgcgcgaagcagcggaccgttacgcagatcgaagggctgttgcgtctcgctttcaacgaaggcgcgaatctgcgcctgcgcgtcgtcgccgctcgccagcgtgaccgggacgggtag

SEQ ID NO: 345353 - DNA, 1170 bp, Pseudomonas aeruginosa
atgagcgatacccgccgccacgccacgcgcctggccttcggcctgtgcctgatcactttcgcggtgaacctgcaggcaccgttgtacagcgcctacgcgcagctttccggctatggcgcggcggctaccgccacggccttttccggctatgtgcttggcgtgctgccggtgctgctggtgctcggcggactgtccgagcgggtcgggcgcaagccgctgatcatcgtcgcgctgttgctgtcgatggccgccaccgtggtgacgatgctctggccgcgcctggagatgctcggcgtggcacgtcttctgctgggcgtgggcaccgccctggcctcggccaccggcaccgtctacatgagcgagctgatggccggcgaggacagccgtacctcggccaactgggtgaccgccagcacctcgctgggcttcggtatcggcgcggcgctgaccagcctgttcctgctgttccaggaaaccctggtgcccggcagcttctgggtgcaactggggctggcctgcgtcgccctgttggcgctggcgagcctgccggacaacgctccgcgcgcgcgcaatacgccgatgctgcggctgccgtacttccccgccggcagcctgccatacagcctctcgatcctgctggcctgggccaccgtcggcctggtcatcgccgtcctgccctcggtgctggcggcgcacgggctggcgcgctggtccggattctcgaccttcaccgtgatcagctgcggcctgctgttccagccgctggcgcggcgcatgccgccggcccgggcaacctgcctggggctggtgatcctgccgctgagctacgcgctgcttgcctggggcgcgagccacggttcactggcggcggtgctgttcggcgcgctggctgcgagcagttcctgctatggcttcacctacctgggcgggctgtcggcggtgaacgccctggccggcgcggagaagccgcgggccaataccggctatttcctgctggcctacctcggcttcagcctgccggtgatcttcaccgggctggtcgccgaccgtttcggcgcctcgacggcgctgctgcttttcggtgcgctgctggcggtaggtgccgtcctggtggcgctctccatctcacgcggtacagagggcgtcaaggccggcgcttgccattcctag

SEQ ID NO: 345354 - DNA, 270 bp, Pseudomonas aeruginosa
atgggtttccggccagttcgccaacgtttgcgtgacatcaacctgcaggccttcggcaagttttcctgcctggccctgatcctcggcctcgaatcggtcggcccgccgtccaccactaccctcgccccggtgttcaaccagggcaccagcagcccttccttcgccgctccgctcggcctcgacaacagcgcgcgggcaggcgtggaactgtggaacgtcggcctgtccggcgcagtcagcgtgcgggacgagacgcgctgggtgttttga

SEQ ID NO: 345355 - DNA, 735 bp, Pseudomonas aeruginosa
atgaccgccatcggcaccattttcagacgcgagctgggcagctacttcgcgacgccgctcgcctatgtgttcaccctgatcttcctggtcctcgccggcctcacgacgttctaccagggggagttcttcgaacgcggccaggccgacctggtgccgttcttctcgatcctgccgtggctatacctgttgctgatacccgccctgtccatgcgcctgtgggcggaggagcgcaagtcgggctccatcgagatgctgatgaccctgccggtctccggtgccacggtggtggccggcaagttcctggcggcctggttcttctccggcctggccttgctgctgaccttcccgatgccgctgacggtcaactacctgggttccccggacaacggcgcgatcgtcgccggctacctggccggctggctgctggccggcggctacctggccatcggctcctgcatgtcggcactggcgaagaaccagatcatcgccttcgccctgaccgtcctgacctgcctgctgttcgtcggcagcggcgctgccgatgtgcaacaggcactcgccggctggctgccgcaatggctgctcgacggaattgcctcgctgagcgtgctggtgcgtttcgaggcgcttggccggggcgtgctcgacctgcgcgacctggcctatttcctcagcctgatcgtcgcctggctggccgccaccaccatcatcatcgacctgaaaaaggcggcctag

SEQ ID NO: 345356 - DNA, 1803 bp, Pseudomonas aeruginosa
atgaaacgaaccctgtactcgggcgccggcctgttgctggtcggcctgctgttcctcgtcttcaatctcctgtccggcctgctgctgcgcaacctgcaggtcgacctcacgcagcagaagctctacaccttcagcgacggcacccgggagatcctcgaccagctcgacgaaccgctgaacctctacctgttcttttcgaaaagccgcgccggtgacctggtcgccctgcgcaactacgcccgccgtgtcgaggaagtgctggacctgtatgtacagcgcagccacggcaagatccgcctgttcgtgatcgatcccctgccgttctccgacgacgaggaccgcgcctcgcgcttcggtctgcaggccctgcccctcggcccgaacgaagaaggcatctacttcggcctggcggctaccaacgccaccgacggcatccaggtgattccgttcttctcgccggaggaggaaccgctgctcgaatatgacctgagccgcctggtgcaggctctcgccgagagggaacgcaccgtcgtggggctgatgagcagcctgcccatgaacggccaggccgccaccgacagccagccgggcagccggccgtgggcgatgatggacaagctccaccagcagttcgacatccgtaccctggggctggccaccacggaaattcccgccgagatttcggtattgatgctggtccatcccaggcagttgtccgaaccgaccctgcgcgccatcgaccgcttcgtcctgcgcggcggcaagctcctggctttcgtcgatccgttgagcctggccgacccttccgccgacaagggctccgacctctcccccctgctgcgcgcctggggcgtccagctgcgaccggacaccctgctggcggatgccgcgttcgccatgatcaggccgaacgccgagcggcggccggaacgcaatccgacctggctgcaccttcccgggcattcgttcccccagaacaacgtcctgaccaccgggctggaaggactcaacctcgccaccgccggcctgctcgaaccccttgccgaagcgtccacccgcttcatcccgctgatgtacagctcggagcgcagcatgccgctgtcgctggagcgcttccagcggtccaccaccgacgaactcaacgcctccctggccccgaccggcgagcgctacgtgcttgccgccaagctcgaaggcccggcgaagagcgcgttcgcgccggagccgggaaagccggccgacggcccggcggagagcgccaacatccatgtcctgctggtcgccgacagcgacctgctgagcgatccactctggctgcaggaacaggcggggcctggcggcccgcgggtctgggcggacaacgacctgttcgtcggcaacgccctcgactatctctccggatcggacgcgttgatcgacctgcgctcgcgcggccatacgaaccgtcccttcacccgcgtggaggagttgcgtcgcgaagccgggatgcgcgtccaggaacagctcaacgtcctgcagcaaagcctgaacgataccgagaagaacctgcaggaactgcaacagacgatggacggcgccgaacaggacgtcaccccggaaatggaagcgaccctgcggcgtttcgtcgacgacaagctgcgcatccgccagcaactgcgccagctgcagttccagctgaacgccgacatcgaccgcctggcggagcaggtgaaactggtcaacacggtcctggtgccggcgctgctcacattccttctcctgctgcactggacctggcgcagactgcgccgaaggagcgcctga

SEQ ID NO: 345357 - DNA, 1008 bp, Pseudomonas aeruginosa
atgcgcctgcgaaccgtagcgggcctttccctcgccctcgtcctgctcgccgccgccttcagctggttgcacgagcgccagcagcctccggcgcaagcgcccgccagccgcgcctggctaccggagctgaaaccgcaccaggtaaccgcactgtgcattgccacccccggcaagccgccgattcgcctcaggcgcgacggcaaggtctggaaactcgccagccgtgccgactatcccgcttccggcgtggcgatccggcaactgctacggacccttgcggacgcccgcctgctggaagaaaagagcgcctctgcggaaaaccgcgagcgcatggggctcgccgacgaaggcaagggccaggccagccgtatcaccctggagcgcggcgacgccgctcccctggtgctgttgctgggcaagcccactccgcagggcgggcaactggtcaggcagggcgaagacgcccgtgcctggctgatcgaccgcacggtgggcctgccccttggcgacctggcactgctcgatcgaaagctcaccgccttgcccttcgagcaactgcgtgaactgacgttgtcctacagcaacggcgtgcggctgggcatctcccgcagcagcgagcaggacgccggcatccgtctgcagcagtttccctccaagccgcggctgatgggcgaggcggaagcggaacaggccgcgcggctgttcagcgcgctcaccctggtggatgtcgcgccggccgccgaaacgcgacagaagccgctgctcaccttcaccctgaaaagcttcgccggtggcgtcctgcagggccagctcttcgagctgggccgccagtactggctgcaactgtccaagagcaagggcttcgccgagggccaggtggccgccctccagggctggcgctaccgggtcgaaggcctggcgccggacaccgcccccgcgcccagcccacccaaggcgtcgccggtgaagaagcgcaagccggcgaagccttcgccgcccaaatgctga

SEQ ID NO: 345358 - DNA, 1275 bp, Pseudomonas aeruginosa
atgataaagtggggggacaagtggggggacaagagagaatgtcaacgcggcgggggcacgatgggcaagttaaatccgaaacaggtcgagaacctcacagaacctggcacctacgaagatggagacggtcttcggctggtcgtcaaacccacgggacgcaagtcttggttactacgcttccagctcgctggccgccgtcgggaaatgggcctaggttcatacccagagatcagcctcaagaacgcacgtctcgaagcgagtgctaagcgccgcatcctgatagatggtgtggatccactagcagcacgtgatcaagagcgcctagcccagcgtgaggccctgcgagcccaagaagccaaacaactcaaatttaagacgctggccactgagtactgggtagcacacggtggcgcctggtctgaccagtggcgcagaggctggatacgcaaactagaactgtacgcattcccgcatattggcaacctttctgccgagcagatagacacagggcatgtcctcaaacttcttcagccaatatgggcgacaaagacacgtactgcggacgaggtacgcgggcaaattgagcagattctagatgcagcgaaagcacgaggtcttcgtgaaggagaaaatcctgctcgatggcgtggtcacttggacaatttgctcagccgggcagaaaagaaaaaagcaagaaagcgcgagcacttccctgcaatgccatggcaagacgtgccaaaactaatgcaccaactgaaagcgaatacgacagcaccagctcttgccgcacaactgctgatcatgactgccgcacgtgcacacatggtgaggttcgcacgctgggctgaattcgatcttgaggctcgtacgtggtcacttcccgacgagcgcatgaaaacacgtatagccttcacgattccgcttgccgacgaagtaatagactgccttgaagccattccacgaattggagacagtccatatctattcccaggacatgggaaaagcggtgtaatgcatgcaaatgcagtccgcaacctactacacgagatgggttataaatctattactcgacacggctttcgctcatcattccgtgactgggcaggtgaatgcaccaattacccacgagaagtctgcgaaatggcattggcgcacgatgagcgggatcaaactgaaggggcttactctcgaactgacttcttagccaaacgtagagagttgatgagcaaatgggcccgctacttaatatctacgcagaacgataccgaactctaa

SEQ ID NO: 345359 - DNA, 795 bp, Pseudomonas aeruginosa
atggatattaaagacatcccggaagatctcttatgccacatggacaattggcttcgaggctcgttcgaagagacactcgactatatggacggatggatcaacttttccattgaatcagtttacacaaaaaataaatcagcagcagttctagacgacattaaagacaaaatcagaacaggaaaactcacaacagaacacattagcgaataccacgaactcatagaagactctggtgaaagagacaatcgatatctacacccaatttacctgtcaggctacatcgttgcaagagctcgcgcgaagcaataccacaatgaaaaaaatcatgagaaaactatgtccgcgctctgctgtctatcatattacgcaggcgcgatgtacgaaagctcccaattaaaccgcgccggggtcccaacctatatgttcgacccaaagagagtaaagatatcaagcaatgctaacgacgcggcgcacgccggaacaaacatagtaaaaaaaatggtgaccgacttaattattgaagagcgccccgataaaggatggcattctaggaaagtggcagcagcccaagtagcagaaatattgacaagacagctctatatacctaaggaccccccaccaccccttaacagcaaagaagagactcacatcccaaggctagacctagaatttaagctaaacttaaaagcctcatcactgcacgagagaattctcaaatggatgggtgctggcgaagaaggtgtcgatgaaataaacaaagccataaagtcaacattaaaaagcaaagcgaaataa

SEQ ID NO: 345360 - DNA, 1062 bp, Pseudomonas aeruginosa
atgttgttagatgaagagttcaatgagtctctattgctggatcagtgctatctgtcaagtgatggggaggatgattttgtagttatactgcctgaggttgatcgtgttcaggatatggcagaggttgtaagactctcgctggcagttgtttgtggggagtcatttttcaagaatggtgaaggtgttcgaggtgagcgcttaaccaagattggtagggagcttttgctggcattaaggattgatgttggaggtttgcttgatatttataagggggggagattaagcccgtacctgtgcgtttttgataaggtcaaaaggcagttgagtgagtgtgaaggaggagtagatttttatagtgatagctatactgtttcggagcaggtagatgttgttaagcgcgcagttggcgcgattttacaagaggcatcggctgcggaattcaagaagcatgtaaggaactgtgagcgagcggtaaacaaaaacactaagagcttagaggagtttgtagactcgctttttgaacggtactccaggcttttggttttacgtctagatataggttattcattgtcttacctgcaaagccagagctgggtgatgagcttggagcgggtaaagaaagattttagtgtgtttctaaggctgataagtcgaggtaggttgaaagatacgctgcgtggttacatctggaagttagagtttggtccgagtaagcagtatcactatcatgtcatggtttttttagatggtgcaaagcatcaggaggatattaggctttgtgaagagctaggagaaatttggaaggtgaaggtgactgctggggatggggtttactttaattgcaatcgcaaaaagtataggtataagcggaacggaactggtatggtggcttgggatgacgccgtaaaaatagataacttaaagtgggcagggaaatatcttgtaaaaaaggatttacttattaggcctaacttgcttgataaggagcgcatgtttggtaaatctgccgtgccagggccaagtaagaaagttggcaggcccagaaaaaagttgggtgtgtga

SEQ ID NO: 345361 - DNA, 156 bp, Pseudomonas aeruginosa
atgacctcggcgcaggagatcctcgcactggtcgccgccgatgcctggcgcatgggcctgctgcgcgcactgcgcgaggtcgggccggaggatgcctggattggcgccggcttcgtgcgcaacgcggtgtgggaccgcctgcacggctaccgctag

SEQ ID NO: 345362 - DNA, 387 bp, Pseudomonas aeruginosa
gtgctgtatttcgccgccgacgagctcgatccacgggccgacgtggccttcgaggctgctttgcggcgtcgccgcgcggcgccctggtcggttaagaatcaggcgcgcatgcatttgcgcaacggcgaccggccctaccgcgattgcgccgacgcgctgtgccactggccggaggcgtgcacggcggtggcgctgcgcctggccggcgagcgcctggaactgctggcgccgctgggcgtcgacgatctgctggcgctgcgggtgcggccgacggcgcatttcgccggcaagccggaactctatcggcagcgcctgcgggagaaagactggacggcgcgctggccgctgttgcggatcagtggcagcagcctgactccaggtccctga

SEQ ID NO: 345363 - DNA, 792 bp, Pseudomonas aeruginosa
gtgcgcttcagccccggcaccgacagcggcggcctgccactgctggcccgcctgtacgacccgcagccggctctggcgctgctggcgcagcgcagtgagctggcggaaaacgatgaattgccggcgaccgccggcgacgacgaactgctggtggtcttcgccagcgccggcctgcagaccggacatgcctggcgccagcgcctggaagcctggatggccgccgccgagggcgaccgccagccgaccctggaggcgccgtcgttcggcgagcgggtgctgtggcgccccggtcgcgctctgatcatcggcaatcccgagcggtgccgggagctgctcgacgggctggtcgccttcgcctggtacgaaagccgcctgcgccggctcgaggacgagaccgcggcggcctgggaaccggcccaggccgacatcgaactgacccagctgccccgcgccggccacctgtcgcgccaggcacacgtgaacgaacaggtgcgacgcactacactctggcgcatgggctacacccgcctggagtcgcacctggagaaagcccccgcgcacctcgacggcgcggtgcgccggctgtacaacgagctggccctgcaggccgaggtccatgatcggctggcgaccctcgacgaccgcatcgaagtgctgcaggacctgtacgaactggccaccgaccgcctcggcgaataccgttacttccgtggcgagttgcgggtcgaatggctgatcgtcgccctcctcctgctggaggccgccctgagcctgtgggaattcctggattag

SEQ ID NO: 345364 - DNA, 156 bp, Pseudomonas aeruginosa
atgttcggtagccagttggaacatctacatgaactgcagtccgctctcagccacttgcaggaacagcgtgaagagatccgggaggcggtaatcttgcaaaagccagttgaaaccaagaaaaaaggattgctcagctggctattgctacgcagataa

SEQ ID NO: 345365 - DNA, 438 bp, Pseudomonas aeruginosa
atgagcgagcgcaggccgcgtccgcgccgtggtgacttcgtgcgttgctacgagatcaccacacgctggggcgaccatgactcctacggccacgtgcagaatgtcgtctactactcgttcttcgactcggccatcagccagttcctggtcgagtgcggcacgctggacatcgccagcagcccggtcatcggcctgatagtcgcgtctaactgcacctatttcgcctcgatcacctttcctgaccgggtcaccgtggggctgcgcatcgcccacctgggcaacagcagcgcgcgttacgaactgggcgtgttccgaaatgacgaggatttcgcttgcgcgagaggagaggtggtttacgtctatgttgatcgggacaaccagcgatcagcaaatattcctgaaattatccgacaggagttagtcgttctagtcaattga

SEQ ID NO: 345366 - DNA, 1152 bp, Pseudomonas aeruginosa
atgcggaccctcactttcaacacgaccccttcgatctgcatcgagcgtggcgccgccgggcgtctggccgagcgcgtgcgtgccatgaactgccgctcggtgctgctggtcaccgacccgggcgtgctcgccgccggactgatgcagccgctgatcgacgggttcgccaaggccgatatcccgctgcgcgtgttcagtgatgttcaggccgacccgccggaacatgtgatccaggccgctgtacaggccgccttggcttgctccgcggactgcgtgatcggcttcggcggcggcagttccctcgatgcggccaagctggcggcgctgctggcacgcagcggcgagtcgctggccagtgtgtacggcatcgaacaaacccgcggcccgcgcctgccgctgatcctggtgccgaccactgccggtaccggttcggaggtcaccgccgtttccgtcgtcaccaccgcgtcgggagaaaagaacgtcgtcatctcgccgatcctgctgccggaccttgcggtgctcgatgccagcctgacccttggcctgcccactcacgtcaccgccgcgaccggcatcgacgcgatggtgcacgccatcgaggcctataccagccgtgagcgcaagaacccgatttccgattgcctggcacgcgaagccttgcgcctgctggcgggcaacctcgaacgcgcgtgcagcaacggcgccgatgtcgaggcgcgggagaacatgctgctgggggcttgcctggcgggcatggccttcgccaactcaccagtcgccgccgtgcacgcgctggcttatccgctgggggcgcgcttccatttgccccacgggctgtccaactcgctggtgctggctccggtactgcgcttcaacctggacgccgtggcgccgctctatgcggaactcgcggatatagtccttcccggcgtgcagggcgacgcccatggtaaggcccgcgcgctcgccgagcatttcgccgagctgccggcgcgcctgaacctgccgacccgtctgcgggaagtcgggattaccgaacaggacctcgaagccctggcgcgggatgccatgaaccagacgcgtctgctgggcaacaatccgcgcgtggtcagcctgggcgacgtgcaggcgatctaccgggaggtgctatga

SEQ ID NO: 345367 - DNA, 1788 bp, Pseudomonas aeruginosa
atgaccgatcaactgctcaacgaacgcgagttggacttcctgctctacgagcttctcgacaccaccgcgctgctccaacgcccgcgctacgccgaacacgatcgggcggtcttcgatgcaaccctgcagacggctcgtggcatcgccgccgaatacttcgcaccgcacaaccagaaaggcgaccagcaggaaccgacctttgacggcgagagggtccgcctggtcccggaaacccggcgcgcttgggacgccttcgccgaggccggtttcctcgccgcccaccacgactgcgccgacggcggcctgcaactgcccgaagtgatcctgcgggccagcatggcctacttcaacgcagccaacatcgccaccgtcgcctactccttcctgaccatcggcgcggccaacctggtcaagagcttcgccgacgacagcctgcgtcagcgcttcctgccggccatgctcgacggccgcttcagcggcaccatggcgctgaccgagccgggccagggctcggcgctgggcgacctgcgcaccagtgcgcggcccgccgccgatagcagctaccggttgtttgggcagaagatgttcatctccggcggcgaccatgacctaactgagaacatcgtgcacatggtccttgcccgcatcgagggcgcgccggccggcacccgcggcatctcgctgttcctggtgcccaagttcctcgccgaccgcacgcgcaacgatgtggccctggccggcctgctgcacaagatgggctatcgcaacaccacctcgaccgtgctcaacttcggcgaacgggacggcgccgtcggctacctggtgggcgagccgaacaagggcctggcgtacatgttccagatgatgaacgaggcgcgtatcggggttgccctgggcgcctcggtgctggcctaccagagtttcatccacgccctcgactacgcccgcgagcgcccccagggccgcctgccgggcgccaaggacccgcgggccccgcaggtgcgcatcatcgagcatgtcgacgtgcgccgcatgctgctgcaacagaaggtctacgccgagggcagcctcgcactgtgcctgtacgccagcagcctgttcgaggatgcccacaccgccgaaaacgccgacgagcgccaggccgccgccgacctgctcgacctgctgatcccgatggtcaagtcctacccctcgcgctacggcgtgatcgcctcggaaatcggcatccaggtgctgggcggctccggctacatccgcgagtacccgctggaacagtactaccgcgacaaccgcctgaacccgatccacgaaggcaccgaaggcatccacggcctggacctgctgggccgcaagctggaccagcgcgacggcgccggctaccggcagttcctcgccctggtgcgcacgagcatcgacgcagcacgggacgacgcaacctgcgccccgctggcccacgccctggcagccgccctgaggccgctcgaacaggcgaccgccacgttacgcgaacaggtcgccgccgacgccaacctcggcctggccaacgccaccgcctacctcgacctgttcggacgcgtgctggtcggctggctgtggctgcgcatggctctgatcgccagtcgcgccctgcaggccggagccgctggcggcgaggccgatttctaccgcggcaagctgcaggcggcgagctacttcatggactgggaactggcgcccatcgaggcccaggcccgcctgctcatcaacggcaaccgcctgagccacgacatgcaggaccgctggttctga

SEQ ID NO: 345368 - DNA, 2112 bp, Pseudomonas aeruginosa
atgaatccccttgtgcattaccgactggacggccaactggccctgatcggtctgagccgcccgccggtcaacgccctcggccagccgctgcgcgcggccctgctggaagcctgcgagcgcgccgccgccgaccccgcggtgcgagccatcgtgctgcatggcgccaacggcctgttcagcgccggcgccgacatcagtgaattcggcagccccgcctcccacgcggcccccgacctgcccggcctgctgctgcgcgtgacgcgcatcgacaagccgttgattgccgccgtcggcaagctcgcgctgggcggcggcctggaactggcactggcctgcggctaccgcatcagcgagccccgcgcgcgcatcggcctaccggagatcaacctcggactgttacccggagccggcggcacccagcgcctgccacggctgatcggtgccgagtcggcgttgaacatgatcctctccggcgagcagctggacgcctcgcgcgcgcacctgatgggcttgttcgactgtctggccgacggtcccgagcagttgctggagcaggcctgcggctatgcccgcgacctgctggcacggggtgccccggagcagcccgccgcgccctaccccaacccgggcgcagagctgccggaggacttcttcgccttctaccgcgccgagcacgaggcgcgctggaaaagccgcctcgccccgcgcctggtgctggccgccctggaagctgcctgcgtgctgccgctggatgaaggcctggtgcgcgagcaggatctgttccgccaggccgaagcctcccgccagtcgcaggcgctgcgccacgtgttcttcgccgagcgcgaagccggccgcgtgcccggcatcgacccggccatcgagctgcggtcgatccgccaggtcgcggtgatcggcgccggcaccatgggcggcggcatcgccatgaacttcgccaacgccggcatcccggtgaccgtgctggagcaacaggccgacgccctgcagcgtggtctgggcaacgtgcggcgcaactacgagatcagtgtccagcgcggcaagctgagccaggaacaactggagcagcgcatggccctgctgcggggcacgctcgactatgccgacatcgccgacgccgatctggtgatcgaggcggtgttcgagaagctggaggtcaagcagcaggtgttccgcaccctcgacgaggtgtgcaaaccaggcgccatcctggccaccaacacatccagcctcgacgtcgacgccatcgccgcggtgacccggcgcccgcaggacgtcatcggcctgcacttcttcagcccggccaacatcatgcgcctgctggaagtggtgcgcgcccgcgagaccgcaccgcaggtgctcgccaccaccctcaagctggcccggcggatcggcaagctgccggtggtctccggggtgtgcttcggcttcatcggcaaccgcatgctcgaaccctatgcccgcgaagccatgcgcctggtgctcgaaggcgccacgccagcccaggtggacgcggtactgaccggcatcgacctgaacatgggcgtgctgagcatgctcgacctcgccggcatcgacgtgaactacctggtgcgccaggccaaccgcgccgccttcgccgacgatcccagctactgccgcctgggcgacgaactctacgcccagggccgctacgggcagaagaccggcttcggtttcttccgctacgaaggccgccagcgcctggacgacccggcggtgacgacgctggccgaacgcctggccggcgggctgcagatactcaggcgcccgatcgatgccagcgaaatccatgaccgctgcctgttcatgctgatcaacgaaggcatccagttgctcgacgagggcatcgccctgcgcgccagcgacatcgacctggtatggatcaacggctacggcttccccgcgcacctcggcgggccgctgcactacgccgagcaactgggcctggacaaagtgctcgccggcatcctggcctaccaggcgagcctcggcgagcacggccagcgctggttccagccggcaccgctgctgcagagcctggtggctgccggtcgcacccgcatcgaaaccttctga

SEQ ID NO: 345369 - DNA, 1188 bp, Pseudomonas aeruginosa
atgaaagaagccgtcatcctctccaccgcccgcacgcccatcgccaaggcgtttcgcggcgccttcaacatcaccacctcgcccagcatggccgccttcgccatccgcgccgccgtcgaacgcgccggcatcgaggccgccgaggtcgaggacctggtgatgggcaccgccatgcccgccggcaccgccggctggaacctggggcgcatgagcgcgctggcctccggcctgccgcagtcggtcagcggccagaccctcgaccgccagtgcgcgtccgggctgatggcggtggccaccgccgccaagcagatcatggtcgacggcatgcaggtggccatcggcgccggccaggagcacatcagcctggtgcagaaccgccacatggaatgggtcggcgaataccacgacgcacagctgctgagcctggcgcccagcgcctacatgcccatgctccgcaccgcggaactggtagcggcgcgctacggcatcagccgcgacgcccaggacgcctatgccctgcaatcccagcagcgcaccgccgcggcacaggccgccggcctgtttgccgacgagatcgtcccggtcaccgtcacccgccaggtgcaggacaaggccaccggcgccacccgccacgagcaggtcagcctgtcgctcgacgagggcaaccgcccgcagacagtgctcggcgacctgcacggcctgaagccggtgatcgagggcggctgtatcaccgccggcaacgccagccagctgtccgacggcgccagcgcctgcgtgctgatggacggccgcctggccgaacaacgcaacctcgaaccgctgggcgcctaccggggaatcgccgtggcgggcctggcgccagaggaaatgggcatcggcccggtgctggccgtacccaagctgctccggcagcacggtttgacggtggacgatatcggcctgtgggagctcaacgaggcattcgcctgccaggtcctctactgccgcgacaagctgggcatcgacaacgaccggctcaacgtcaacggcggcgccatcgccatcggccacccctacggcatgagcggtgtgcgcatggtcggccacgccctgctggagggccggcgccgcggtgtgaagtacgtggtggtgaccatgtgcgtcggcggcggcatgggcgcggccggcctgttcgaggtgttcccatga

SEQ ID NO: 345370 - DNA, 771 bp, Pseudomonas aeruginosa
atgagcgagcgcttctccctcgccggccgaaccgtactggttaccggcgcgtccagcggtatcggcgcgcacctggccacagtcgccgcacagtccggtgcgcgggtagtgctcgccgcgcggcgggtggagcgcctggcgcacctggccgaggacattgccgcccagggcggcagcgccctcgccgtgcccctggacgtcacctgccgcgacagcgtggaagcggcctacaacgccgccgaagaggccttcggcgtggtcgatgtggtactcaacaacgccggcatcggcaacggccagcgggtgctggaagtcagcgaggaggactggcgcgccatgctcgccaccaacctcgacggcgtctggcgcgttgcccagtgcgcggcccagcgtctggtccgtgccggcgcgcccggcagcatcgtcaacatcgcctcgatcctcggcctgcgcgtaggcactggctacagccactactgcgcggccaaggccggggtagtccagctgacccgctcgctggccctggaactggcacgctacgagattcgcgtcaacgccatcgccccgggctacttcaagaccgagatgaacgatgcctacttcgacagcgccaagggccaggcctacatcaacgacgccgtgccgctgcgccgcctcggccagttggccgagctggaaggtcccttcctgctgctggcgagccaggccggcgccttcatgaccggcagcgtgctggcggtagacggcggtcacctggtcggcggcctctga

SEQ ID NO: 345371 - DNA, 1356 bp, Pseudomonas aeruginosa
atgcaaaaaccgacaagaaccctgctcgcggccgccctgctggtcgcacatgcaggcgtgctccatgcggcggtatcggcggaggaggccaaggcactgggcactaccctgacgccgatcggcgccgagaaggccggcaaccaggacggcagcatcccggcctacagcggcggcctgactacgccgccggccagcttcgacaaggcttccggcgtgcgtcccgatcccttcgccagcgagaagcccgtactgtcgatcgacgcgaagaacgtcgacagccacgccgacaagctcaccgagggcgccaaggcgctgatcaagaagctgccgggctaccgcatcgatgtgtacccgacgcaccgcaccgtggcctatccgcagttcgtcctggacaacagcgtgaagaacgccacccgcgcttccctggccagcgatggctacacgccgctgaacgccgccggtgggattcccttcccgattccgaagagcggcgtggaggcgatgatcaaccacatcgcgcgctaccaggggatttcctacgtcattcccaaatacctggccttcaacatcgacgccgccggcaagcgcgtgctctcgactcagggtgtgtggaccctggaaagcccgttctacgacgtttcccgcaaccccgacccgagcgtctacacccgcgctcgcgccaactacaccggcccggctcgccgtgtcggcgaggcgatcatgaccttcgagagcatcgaaggcctgaagagtcgccgggcctaccagtacctgcccggccagcgccgcgtgcgcctggccccggatctggcctacgacacgcccaaccccagcacctcgggcatgtccaccgtggacgacgtgaacctgttcaacggccgcatggaccgctacgactggaagctggtgggcaagaaggagatgtacgttccctacaacacctaccgcttcacctatgccgccgaccccgacaaggtgttcggcgccaaattcatcaaccccgactacgtgcgctgggaactgcaccgcgtctgggtggtggaggcgaccctcaagcccggcgcgcggcatatctacgccaagcgtaccttctacctcgacgaggacagctgggcagtactcgccgatgatcagtacgacggtcgcggccaattgtggcgccctggctttgcctatctggcgccgctttatgacgttcaggcgatcaactccaccaataccggccactacgacctgatcgccggcagctactacatcaacctgtggccgagcgagaacggcctgaaggtctccgagaccatgacctcggacaaccagtggacccccgacagcctcgccggcgccggtatccgttaa

SEQ ID NO: 345372 - DNA, 618 bp, Pseudomonas aeruginosa
atgtcgctctccgtggatctgctgctggcgttctccctgttcgccttcgtcacctccgtcacgcccggtccgaacaacaccatgctgctggcctcgggggtcaacttcggtttcgtccgttccatcccgcatatcctcgggatcagctgcggcttcttcatcatggtgatggcggtgggcttcggcctgggcacggtgttcgaggcctacccggtgctgtacaccatcctgcgctacgtcggcgcggcctacctgctgtacctggcctggaagatcgccacttccggcccggccggcaacgacccggaggggcgcggcaagccgctgagctactggggcgcggcagcgttccagtgggtcaacccgaaggcctgggtgatggcggtcggcgccatcagcacctacacccctctgcagggctatttcaccaacgtggtggtgatctcgacgatcttcgccgtgatcaacgcgccgaccatcggtatctgggccggtttcggcagcatgctgcgcaacgtgttgcgcgacccgcgctggctgcggctgttcaacatagcgatggcgctgctgctggtggcctcgttgtatccgatcctggccgagcatcattcgacctga

SEQ ID NO: 345373 - DNA, 282 bp, Pseudomonas aeruginosa
atgcatgagcggcatggcttaccgttacgcagccggccgtccgtcgaactgcgggtgttcgccgcccgcgaggtcgccgccgagctgaccggcatgcagttcggcggcatcaccgcgttcggcttgtccgaaggcatgccgctgctggtcgatgcggcggccctcgaacgaccgctggcggagatgggtgccgggatccgcgggaccaagctgctgctgtccccggaactgctgaaaggccctcccggagtcgtggtcgccgagctcagcgaagccggttga

SEQ ID NO: 345374 - DNA, 1452 bp, Pseudomonas aeruginosa
atgaccaggatcgacttttcccagctggaccaggcccgcgaagacgccgcggcggccatgccgagcatcgccggcaagaagatactcatgggcttctggcacaactggccggcgggcgccgccgacggctaccagcagggctcgttcgccaacatcgcgctggaagacgtgccgagcgagtacaacgtggtcgccgtagccttcatgaaagggcgcggcatccccaccttccaaccgtacaacctgtccgacgcggagttccgccgccaggtcggcgtgctcaacgcccagggccgcgcggtgctgatctcgctgggtggcgccgacgcgcacatcgagttgcatgccggccaggagcaggcgctggccgcggagatcgtccgcctggtggaaacctacggcttcgacggcctggacatcgacctcgagcagagcgccatcgacctggccgacaacccgcgggtgctgccggcggccctcaaactggtgcgcgagcactatgcggggcagggcaagcacttcatcgtcagcatggccccggagttcccctatctgcacacgaacggcaagtacgtgccctacctgcaggccctggaaggcgtctacgacttcatcgcgccgcagtactacaaccagggcggcgacggcctgtgggtccaggaagcgaacggtggcaagggcgcctggatcgcgcagaacaacgacgcgctgaaggaggatttcctctattacctcaccgagagcctggccaccggcagccgcgacttcgtgcggatcccggcgcagcgcctggccatcggcctgccgagcaacgtcgacgcggcggccaccggctacgtggtcgaccccgtcgcggtgagcaacgcgtttcgccgtctggaggccgccggtcacgcgatcaagggcctgatgacctggtcggtgaactgggacgacggcctgaacaagcgcggccagcgctacaactgggagttccgcaatcgctatgccggcctgatccacggcgagcagggcggcgatgaacgccctcgcgcgccacagggcctgcgcctgctggagcgcggcgagaccagcctggtactggcctggaacgcctccagcgggcagcgcccgatcgattactacagcctctatcgcgatggcgccatggtcggccagagcgccgcgctgggttccaccgacagtggcctgacggcggacacccgctacagctacttcgtcaccgccaccgacacccagggcaaccagtcgctgcccagcgaaggcctggaggccagcaccagcggcggcgaggtagacccgcagttcccgcaatggcaactgaaccacgcctaccgggtggacgacggagtgacctacgaagggctgcgctatgtctgcctgcaggcgcacacctcgaatgccggctggaccccaccggcggccttcaccctctggcggccgctgcgctga

SEQ ID NO: 345375 - DNA, 519 bp, Pseudomonas aeruginosa
atggccaggaagaagcctgttaaccctcgcggccagccggccgactcggcgcccgacgacagcctgagcgtgctgtttcctgaccgtcagttggcggtcgggggcgtcgaggtgacggtgcgcgagctgaccttcagcgagcaactgcgccataaccacctgttggccccgctggccgatgccctggcggcagttcccccggagcagctcgacggaccggaatcgatcaacgtcatcttcgacgccctggctcggcacgctgacgcgctgcgcgagctgctcgccatcagttgcggtcggtccgtggactgggtggacgcgctgccggcagatgacggcgaagccctggtgctgacctggtggacggtgaacaacggttttttcgtgcgacggctctggcggccacgcctgctggccatggcactggccagctcgccacctggggccgaatcttcgccgacctcgtccgcgccgggcactgtcgcgagtccctcggccactacaccgggcggcagttga

SEQ ID NO: 345376 - DNA, 1584 bp, Pseudomonas aeruginosa
atgacattccagcctgatgcccggccagcgctcagcttcacgctgggtgccgggcgcgacctcgccgggcaggccgcgcgggcccgcgccgagtggctcgtggcgcgccccgggcgggcgccggcgtttctcctggcgctgctctggggacatggctgcgccaacgtggtgcaggcgctcgaaggacatctcgacggcctgttcgccgactacgcctgcactcccgagggctggccggaagcgcaggcggtacgtcaggtgctcgcctcgctgaacatgcaactgtaccgccgacgccgggagggcgagccgggggtgctggaactggcggcggggttgctgctggtccacgacggcggcgtgcacttcttccagtgcggcgcggtcggcctgctgcgctatcgccggggcagcctgcagcgcctgggcggcagtggccaggcgctgggcagcagcgcggaactggcgctggtccagcacaacctggcccaggtgacaggcgagccgctgttgctggcgccgcagccgttgctcgaagtggccgacctgcgcgccctcggcgagcgctgcgcggggctggccgaggagcgcctggacgaggtactgcaacctttgctgcaggcgccgggagcggtggcgctggtcctgccgggggccatgggggcggcacccccggcgccacggcacgccggctggccggcgctgcgcagcgcgcggccgggcgagtgcctggacggctggaccttgcaggcggcctgtgcattcggcccgtccgggcgactgttccgcgcccgcgacgaggtgggtcgtgaggcctggctgctgctcgcgatgacggacgccgacgaagcgttctggcagcgtgagtgggcgttgcgccgttgccgggtggaaagcctgccacgggtgctgtcgtcgcaacggccgcgccggcatgcttaccagctgttcgccccgccgaagtggccggtgcgtagcctgcaagactgggcgccggcgcacctgccgctggatcccgaatgcgctctggtcctgctggaacaactgatcgaggccgttcgcgccctgcagcggcgcggtgtgcaggggctgtggctggcgccgcggcagatcctgctggacgagggcggacgcctgctgttcctccccgaggccgcggcgattctgccgggcgtggcgcgccaggccatgccggccgggatcgtgccactggcaccggaactgcgcggtggcgaggcggccgacggccgtgccgaccagttcgccctggcggcgctgctctattggctgctcagtgggcgctggccgccggtcgccaacacggagggcgccgccggcagccgctacgagccgctgggcgagcgtcacgcgggcctgccggtgggctgggacggcgtcctggcgcgggcgctggcgccgcggccggaggcgcgcttcgaggcgttgtcggaattctggctggccttgcagaggccgctagcgcatccccagcgagcccagccgccacgccggccgggcctgggcggggtgctgctggtcctgctcctggtcgggctggcgctgctggtcggcctggccggttag

SEQ ID NO: 345377 - DNA, 468 bp, Pseudomonas aeruginosa
atgaattcattcgacacgttcaactggcttcgctctgcgcgtcgccttcttagcgccggactggtcgcaacgaccatcggtcttggcctgggcgcatcgctcgcctcgcacgctgcacccacagcggctccagcagccgctgcagcaagcacgccggtcgcataccgttatgctgtcgtcgacggcgtgcgcgtcttctaccgcgaggccggacccgccgaaggcccgcaggtgctgctgctcatgggcttcggtggctcgtcatacatgttccgcgatctcatcccgaagcttgcggccgccaactatcacgtcatcgcgcccgaccttccggggttcggcctcaccgaagtgccgccggcgcgcaactaccgctatcgcttcgagaacatcgccaacacgatggaagcctttaccgaagcggtgaagttggggtttggggagcaatggaaccaaaaaccaacgtaa

SEQ ID NO: 345378 - DNA, 432 bp, Pseudomonas aeruginosa
gtgacacccgaagttgaggcagcactgccgcgccgccttctgcacaccatgctgcgcgtgggcgacctggatcgctccctgcgcttctacaccgaggttttcggtatggacgtgttgcgccgcgaggactacccggacggccagttcacgctcgcctttctgggctacggcagtgaggccgatcacagcgtgatcgagctcacccacaactggggtcgcagcgaatacgagcgtggaaacgcctacggtcatatcgccttggccgtggatgacgtgtatgccgccgtagagcgcttgaagcagctcggcgcgagcgtcagccggcccgccggtccactgagcagccgcccagcggatggcagcgagcccgacgtgattgctttcgtcgacgaccccgacggctaccgaatcgagttgatccaacgccgctga

SEQ ID NO: 345379 - DNA, 381 bp, Pseudomonas aeruginosa; identical to SEQ ID NO: 157168

SEQ ID NO: 345380 - DNA, 405 bp, Pseudomonas aeruginosa
atgacactatttgttagctgtgaagccgtcgaaggcaaacttatcgcaaacccgaacggcggcaaggccggggagcccgactactgtggatgcctagagttggtgatgggtgactgggaaggggtgccccgtctgcgggtgccactcctggcgttcgaggaagggcagggagatgccctcaggtaccggctgaatctcagcggtatcgagggattcatggaactcaaaaccgtcaagtacagcccgttaagcgcagacttcgaaggcatcatcgacaaacagctcgaggtggcggcttggcgcgaatacaactcgaaggatggatggcacctgcggcttcgcgcatggggctacttgttctcgaacggcgaatggacaaggtccacggaagcccttatcttttga

SEQ ID NO: 345381 - DNA, 660 bp, Pseudomonas aeruginosa; identical to SEQ ID NO: 35583

SEQ ID NO: 345382 - DNA, 1191 bp, Pseudomonas aeruginosa; identical to SEQ ID NO: 198466

SEQ ID NO: 345383 - DNA, 279 bp, Pseudomonas aeruginosa; identical to SEQ ID NO: 33086

SEQ ID NO: 345384 - DNA, 1083 bp, Pseudomonas aeruginosa
atggatgcgctcgacgaactgattgaaggcctcgccgagcacgccgaactcgtcgtggctggtcacgttcaggcgcttggtcaggtcgccctcgccctgggcgatgtcctgcatggcgcggcccatcaggtgcagcggctgcatcagcaggcggatcagcaggccgagcaggagcaggatggcgacgatcgagatcagcgcggcggcgatagccgagacgcggaacttgctgagcatggcgtaggccttgtccttgtccaccgagatgccgatgtaccagttcaggccggacaggcccttgatcggggtgaaggcgaggatgcgggcatgcccgtgcagttcggcctcgctgaaaccggcggcgatcttcggcgtgttctgcgggtagacctcgcccagggtcttcatcacctgctctttgtccggatggacgaggatcttgccgtcgccgctgaccaggaaggcgtagcccatgccgctgaagtccagcgaattgatgatctgtaccagggtcttcaggctgagatcgccgccgaccacgccgagggtgttgccggcggccttcaccggcgttgccgcggtgatgatcagttcctgggtggcggcgtcgacgtagggttcggtcagggtcaggccgccggcagccacggcatccttgtaccaggggcgggtgcgtgggtcgtagccggccggcatcgggctgtccggacgcatggtgaaggcgccgtcctgctggccgaggtaggtgaagctgaaggtcgaggccagcaccggctgctcgagcagggcgctgacattttccggggcgtggtcacgggccagggtctgtgcggtctgctcgaccagcagcaggcggccgcccagccagttctggatgttgctggaagtcacgtcgcccatttcccgcaggtagctttcgaggtcctcgcggatcgcgttgcgttgcaggtagtcgttgtagagggtgaacagtgcgaaggcggcgaacaccacgagggaggccgcgaggaggatcttgtggctgaacttcagacttttgatcatgttgtattgcgtccaggagtatgtagcgccagtctttga

SEQ ID NO: 345385 - DNA, 2505 bp, Pseudomonas aeruginosa
atgactgtgcttcgccgccttgaccacgaagttgccgggcatgcccagctcgatgttgccgcccttaagggtcaggtaggcgccgccacacatcagggtgatgtgctccttcgccgtgaccagcacgtgtttctggctggcgctgacctccacgctctgctcggcctccaggcggatatcgttcttctgcgcctgcagcagcatcggcccctggtgggcgatctggcgcagttcgccgccctgggcgaacaggccgatgtcgctgccggcgttgaccaccaccttctgcccggcggtcacctgctggttctgccgggccacgctgtcgacgtgctcgccggcggccagggtcaggctcgccggcgtcgccgcggcgatccccgccgggccgctcagggcgatcgccggcttgccgccgacgccctgcccgggttcgtcgttggcgccaaggccgaggtcgcgcacggcttcctggaggctctgctgcggcgccgcatcgtgccccacgccctggtgcgccccggcgtagtcgcccagctcgcgagccagttccagcgccgcttccagcacctgcaccaccacgccacgctcgagatggccggcaccggccctgagctgctcctcggcgctcagcagcaagcccctggccgcacgcaccgcgccatgttcgtctgtgcgcagttcgaagccctcgccgcgcggctggccgccttcgggccgaggatgggtcaggtagcccaggtgcagcgcgctggcgccgtggtcgctcatcagcgccgcactgatctgcgccgtggtgtcgtcgatgcgcagctcgttggcccggctgcccttgtactccttgctcttgatggtgctgaggatcttgtggtcaggcagcgcgtagggcggccggttggtcgcccggtaggtgcgcccggtgatgatcggctggtcgcagtctccgtccaggtagtcgacgatcacctcctggccgatccgcgggatcgccatgtgcccccagtcggcgcccgcccagttctgcgcgacgcggatccagcaggtgctgaattcgtccggacggccctcgcgatcccaggggaaccgcaccttcactcgtccccactcgtcgcaatggatctcttcccctgccgggccgaccaccgtggcgatctgcggaccgtcgatgcgcggccggggcagcggctcgggacgccattcggcgtcctcgggcaccagttcggcgcgcaggtcgtagctcacccccagaggtgcgtcggcggactcttcctcctggccggcatactgggtgccgcgatggaccacccgcaccggccgccaccaggcgttgaagtcggcgcgcggatgaccgctcagctcgaacgcgtggcccgggatcagccgcgggtcgtcgccgctgacgcaggcctcccgcgcgtcgcgccggtgcccgcgcaggcggttttcgctgaagggccggcccgcggcactctgcttgtagcgcccggggtagtcgtagcgctcgtaggtcgagccctggtgctcgagcgcctcgccatgcaggtgctgttcctggtcgaaggtcggccgcttgaagctgtagtcgcgctgggtctgccgcgccgtgcggacgttttcgctgtagcgcaaggcatgcagcaccggccgcgggttgtcgccctccggctgggcgctgaacagcaccgggccgccggcgatgcgctcctggacatagagccggtcgcagcagaccagggtgtggcgctgctcgtcgaagcggaagtagtagaccaggccctcctcgaaggccagccggtcgtgcaggtagcgatcgctgtcgccggcctgcacgcagtattcgcgcggcagatgctcgtggtagatgcgctgctcgtggtcgagcacctggtgctcttgcagcaacgcctggaggatctccggaacgctcttgttctggaagatgcgccagttggaactcagctccaggcgtgccagctgcggctccagcagcagttcgtagcgggtccggcgaaagcccgaggccccctgggtgaagcggctgacgaggccatggacgtagcggacgggtcggccgtcctgccacagggtgaaggtgcccgactggtcgagcacctgcttgaaatcgacggcgcgcctgtcactggccagcttcaggtgcaggcggaaaggctcgcagagcgcttcctccagctcgaactcgacaacgtcgaacgcgagcttgccttcgccgacgacgaaggtgaacttcaggtccctttgacgcatggatcgttccctgttccagtggcgggcccttcccgttccgtcgggggggccggcccatgctactactgttgcccggtcgacctccggatgtctcccggtccgggtcgattctgcgaagcgcggacgcttccgggtggcggggagccgcacgcgcggccggctccccggaccctcagccggcgaccggcgagcgccagtcgtcggaaccggaggtgccggagacttcgtgggtccaggtga

SEQ ID NO: 345386 - DNA, 939 bp, Pseudomonas aeruginosa
gtgctgttcgttcccgccggcttcaccctgctgtggatgaccatcttcggcgacaccgcgatccacatgatcctccaccagggcctcaccgacctggccgacgtggtcaggcaggacagctcgctggcgctgttcgcgctcttcgaccattttcccctgagcggcctggtctccctgttcgcggtgctgatggtggtggtgttcttcgtcacctcggccgactccggcgctctggtggtggacatgatcgcttccggcggcagggaccggtcaccgatctggcagcggatattctggtcggtgctgatgggcctggtggccatcgccctgctgctcgccgacggcctcaaggccctgcagaccgccaccatcgccagcgccctgccgttcctggtcatcctcatgacctcgacctggggcctgttcaaggccctgcacctggacgccaccaagcgcgacatccgctaccaggcgctgaccatctcgcgccccagcggccgcaacggcggcggcgccggcaacgacggctggcaacggcgcctgcgcaacatcgccatgttcccgcggcgcagccacgtcaagcgcttcatcgccgaggtggcgcggccggcctgcgaggaagtcgccggcgaattgcgcaagcagggctacgaggtccaggtgagggatggcgaggacagtcgggtgcgcctggaagtcagccacggtggcgaggccgacttcgtctatgaggtccgcccgcgtgccttcgccacgccgagcttcgtgatgcgcgacagcgaggattgcagcgagtcgcgcaagtacttccgcgccgaggtccacctgcaggaaggcggccaggactacgacgtgatgggctggagccgcgagggcgtgatcggcgacatcctcgaccagtacgagaagcacctgcacttcctgcacgtggtgcgctga

SEQ ID NO: 345387 - DNA, 378 bp, Pseudomonas aeruginosa
atgagttctcagccccgtcatcgccctcagtcccacagccctcggccactcctcgtcgccgttgccggactgaccctgctgtgcggcgcctggaccagttcggcgctgggtgactgcatcttcgactccggcacgaaccagacctcggccatcatttccccgctacccacaagcatcacactgaaggccgcttccatcggcggtgtcatggccacagacttcacagaagtgggtagagtccaatggtggagttgctggaaagccccttatggcatgcccgccctgaagacaggccttgtccccgctgacggcttcgagaatgtctaccagacgggagttccgggagtcggtattcgcttcggcttctatgcattgtag

SEQ ID NO: 345388 - DNA, 381 bp, Pseudomonas aeruginosa
atgcagcacgattacgcgatagcccatgtctgccgccgcgcgtactgcggcgtcgacgcacatatggctcattgcacctattaccacaagttcctgtatatcagcggcttccaactgctgcttgagatccgtttcccggaaggcgttgatgtgattttttacaatcacaggctcattacctacgggtgcaacagcgggctgaatttccgcgccgttcgagcctttgacgaatatttgaacgccgttatcggactcatgccgtatgtgaaaaactgggatgtttgtttctcgcgcgtggctgattacctttcgggcatttccaacagcctcttcaatatttttcaaaggcagtttgccggctcttcgcatttaagggtgtag

SEQ ID NO: 345389 - DNA, 969 bp, Pseudomonas aeruginosa
atgagcaaatgcgtaatccatgtcagagctaccgctgtgccaacgcagatcaccattggggtaatcaacaggcccgcgactgaaaattcacgcaacatcgactacctcacaattcgcctgtaccgcaatgcggtgaatgtaccgcaattttgcgttgtatcgcaatatgatacagtgaccgaaattttggaggtgacgatggacgagcgggttccaactggggtcaacgatgagcgtggtgggggtatccaggtcattgcccgcgcggcgaaaattctgaatttactgggaagaaacgctggtggtatgagtctgggcgaaatagcccaggcagtagatttgcctcgttcaaccgtgcagcggattgtaggcgcgctcgaagagcagggaatgattaggagtggaggcgctggcggcatcagtcttggcgcaggtttgttgaggcttgtagcgaacgctcatgtcgatcgcctgaccgtcgttcgcccttggctgcacaagctgagcgaggggattcaagagacggttgtcttgtcgaggccagctggcatccagctgattgttgaagatcgtgttgtggcggatcgtgagttgcaggtcatgccacgtcttggccaactggatacgccgctgtatggaacatctgctggacgggcccttctggctttggacagtgatgaggatgtcagagctttgctcgcagctgggagcgctacgaagcagcaggcggccgcccagagtctgatggttcagttagaagctattcgaaaaaacgggatttccagtgaccacggcgagcacatcgagggaatcacgacgaccgccgtggcgctcgatacggtgctgggacgtttcgcaatttcgatgcctattccgacattccgtttcgagaggaaacgcgacaagtacatcgaggaattattgcgctgcaaggccggtttgctcaaagaaattggtatagatggctga

SEQ ID NO: 345390 - DNA, 210 bp, Pseudomonas aeruginosa
atgcaaacacgtggtcaagtcaggtgcaatttcccaggcgacaacatccatgagttcatcaacctcatggatggcaacggcgagctggtgttttccgaccgtcaggccacgcgcatggaacgtgcgatggccaacatggagtttggctttggcgaaggcggctaccaaccgtccgagttcatcaaacgcgtgcgacgtgaagtcgtctga

SEQ ID NO: 345391 - DNA, 1344 bp, Pseudomonas aeruginosa
atgtccgatcttgacgcacttccgttcgcgtttccatccgtgagagccaagaagctcacagccgccttcgacggcgggcgcctgacctcggacggcggcgtcctgctgctggctcaggcggcccggcggatgcggattgccgacaagctcgccgcggtgatcccggaccggcgcgatccgagccggatcgtgcacccgctgcccgagatcctcctggcgcgcatcctggccatcgcctgcgggtatgaggacgcggacgacctcgaccacctgcgcgccgaccccgccttcaagctcgcctgcgggcgcctgcccgagagcggcgcggacctgatgagccagcccaccgtctcgcggctggagaacacgccggacctgcgcgacctgatccggctcgggcgcgtgctggtcgacctgtactgcgccagctacgccgtgcctccagccgccgtcaccctggacatcgacgacacctgcgacgtggtccacggccagcagcagttgtcgttgttcaacgcccaccacgatgcgcgctgctttctgcccatccacgtctacgacaccgccaccgcgcgcccggtggcgatgatcctgcggccgggcaagacgccgtccggccgcgaggtgcggggccatctgcgccgcctcctcagggccatccgccgccattggccgacgaccgcgatcacgatccggggcgacggccattacggccggcccgaggtcatggactggtgcgaagacaacggcgtcgcctacgtcttcggcctgaccggcaccaaggcgctggccgccaaggtcgaggatatcgccgataccatccgggtggtgcgggccatcggcgacaaggatgcggtgcgcggctttgccgagaccacgcacgcagccaagtcctggcggcaggaacgtcgcgtcgcggctcgcatcgaagccacgcggctcggcctcgacatccgctacgtggtcaccaacatcgaaaccggcacgcccgaatggctctatgccgagctctactgcgcccgcggccaggccgagaacctgatcaagctccacaagggccagctcgcctccgaccgtacctcgtgccggaaccccgccgccaaccagatgcgcctcgtgctgcacaccgctgcctattggctgatgctgaccgtgcgcgaggccatcccgatcacccatcgcttggccaaggccgagttcgccacgatccggttgcgcctgctcaaactcggggcccgcgtccgcgagaccgcggcccgcgtccgtctcgcctttgccgcagccagccccgaggccgacctgctgcgccacttggcgatcgcgctcgccccggcaccggcctga

SEQ ID NO: 345392 - DNA, 315 bp, Pseudomonas aeruginosa
atggctaagccgaatgatacgtctaccccttccgtaacagaaccgtccccccgcttcatccccctgctgcccacctcgcaggccaaccgctttccgcgcaacgccacgctgtacctcgacacccaggcgccgcccggccagttgttcgagagtgcgaaagcgcgcctgaagtcggcgatcaacgtccttgccctgacctgcctgctcgacgagaacgaagagcccggcgacaccctcgcctacatcaacggcgccttgctgaagctggtcagcgatgccctctccgagatcgaagcggcacacccacgccagtag

SEQ ID NO: 345393 - DNA, 540 bp, Pseudomonas aeruginosa
gtgctcctggcgtcgatctgggggctgttcaaggccctgcacctggacgccaccaagcgcggcattcgctaccaggcgctgaccttctcccgtcccaccacgcgcggcgccgcgggcgagacggacggttggcagcggcgcctgcgcaacatcgccatgttcccgcggcgcagccacgtcaaccgcttcatttccgaagtggcgcgaccggcctgcgaagacgtcgccagcgaactgcgcaagcagggctacgaagtccaggtgcaggatggcgaggacggccgggtgcgcctggaagtcagccacggtggcgaggtcgacttcatctacgaggtccgtccgcgcgccttcaccacgccgagcttcgtgatgcgcgataccgaggacagcagcgaggcgcgcaagtacttccgcgccgaggtccacctgcaggagggcggccaggactacgacatcatgggctggagccgcgacggcgtgatcggcgacatcctcgaccagtacgagcggcacatgcacttcctgcacgtggtgcgctga

SEQ ID NO: 345394 - DNA, 621 bp, Pseudomonas aeruginosa; identical to SEQ ID NO: 239930

SEQ ID NO: 345395 - DNA, 1302 bp, Pseudomonas aeruginosa
gtgaacaatcttaccttttctagccctgatctttccagcttttgccaactgaataacctcggcctgactgccactggacaacatctttgtgcagagcgcgccgtcatcgaatgtcgtttaaccaaagcacccgagccatgccccaagtgcggggctgctggtgtttcacgcggtactgtcgataggcatcttgctcacacaccttacggacaacgaccaaccagattgctgctgcgtatccgtcgctggcgttgtgcttgcggctgtttctggcatgaagatacaaacagtgcagcacctccacgttcaaagctttcatatggggcgatacgctgggcattagctgccatcgtgctggatcatctgtcggtatctcgtgttgcgagccagcttgatgttgcatggcacaccgctaataatgccattatcaacgaaggacggcgcctgctttttaatgactcgacacgttttgacggtgtgaccgtgctgggcgtggatgagcatgtttggcgacatacacgctgtggtgacaagtacgtcaccatcgtggttgaccttacgcccgtgcgtaacaaaaacgggccggcccgcttgctcgatgtgctggaaggccgctccaaacaagcctttaagcaatggctacagagtcgccccaaatcgtggcgtgaccagatcgaaagcattgccatggacggttttacggggtttaaatctgcagcgcaagaagccctgcctcaagcccaaaccgtgctggatcctttccatgtcgtgcgctgggcaagcaacatgctggatgaatgccgccggcgtgtgcaacacgacatcctgggccgcagagggcgtaaaaatgacccgctctacaaaagccgtcgaacgctactgactcggatcagctacctgtctgacgccaacaaaaagcaactgttccagctgtttgcagatgagcaccacctcgaagtggattgcacctggagcatgtaccaacgggtggtcagcgcctacaacgagccggatcgaaaacgtggtaaaaaactcatggaagaggtcataaatatcattacagccggcgacttgcccaaagcgctcatcgaggtgaaaggcttgggggaaacgctgaaaaaatacgctgagagcatccttgcctacttcgaccggccaggaaccagcaacggtccaacagaagctatcaacgggcgacttgagcacttacgaggtaccgccttgggctttagaaatttaaccaattacatagccaggtgcttgctgaagtcaggagggtttagaaatcagctacacccttaa

SEQ ID NO: 345396 - DNA, 792 bp, Pseudomonas aeruginosa
atgaaccgcaccatcaaaagcataatccttgccagttgcctggcgctgatacagggctgcactgccctgggcaagtccaacagttttaccgttacggcggacctgccgcctgagttcacttatgaagccacggcaacttatgtgccggccaaaggtgaaaactgcacggtgccgggggggaaggatacccagattggctataactcgggtcgggaaaaatatgaacgggattcgaagatattgttacgccgtacggtcagtggctgccccttggtactgcagagcatcgatttctatatctatggctggtatggcaagagttggagggatttcgggcgtgactcggctctgatcgtcgtacgagacaagctggtcgaggtgaaaaaaggcactttcaatgcagtcggggaaagcgagtttgccgggcaatgccagtggctgtttcgtacagccgggaagacccgtgttctgagaaagctcctcgattgcaaaaggatggatgagacgggtgtacggcgcaaagcgaaacctttcgtggcctacaccctggatcaactgcccggcaagacggtgaagttgaggatcaagctggctgacgaagagctgcccgctatcggcgacacatgggtcaaggtacctagagggtggaagcgttgcttgggtgacaattttgaagatcaatatgcgttctgctatggaaactataaggacttcagcaccttcagaatgccggatgggcgcaactgcaccatctaccccggttgtacggaaaacaagccggtgaccccatga

SEQ ID NO: 345397 - DNA, 417 bp, Pseudomonas aeruginosa
atggcccttcaacctcgcggcatccgcaacaacaaccccggcaacatcgtctggtcggcacgcaacaactggcagggccaactcccccacgacccgcagatcgagccgcgcttctgtcgtttcgacacggcgcataacggcacccgcgcattggccaagctgctgctgaactaccgcaaggtctatggcctgcgcaccgtcgaatcgctgatcgcacgctgggcgccgtcgaacgagaacaacacccgcgcgtatgcctcggccgtggcccgagcgatgggagttccgccgcaggccagcctgcacctggaccaggccaccctggtcgccctggtgaccgccatcattcaccaggaaaacgggcagcagccctacagcgccgagcagatcgcccaggccgtgcgggaggtgctgtga

SEQ ID NO: 345398 - DNA, 807 bp, Pseudomonas aeruginosa
atgaccatcgatacctacgtcttgttcgaccaggacgttttgaagaacggcaacatcatgaccaagccagaagtggttgccgagttgaaccacatggccgttcaagccgaccagcatgagcgcatcgtcggggcgcttgatcaacttcgcgaagcactcgaatggaatcaggcaggtcagcgcgaactactgcgttcagtgacagcagagcgcgacgccgccctggccagggtagctgaattcgaagcccaggctcagcacagcgtgccggagggctaccgcctgatccgcctcgaacacttcgccgccatcaaggcgcagctcgatcctgagcaggtcgatgcgtaccggggacggaacatctacgacgaagacaaggtgtacgcgaactggaacgcgtgccgctcggcactcgacgagataaaggatgtgtttcagcagatcgattgggacgccgaaaacgagctggctgagctactcgccgccgcgcccggcaaagaagtgccgcaggcctggctcgacgtgcaggcagagcgccgccggcagatcgaggctaaaggctggacgccggagcatgacgatctctattgctccgccgaacttccgcgagccgcagcagcgtacatcctcaacggagctaacgacgaggctccggctatctggtcgttctcggcgaagtggtggaaaccccgcgacgcgcgtgccaactacgtgcgggcagccgccctgatcctggccgagatcgagcgcctggaccgagcggcctcactgctgagccaggaggtgccgccatgcgccgaacactga

SEQ ID NO: 345399 - DNA, 189 bp, Pseudomonas aeruginosa
atgaccgaaaagaaagcctctcccgagttcgaactgctgcaacgcatcgacggccgcctggagcgcttcgaggaccgattcccgcagatcgaacgtaaggccgtgctgtacggctcggcggccggcgcgctggcgggtggcctggttgcctgcggcctgctcgcggcgcgtatcaagctcggtatctga

SEQ ID NO: 345400 - DNA, 495 bp, Pseudomonas aeruginosa
atgatcgagcgcaattggcccgacatcctgcgcatcgccgccaccattgctgccgggaccgtcgcgccaagccagattctgcggaaactcgcctcctatccgcggcagaacgagctcgcgacagccctgcgggaagtcggtcgcgtcgagcgcaccctgttcatgatcgactggattctggatgccgaactccaacggcgtgcccagatcgggctcaacaaaggcgaagctcatcatgcgctgaagcgggcaatcagcttccaccgccgcggtgaaatccgcgaccgttccgccgaaggccagcattaccgcatcgccggcatgaatctgctcgccgccatcatcatcttctggaacaccatgaagctcggcgaggtcgttgcaaaccagaaacgcgatggaaagctgctatcgcccgatctcttggcccatgtttcgccgctcggatgggaacacatcaatctcaccggagaatatcgctggccaaagccttag

SEQ ID NO: 345401 - DNA, 603 bp, Pseudomonas aeruginosa
atgctcagtacttataaatcccagtcggtatccgcccggattgcgcaaaggattaagcgtctacctaaagggcagcctttcagcataagccgcttcacagggtttggaacgaaaaacgccgtatccaaagcgatagctcgattggtcaaccggggcgagctcgaacgattgtatcgcgggatctatatgcgcccaaaacccggacgttacattgctaacgctcgtcccaatctctggaaattgattagcctcatcgccacacagaagcatctgtctttgcagatccatggtgtgaatgccgtcaggaggtttgggctcagcacccagatgccgctcatcccaatttactacataaatggcgctagccgatctgtatttataggcaaagctgaagtgcggctgatacatgcggcgccaatggttatgcagcacccagggactgaggtggggatggctataagtgctctatactatctaggtaaagacggatctactccagaatgcattgcggcgattagaaaggcactaaagccagaagacctagtcaagttggcggcttgcaaaatgccgaattggatgcgcatggcgctggaagcgatatga

SEQ ID NO: 345402 - DNA, 315 bp, Pseudomonas aeruginosa
atgaacgccggtcgccttcgccatccgctcaacctgcagcgcgtggaggtagtacaagatcccgtcacgggtgaagtgatcgaagattgggtgactgtgagcagggagtgggccagcatcgagggcgtgtcaggtcgcgagttccttgccgccagtgcggaacaggccgagacgacctatcgcatcaccatccgcttccgcgatgacctggacgccacctggcgcctggtatcgggagcgaccacttacggaatcgaagcgatcctgccaggcaatcaacccgtctggctggtgcttatgtgcaagacgctctaa

SEQ ID NO: 345403 - DNA, 465 bp, Pseudomonas aeruginosa
atgaagaccacgccccgccgcccccgctctgacagcgccaaagccgccactgccgccgcccaggccgccgcccttgggccgattgcgccgcctgcctgtgtgcgtgtgtgtgatcgctctcggcccttctgggatgccatcgtgcttgcccgcccccgcgacacctggacggaagccgacctgatcttggccgcgagcctggcccgtgcctatgccgatatcgagcatttgcaacagcgcatcgacgacgacggcctgctgctggaagacggcaagccgaacccggcgtgcgacctgctggacaagatgacccgccgcgcgctggctaccgctcgccagctcaaggtggacaccatcgccaccgtgggcaaggcgcaggatatccacaagggagcggccctggagcgcaccgctcgcacccgcctcgatgacgatctgattccgacgctggggactgtgcaatga

SEQ ID NO: 345404 - DNA, 1239 bp, Pseudomonas aeruginosa
gtgaagttcctcgaccgtctgctcaagcgcaacaccactccgacctatgacacctactggaatcagttcaccggcgcggacgtggccggcgtcaccgtgaacgtgaacagcaccgagtcaatcagcgctgtatatgcctgcgtggccgcaatctcggagagtgtgggaagcctgcccctgaacctctatcgcaagaccgatagcgggcgcgagaaggccaccacccacccgctctatcgcctgctccatgaccagccgaacgaatggcagacggccctcgagttccgcgagcagatgcaacgccagatccttctgcgtggcaacgccttcgccgaaatcaaatggtcgccatcgggccgagtggaatcgctggtccctctgcatccgctcaatgtcaccgtctctgtgagcgataccaatcgcttgctgtacgacgtgaccgaccgcaaaggccacgtccgccgcctgctggccgatgaggttctgcacctgcgctaccactccgacgatggagttctcggacggtccccgattgccgttgcccgcgacaccatcgggctggcgctggccgagcgcacccacggggaacgaatgtttgcccagggcaccaagctgtcgggagtgatcgagactcagccgggcactaccaaggaccaagccaagcagatccgcgagagttgggccgagggctacggttccgtgtccaaccacggcaagaccggcgtactgccgcagggcgccaccttcaagacggtgagcatgaccctggaggatgccgagtggatcgaggcccgccgcctgagcgtggaggaagtggcccggctgttccgtgttccgcctgtgctgatcggcgacctgcgcgaggccaactacagcaacgccgtggagctgggccgttactttgtaacgcacaccctacgccgtcacctggtgctctgggaacaggccatcaaccgctccctgattaccgacaccgcccacttcttcgccgagttcaatgtcgagggccttctgcgtggcgactcgctgaaccgcgcgcagttctatgactacgctctgaaggacggctggatgctcaagtccgaggtgcgccagctcgagaacctcccagctattcaaggaatcaacgatgcccaacaagaagccgcgccgcctgcagacacttccccccaggctgaaggagctcgacccaaccaaaaggctcaagagtctggaagacctcaagggggagcagcatga

SEQ ID NO: 345405 - DNA, 510 bp, Pseudomonas aeruginosa
atggaacggcgagcattcagcattgagcagaagggccgcaccctgaccgggtacgcggctcgtttcaactccgaggcgaacatcggcgacttcgtggaggtgatccgccaaggtgcctttgcgcgaacgctcgccgctccctctgccgtgaacatccgtgccatctacgaacacgatgacacggcattgctgggccgcgtcggcgccggcaccttgcgcttggttgaggatgacgtgggcctagctttcgagctggacctgcccgataccacgctcgggcgggatctggccgaactggtgaagcgtggcgatgtagccggctgttcgttcggcttcatggtcgccaaggattcttggctgccagggccgctgcgtgagttgcgcgacgtggacctgttcgagatcaccctgacctctcgcccggcgtacgacagcaccagcgtgtcgctccgctcgcttgcgttcggtcgccttaacctggctcgccgctacctggaggccgtcgcgtga

SEQ ID NO: 345406 - DNA, 1230 bp, Pseudomonas aeruginosa
atgaagttgcaccaactccgcgagcagcgcaccgccaaggtcgccgcgatgaaagacctggttgacgttgccgccgctgctggccgcgacctcaccgccgacgagtccaaacagttcgacaccctgaaggctgaagaacgctccctgtccacccagatcgagcgcgccgagttcctggccgatgccgaacgccgcgcagccggaacccctgcctccggcaacgacgttgccgacttcgaccgcctggccggctccgtctccgtggtgaaggtgatccgcgcccagatggaaggccgcagcctggacggcgccgaggccgaatatgcgaaggaagccgagcgccgcactggtcgcaaagcccagggtatcttcgttccgatgggcgccctggagactcgcgccaacaccaccaccagcgccaccgacctggtgggcaccgaccaccgcgccgaccagtacatcggcccgctgcgtgaccgcctgttggcccgttcgctgggcgtgcgtgtgctgtccggcctgcagggcgatgtgtccattccgaagttcggcaccggcctgactaccggctgggtggcagaaggcggagcggtacccgagggcaatatgaccttcgacgccgtgaccctgaccccgcgtcatgtgggtggcaagaccgagatgagccgccagctcattcagcaatcggccccggccatcgagcaactggtccgcgacgatctggcgtacctcatcgccaagcagatcgactccgcactcatctacggcggcggcaccaatgaaccggtgggcgtgctcaacactgccggcatccagaccgccaacctcgccaccctgacctgggccaacgtgctggggatgctggagaaggccgagatcgcgaacgtcgatgcggtgaactggctgaccaaccccgccgccaagaccaagctggcgtccaccctgaaagaagccggcctgccaggctacctgctggagaacggtcgcatggccgatctgccgctgtactccaccaatcaggtgctgagcgacagcaacggtactccggtaatcctgggcgactggtcgcaggtgctgctgggcatctggagcgagatcgacatcctggtgaatccgtacgccgaacctgcatacacccgtggcggtgttcaggttcgcgcgatggccacctgcgatatcgccctgcgctaccccgaggcgttcgtcgtcgccaccgacctgagcgcctga

SEQ ID NO: 345407 - DNA, 219 bp, Pseudomonas aeruginosa
atgtccatcgaacgcccgaagggtattcccatcgctgtaggccaccgcattgtcaaagatgaccaagagcctcaaatcgacccctatggattggcaatgattgaatcgctatgcggcaggctccagaccttgcacttcgcagaagacgatgagggacttaaggagaagttggggcacgtgatggagtatgccgagagcatcgtcgatcgctacagctaa

SEQ ID NO: 345408 - DNA, 402 bp, Pseudomonas aeruginosa
atggcgaagaaagccaaaccgaagattgattggggtccgatgggcgccttcgtgatcccgaaggccctgatggcgcaccctgatttccgcgacctgtcgccgtctgcactcaaggttctgatggtgctcggctaccagctcaacgggcgcaacaacggcgacttgtccgccactcacgtgatgcttcaggagtggggagggatggccgaagcaacgctatcgaaggctctgaaagaactgcaggagcgtaatctgatcgtgaagacccgcaccaactacaaaggccgggatggcgctcgctgcgctctgtacgccgtaacctgggcgcccatcgatgaatgtcctggcaagatgctggaaagcagcccgaccgtcactgccccgcgcaaactgaccctctaa

SEQ ID NO: 345409 - DNA, 237 bp, Pseudomonas aeruginosa
atggcatcacactcgtccaccgagcaagaccgcaaaatgatggaggcgctgcgtaaaggccccatcaccaccctggaggcggccaacgacctggatatcgttcacccgccgaacacgatccgccgcctgcgcaacaaagggcacgagatcatcacgcactggacctaccaggctaccgaccccgggcgtccgccccaccgggtagctaagtacgtcctgctgcgcgaagcgtcctaa

SEQ ID NO: 345410 - DNA, 255 bp, Pseudomonas aeruginosa
atgaatatctatcccctcggccatgagtccgcgaggctcatgagcgaagccggctatgccgttgacgtgatcagcaaactaatccttgaggaccagtgccggaaatctgatcgcgaccgggagggttatctcagcgactacgaccttggcgggctgctcgccgcgctcaccgttgccggtaacagcctgcaggagtgcgaagtaggcgcgccgtcgccggcgcctgaaaggcgtgaaatggagagcgcgtcgtga

SEQ ID NO: 345411 - DNA, 270 bp, Pseudomonas aeruginosa
atgaacaccgtggaaagcatcgccgacgacggcatcgagcacgcccgttattgcactgagcaagcccgctggctgaatgccttgggcacttccatctgcgacgctctggtcggcggtaaggcgagccctgatatccgggcagatcgcgccaaagagttggccagcctgatctgctacctggcgcacaacctcatccactactcggagtctcgcgcctccgaaatggagaaggagcttgcggcgctgcaggcgcaaggtggcgcgcaatga

SEQ ID NO: 345412 - DNA, 201 bp, Pseudomonas aeruginosa
atgaaccaagcagcaaccgcctccccgctcgccgtcggtcccgaagaggccggccggatcagtgggcacacccgttccgcaatctacgaagccatcgcccgcggcgacctgctgagtttcaagtccggcaagcgtcggctgatcctcatcaaggagctggaggcctggctgaatcgcatggcgaaggagaacgcacgttga

SEQ ID NO: 345413 - DNA, 1263 bp, Pseudomonas aeruginosa
atggcccgtatagtgggttttgcacccaccacgcacccacgggaagccatgaaagccaagctgactcagagcctgctgaactccctgcagacgaccggcgccacctatgaggttcacgataccaccgtggtgggcctgtttgtgcgcgtcacagcgaatggacacaaagcctacgtgctgaggtgggccagggggaaaaaacgcaccttgggccgcgtaggcgtgctgacgctggatcaggcccgcaaggaggcattgcaggatctggccgaagctcgcgaacacggcgagcccttggccgtcgccctgggccgaaagaactccactacccccactctgcgcgacttcatcgacgaccactattcgccatggatggacacccacctgaagagcgccagcaagacgctgaacctgatcaacgtgggcttcgccgagataatgagcaagcgcctgaccgagatcacccagcgcgacctagagacgctgcgcattagctggcaggctgccggcaataccgacagcaccgcgaaccggaagatggcttcgctgcgtggcgccctgtcccgggccgtggagtggggattcctcgatgaccatccaatggcacgcctgaagcagatcaagaccgaccgggccggccgcgttcgctatctcctacccgacgaggaaaagcgcctgcgccaggctatggaggaccgccaagagtcgatccgaaccgaccgtgatagcgcgaatcagtggcgagccgagcgcaagaaagagcggctggccgacctgcgagaagtgctgttcgtcgatcacctcaagcccctggtgctgctctcgctcaataccggaatgcgccgcggtgaagtattcaacctgacttgggccgatattgaccttaccaataagctagtcactgtcgagggcgagggcgcgaagtcgggccagacgcgacatatcccgctgaacaaggaagctctggagactttgaagggttggcgaaaacaacatccccggaataccgggtatgtattccccggcaaggacggcgagcgcctggacaacgtgaagaagtcttgggaggggctattgaaactcgccaatgtgacgggctttcgctggcacgatctgcgccacacgttcgcgtcgaagttggttatggctggcgtgcccctgaacaccgtgcgggaactgctggggcactcggatattacgatgaccctgcgctatgcccacctcgcaccagacagcaaggcggcggcggtggaactcatttag

SEQ ID NO: 345414 - DNA, 180 bp, Pseudomonas aeruginosa
atgaccaagcgtcgcatcctcaccctcaatccgtccaaagcacgcgcactgtttcaccgcgcctgcgcaatagccgctctgcacgccgactccagccttgccactcgcttggcccggtacaacgctcatatggagcgctcccgtgcgctcgaatctgcaagtgttggaggtgtaaaatga

SEQ ID NO: 345415 - DNA, 567 bp, Pseudomonas aeruginosa
atgaacgctcccgtcaaacctatcttcgcaacagcagaattccgaccaatcaacgaacgccgctccaccctggatgtggcctaccccaagacccagaaaaaacgcctacgcttcaagaagccgcaaaagcgtggtggcgattccttcaccttgcccttcgttggcaaagaccatggccagttcagctactgggacgtaccgctgacaactggctttctcgtcggcaccttccttggcggtgcaatcgctggcatctatctgaactacattcgcgagtccgagagcatcatcaaacacatcttgctgggcgacatagccgccgcctgggctgacaaagccagctcctgcactccgtcagaacttgaaagtttgcgcggccagatcaagggcttcatgggcaagatcaatccctgccaagtggtttccaattggcagggagcatcagcggcaagcgcaccgcgtagcgacaaacagttgctcgaagatgcgaacagttggctagcaatgggtggtgacgatgtactgctcaccatcgtagctgctgccgaaaaaggaggttcgaaatga

SEQ ID NO: 345416 - DNA, 267 bp, Pseudomonas aeruginosa
atgagagccttcgtcgaaaagcgcggtaagggagtcgaatacttctacgttatggacgagggatgtccagtatttccaatagggctttgcggcccgttcgccaagcgtcgcgaggctaaggtggctgcggcaaagctgcgcgccaagaatccccgccgcaaactgctggtttgtcatgggacattcttcggatcggtacaggtccaatcgctgatccaggcgcgcatccaggcgcgggcagatctcaaagccctgcctgaagcttag

SEQ ID NO: 345417 - DNA, 186 bp, Pseudomonas aeruginosa
atgaaccactcctacttaaccacctactaccgcttctccttggcgctcttccacagctcgaaaaggctcaaaagtacgcgtgaccccacggtgcgcaaatttgggcgccaattctgctggcaggaagagttagcaaacgcagatctggtgttagctcactggtggcgtttgaaacacgggcagtga

SEQ ID NO: 345418 - DNA, 1134 bp, Pseudomonas aeruginosa
atggctatgtccccgcagcaacaaatggaacacctgcacgctactcttctcgacgtcgttgatggcgtcaaagacttcaaggacggtcaggcagagcttcaagctcgcatgcacgccctagagcaatctttcttggctgacaatccttcccaggcgctcagccacggcactacccgcgatgtgtccggcgaggtcgtccgttttctggacgagtccactgcattcgcatcgctgaaggaatggaatcacggcaccgcccgcgccaagctcagcgccagcattcgggccatcgtcaccgaaggtcgtggcgattcgagcagcagcaccatgccgagcaacccggagcgtcgcggcatcgtcggtccggttcttcctccgctcagcctgatccaggtgctgccatctcgccccaccaccagcgatgctgttgagcacgtccgcctgaacgtcaccggtgatgccgcccagcaggtcaaggaaggcgacgagaaggccgaattggacttcgatggcaccctggtccgtgccgacatcatcactgtggccggccacaccaccgcgtccaagcaggttctgtccgacaacgacgccctgcagaaccagatcgacttggtgatccgctccaaggtgatgagcaagctggaggaccacatccttaacggtcaaggtggcgacgacatcgagggccttctacgcctggccacagtgatggttccgtcgatcaccaccacgcccgccgaccgcatcggcgagaccgtcaccgccatgcgcgccaacggctacaaccctaacgtcatcgtgatgaacgtgtgggattggctgaagctgggtatcaccaaggatgccgacggcaactatcagttcggcagcccgctctccccggctggtatgacgctctggaacagcccggtagtgaccagcagcaagatccctcaaggccaagtcttggtgctggataccgcctacatcaccatcctcgatcgcgaggcgcccgatgtgatggttagcaacagccacaaggactacttcacccgcaacctggtgctgatcctgggtgagctgcgtgccggcttggaagtcctcgatggccaagccatctacctggtggacctggaagacaccaccagcagctga

SEQ ID NO: 345419 - DNA, 201 bp, Pseudomonas aeruginosa
atgaccatcaccaacgaattacccaagcacgtacagcgcgcactcaacaccatcgcccacgctcgcggcctgctccatgaagtaagccagcgtgaccgcctgcgccatgagatcgacgaccttctggctagcggaatgagccacgccgacgcgctggaacacctgcgcaccaatccgccgattgttgacccaaaatactag

SEQ ID NO: 345420 - DNA, 363 bp, Pseudomonas aeruginosa
atgtatgctgaaaaaattggcaagcactttcgttctctgttcccgaatggtcaggtagtacaactggtggatccggccgagaacaccgatgggctgtacgttcggtatgccaacgcggccgcgggtaacggttatgtgaacctgtatgcctctcctacggcaccgtctggccccggcgacatcaatacccggatcatcttctgtggcaacaactctggcagggccggagagcaagcccaggtgtttctgccctatcctctgttcattccagctgggcacggtatctgggcgagcagtggtagcttccaggctggcgctgcgcctaccggtggccttggcctgtcatgggacttccttggctag

SEQ ID NO: 345421 - DNA, 1161 bp, Pseudomonas aeruginosa
atgcatatcgtgggtggcttctaccgtgagctgtgtcagctaccggagtgggacgcgaccatggggtccggtgcacgtgcagcattgagtgtcgctgcactctcaccgagcacggaattcacgacctatgctgctgctagcgaaagcatggcagttgcggaaattgagcgccatggcatcgcagccaacgtcgcgacaagaccaagtcccattgttttcgcctatttccatcctctctcatctccacatatagagccagggcgtgagaaattaatcactcaaccctcccttcaggtaacggctaatgcggttttacggttcggcttcctggagggtgatgctgtcgtcaaggcgcgccgtgcggtgtatgacccacagacgtggcgaaatccgaagccattttcagctaacggatcatcggcagatgaactcgcccttgttatgaatgagttggaaatatcgagtgctacgggcatagaaaacatcgaccaggcagccgatcacctcatccaaacccataaagctgaggtcgtggtcgtcaaacaaggcccctacggcgccaaggtatatgacgcctcagacagtagtagccacgttccagcgtaccgctcaacccgagtcttcaagatcggaactggagatgtgttcagcgcggtatttgctcactactgggcacagatgagaataccggcccgtgatgctgcagacctcgcctcccgtgctgtctcactctactgcgaaacccgcacattcaagttcgagcatgctgccctagctgctcgccagcccgtctttgcaactcgcggggccaccgcttgtattgaagcaggaatcgacgcgattgggcagcgttacgcgctggaggaagctcgcttcgcgcttagagaattaggcttgaatgtaatttgtccaaatattgagcccgcaattcctaccgggaattacgaggcaatactcgttatagacgatgctctccctccagaatctgtaggtcgcattgcagagcatgctgctcggggcacacctatcatcgttctcaaagaacgggcacaaaaggatacaccatggcccgcatatactttaacaacaccggactttacaacagctctgtatctcacagcatgggcggcaggcgaagctttgtcactaggcatgccttaa

SEQ ID NO: 345422 - DNA, 1413 bp, Pseudomonas aeruginosa
atggaatgtaatcagctgaggctcagtccacacatggcggacgtatacataatttatgccaaagagaaccgggacaccgcagtaaaggtgcacgatttgctttccaagtcttggtctgtgtggattgacgaccgcattgtgggcgacttcgctactgccatcaaagaaaacctcaagaaagcaaagtgcgtggtggcactgtattcagaattcgcaagcaagccagcggtgacagatgagctaaggtttgccaccaactacggtaaaaaaatcatcccgctgcaacttgacgatagcgaccctccctattcttttgggaacctcagtaccgtgaatttccaacattggtcaggcgagcctgaccatgaggtattcaaactacttcagatcaaaatccaagaagtagtacccgcaatgcggccggccgagagactatcctcgcttgaaagcaacacactgccgattccaagcattttcatgtcggtatcttctcacgagacccaattcaagccagcagaagcattgagcgtgctgaaggctcatggcacgaagtcgattctagtgtctgcgtacgacctgagaagatcggaggacaaggatcagatgattgaggagatcaaagctcatcgtgagcgaggaggatttgttctcatcgattcaggcaattacgaggcagatcgtaccgaggacaagacatggacggcgaccgagtttcatcaggctctgcttgagacgccgcatgattgtgcgttttgctttgacaacctggaaccaagcagtgatctggacatagcagttgaggaggtcattcaagcgttcgagcgagacagactacacacatcagctccggtgtatccgattgtgcacgtgtcgcaggatgaagaggggctcaaacgccttccatacatcgtttttgaagtggccaatcgtatccgtccaggtgtcattgccatagcggagcgagagctgggcccaggcttggcacttcgcgctcggacgatgaagcgtgtcagaactcagttacaaagtcttcctttttaccagcccatccatttgctcggcacaggcaatccttggagcatctcggtgctcgtggctgccggcgccgacacctttgacggtctcgaatggtgccggttcagcatcgaccccaccagaggccgcctccaccatttccagcatttcgatttcttccagcacttatggaatagaacccctctgcttgacatcgtcgacaccgatccgaatatcaaatatgcgggcaaggtggcactgtacaatctggagtattatgaggagtttggccaactgatgcagtctatgattgcaagcaacgatgcaacgttgtttgcaacaggcactggactgaccgcccctgagcttaagaagctattcccggagatttttcaatga

SEQ ID NO: 345423 - DNA, 699 bp, Pseudomonas aeruginosa
atgaccacctatagtgccgaagccctttgcagagcggtcgcggcagtctgcccagacatccgggagcgtatcgacaccggccccgtcttggatgaacgacacctatggtgggagttgtcgtgctgcatcctcagcagtcaggtgccctacccacttgcaatggccgccgcggacaggatcgacgcgctgggctatctgcgcataagtgagcaagatcaccttaagcttgctgatcagctgttcgcggcacttagtacccctctagatgtcgaaggcaggcgccggctctaccgttttccgagggcaaaagcgaacaacctggcagcaacatggcaggcagtatcccacgctgggggatccctcaaagccttgatcagcgaggatgtaaatggcgtgagagcctggcttgtgacgaacgcctccgggatggggcccaagcaggcgagcatgttcttgcgcaattgtggcgttacctatgacttggccatactggatcgacacgtgctcaattacatgtcggctcagggtatctgctcaggcgggcaggtatcaattgctggactgaatcaatacggaagatacgaaaaccgtcttcgtgatcatgcccaacagatggattgccctgtaggtcttctggactgggcgatatggattgtaatgcgcgtcgcaaaccgcaagcaggaggctgtatttttatga

SEQ ID NO: 345424 - DNA, 642 bp, Pseudomonas aeruginosa
atggattgtaatgcgcgtcgcaaaccgcaagcaggaggctgtatttttatgagcattgtgacccttgtttccgggggactagactctacacttgtcgccaaactagcgcttgaaaagggtctgcgaatttttcctctctttgtcgattacggtcagcgcgcacgcaatcgtgaatttgcggcctgccagttggcgatgagaaagctgggactacctgaaccggaggtagcagccttatcgggcttcggtaagctgattcgatcaggtctcacagatccgagtcttcatattattgacgacgcctttacgcctggtcgcaacatgctattcctgctcaccgcagccgcgtatgcataccagaaaaatgctgacgccatttcgataggcctgctgcatgaaagcactagcctgtttcctgatcagacttctcactttcttcaacaggctgagcaaatgatctctctatgtatgggtagatctatcaaagtgctcgcgccgttatcctcattcacaaagcaggacgttgtcgctctcgccgaagccaaagggatatctcaaacctattcctgccaccttggcgaggacgagccctgcggggattgcatcgcctgcaatgaatttaagtttgggggagcagagtaa

SEQ ID NO: 345425 - DNA, 864 bp, Pseudomonas aeruginosa
atgcagaatacggacttcccagggttataccagtcggctgatactctttctgccaacgctcagaaatattttctcggtgcccttttcagtaatctcttgctgctagtgcttgcagcccttgtctccgtgatcaactaccctcactgggtcgcagcgctcatccaattcatgtttctgctgctcgcgcttgccagctccgtttttctggcttggaaaagacctgaaaagtcatggtactcagggcgagcagttgcagaatccatcaaaactatgacttggcgctatgtttctcgcgccgaacccttcgacaagagcgacgaagaatcaaggtcgctgttaatcagtaggctacgagacgtcgtgcagcaaaaccctggtgtctcaaaccagctgatcagccatgcttctgcacctcaagtcacagacactatgacacaaatgagggctcaggcctttcctcaacggcgcgatacctacattgagcaccgcattaacgaccagctggagtggtacaaacgtaaggcaaaattcaactccactgcctccaaatggttttttaccgggctgatcgtagctaacttaatcgctttggcttgcgcggcgtcaaagattgctaatcccgcgtttcagtattttcctacggatgttttcatcactgtcgctgctggcattttgacgtggatgcaggcaaagcgattcacagagctatcgacctcatatgcactcacagccaatgagattgcgcttattcgtgaggatgcatacgggctggaagaggatgtggagctatcaaagtttgtaggtgacgcggagaatgcattctctcgtgaacatactcagtgggaagcacgaaaagacagctga

SEQ ID NO: 345426 - DNA, 357 bp, Pseudomonas aeruginosa
atggcgctgaattcggaggacgaagattacattaagcgcaaatgccgagaacggattgatatagcgggcaccttcgcacttttgatcgggcaggacacgcgatctaaacacaagtatgtgcgatgggagatccaggtagccatggagaaggggtgtaagctcatcggcatcaacctagacggtagtcgtcatctcaatgctgacctctgtcctccgatcttgaagaatgttggcgcagtatttgtgccgttttcaccagcgattattcagtatgccttgactcacccaaccaacagtcagttaggtgactactattactcgcccgagatctacaaatatcttggctacaaggattaa

SEQ ID NO: 345427 - DNA, 1254 bp, Pseudomonas aeruginosa
atgaaggtatgctttgtcgtaatgggttttggcaagaaagttgaatacgagacaggtagggttctagatctcgatgctacctacgaggctatcattgagccagctgtttcgggcaacggtttgaggtgtatcagggctgatgaaatcacccagtcaggcattattgatgtcaaaatgtacgaaatgctgctcagggcggatttggtaattgccgacatttccacagggaatgtgaatgctgtttatgagttgggcgtacgtcatgcgctcagacctaactcgaccataatcatgactgaggatcagggcaaattatactttgatctaaatcacatcagtacttttcgatatcagcatttcggtgatgacatcttggcgcgggaggcgagaagggcggtcaaggatttggggacgctcatcggatctgtaatggcggctcaagctgttgacagtccggtctatacctacctgcccaagctgctttcgcctcgtatgtctgatgaggaatatgaggagttgcttggtgaggccgaggaggcgcatcagcgcttttctcggcacatgcgcgatggtgaaactttcatgcgtcaaagcaagcacgagttagctcgccaggagttttctgctgcccgcgaaatgaggcccggggaacctaacattctccagaagttggcgctaaacacctataagtccaagctgccagacgagctcaccgctctgcggtcagctttcgaaatcattgcacaactgaaccccgacgagtccaatgatccggaaaccgtaggcattgcgggggccatcaccaagcgtctgtggttacttgagggggatcgatcttcccttgatgcttcgattcaatattatcgtcgagggtttgaggtcaagcgtgactattataatgggcagaatctggcgcagtgtttcgagtttcgcgcgcaggttcagtccgcgcgttcggagaagatttttgatttcatgtgtgcccataagatccgtcagatgattctgaagtcgctacaacctgttttgagttccgagaatttcctagagaggcctgacaaacgttggatctatgcaactatggccaactgttattttgcgtgcgaacagcctgaaaaagctgagccttttgaacagatgtttcgaggcgcagcccaagcccagtgggaaatcgatacctatgaggccgggaaggatgaacttttcaagatccgggaagagcggctggcgacgcttaagtcggatgaaaagtaa

SEQ ID NO: 345428 - DNA, 1872 bp, Pseudomonas aeruginosa
atggttgatcgtttaggctctcctctatatttatttgcgagagatattgtccgggagttgaataatgaactgggcttttacactaatctcaagggtgtgtcggagtcggttagagcgaaaattaagatatcgacattgtcattttataaggataatgtttgggatttgtctgctgagtatccaggtttacgctcaagggccgttgctcttaggttcagccagattcattttgaggatggcagtgacataaccatgccgggttatgagtgttatttgagttcggttaaggagtattgttattcattgttggttgatcctccctctacatatcccaagtggtcaactatttgcgttgcaatgacaaagggggtcagaaatcttttaaggttcatgagaggggcggggatcgacagattttctggtgttatcgatcttgattttcaggcgtttcaggattgggtggctgagtccgcaaataaagctggaggattgattacggataggacgcttaagtcaagagtttatgggctctcgtggctctatgagcaatctggaaagcttactgacggattgtgtacttggccttttggagatagtcgcagtgaaacggaatgggctaaggatcgtgcgcagaaaaaactacctagaaaatatcagactacaccagagatgccggactcggttgcgaagcagttaattctatgtgcgatagatgatttatctattgctggcaaattggaggaaataagggcgaaacgtaaggaatataagtctagaagagcagcttctagaaagatgttgcccacaggtgagcataagcattctttggaggtgattaatccatttccttgggatagatatggtatttcttcttcgcatcaagtaaagacattggagtcaaggctccttgtggctggttatattttgatagcgatgttttcaggtatgcggttccatgagatggcccatctcaaggttggtcgtgctaataattggagtgtgcggccggttagcgttgatggtggggttaagtatttttatttcttgatgtcgaaaacgaataaattgcagcatgatgctactagctacctctggcaaactattccttacgtcgaacgtgttttggaggcgcttgaacaaggcttagctcatcgttataagagaggaaattcttttcttttctcgggctacctaaacactggtgaaaggatctcgctttctaccataaatggcgccttaaaaaaatatgctgaacatcattgtgtggaatttgatggggaggtgtggccggttgcgacacatcagtttagaaagaagttctcgcgacttatgattaggagtggtcttggtttggttgcgcttcaagatcaattgaagcactttgatattgagatgacgaagaattacggtgacttaaatctctactctgagttgcagcaggagaaattcaccctatctagagagaagtacgacgaaattatcctggctcaggtccctattattggtggtggtgctgatgaagttgagggttataggaaggcttttatgggtatgcctgccgatgatagagagcggctcttggatagtctatccaagaaagcgcttattgagcagatggatgatggcttgtgtatgtttagatccaagaaggcgctttgtgggggggatagtgcaaactgtcgtccggcggattgtaataattctattattcccgctgaaggtatgaggcgaaccttgacctggcgtaagagcgagaatcaaagaatgagagacttcttttctggtcagccgttaaaggtggcccatttagatgacaggatctctgaaattgataaattgctcagtcaaatggacggcttaaattatgaataa

SEQ ID NO: 345429 - DNA, 2061 bp, Pseudomonas aeruginosa
atggatgaaaacaggtctagctctcttcattttcttactgtggctgaggaacgtgctgaaacagagcttaaattcactgcggaatgtaagaacacggcgaaaatatatgcatatgacttaagtggcaagccatactctgattcatttcgggatgtgctcggagtagtggtgtgggctatttacaggcgaagaaatatgatggggcatttaagtcggttggcgattatcgagatacttccaaggttctttaaatttcttgaaagtgttctgatttatagagcggagcagctctcaggggatacgctgcgatactttgcggaatggctaaaaaaggataaaagtttaagctattcaactgcggcctctatgtatcgaaaaatttcacccgtatttttgcaaatgagtagccattataaggttagcgatagttttattcccgttcgtaatgcgtttcccaagtcaaactcgcttgtctcgtcctgtattggatacgatcaggaagagttgaaaggtattctcaatgcggctgtgcgtgggatgcgtgaaagcgcgtctaagtttgagaagacgtatcagcctaaatggataggaatagctccgccattagaagatgtggctcctattggtccgtctggcagtaggtcatattgggccagtgaagaatatagaatctggtggtgggagaataattgtggatgtatgaggcttaatagcaatgcactttacaagctgccaaaagggcaggctttttttcagtctacggcgctggatggtaaaaatggcagtgtcaagtatttgagcgaattttatgaccgcataggtgctggccctgattataaaccaaagtatttggggttgccctgtcctatcaattaccgtacgccatggaaaaagaaagattatcttgtctggtactgggaaaacaaattaggttgcagagctctatctggcagtgaattgaagaagattgcgccagagttctggggggctttgaaagaatattttgggggaaggataaaggatttttacaaggagttgggcgtatatcgctgggttcaagcagaggacctgattccatattacttgttgctcttgattagaacacagttgaatccatctactgtccagcgcctgacaatagactgcctggttcctgacccgttgaatgatggtcgtgtcatgattaactggaaaaagtatcggtcttttaagaaaggaatgaccattcctactgataaaggcaacgatggctggcctgcgatgataattaaacgggtgagtgctattaccgagtctattagggaagacggccaagatgagttgtggattgcaaacaccaatcgtttcaaggttagccagcctctaggtagctctgcatttaaaagggctcttcaagctttttcacgaaaacatgcattaacaagcagtgatggtaagcctttatctattcaggcgcgactgattcgtccagcaatggcttggagtgaatacttaaggactgaagatatgaactatcttcaggcgttattaggacatgccaggctttcaacaactgctgattatttgaggcggttagatgatccaatctttctgacccgacgagcagttcatcaggatgcagtttttgttcgactttcctctgctgaagatggctctttgattagcgagtctctggaagcaagtgagagtactcaaggaatgcacgaggctcttttaaatcactgcagggatccgttgaaatctcctgtttctgggcagaaaactgggtccttatgtagtgctagtagcgaggtgtgtttgggatgtcagaatttaataataacctttcttgatataaagaagtacttctgcttcattgccttccatgattatcttttgcaggttggagatataaccgatttggagcacaggaaggctacttctgagaagcgattcatttgggagaattatatacttgtaaaatatgactcaggcgttattgagagaataaggtctgaggctctgacttttccaatcccggagtgggatatttccctgtatgaggagagaaagcatggttga

SEQ ID NO: 345430 - DNA, 1122 bp, Pseudomonas aeruginosa
atggttctgattgtcaatgttgactttcgcagtagtcacgattcgaggctctcacagctctcacataaaattccgcagtttttcaataattcagctgaaccatatagcgaggcaaacgcctacatgcggtttttgtcccgccgattaatgccgaaaagtatgaaaactatcgcggaacatattaaagagtttttggtttggtcggaaaactccggaattgaacttatagatgttacggatgatgtctttgacagctacgtagatgcgctctgtggttatcgaaaggcatctggagtgccgcttagctggaatactgtaaatgcaagagcgacaggtgcttatcgctatcttgtatggtgttatgagaaaaagttatgccccgatttgaatccaattgaggtcgctagctcatacggcgggttgcggaaaaaatataacaccaaaggacatcactcaagaaaaataaaagatcatacaaaatttcttatcttggaaactgccgttaagttcattgataccctttccgaggtttcggggttcgcaaattcagaagtaaggctaaggaataagttgattggagcgtttatgcttcagtcgggacttaggatatctgaagtagtagggtttcctttaaaagatctgcccgaggttaatctaagaggacactcgaccccagcgagggttatcggcaagggtgggaaagcaagactggttttgatacccaataagctgcttgttaagttttggcagtacgtagattttgacaggcaaagagttgtagaaaaaatagaatcgatcgctggaaatgatgttgtagatgatgtgctcttcttaagtgaaaaaggtcgaaggttgacagctaactggatagaaaagttgtttaccagggcaagtgagaggattggggttaagaccgtacctcatgtgttaagacatacatacggtacttaccattaccttttgaataaagatctggcggggctggccaatttaatggggcactccaatgagaacacgactcggaatttctatgtcgatacggctttactgatttcctacgctgggacatatagagctctacaggatgagattgatagattgataggggctgctaatggatga

SEQ ID NO: 345431 - DNA, 1182 bp, Pseudomonas aeruginosa
atgttcgtattgcgtaccggcctccagggcaatagcaaaacacttaatacgatcaaggaagtggatacgaaggcggcaaaggagggaagggtcgtctattaccacaatatccgggagttcaagccggatcatccggcgatcaaggcgcagtggattgagtttgaccatccgcaggaatggttcaagttgccgcagaacagcattatcgtgatcgatgaagcgcagacgttctttcgaactcggccgcaggggtcgaaagtgccggagtatgccagcgccctggagacgatgcgccattcagggcatgaggtgcatgcgattacgcagagtccaacgctgatcgatcaccatatgcgtgacctgtgcaactgtcatatccattattttcgaggcggcggcgggccagttgtaaagcgtttcgagttccagaaagtccagatggatgtgaataagaagtacgtgtttcccgatggcgaaacgacgcggatcaccatcgataagacgtatttcggctgctacaagtccgtggccgatggtgctgagcaccatttcaagttcaagccgccgaaggcgctgttcgtgctgttcatcgtcgccggggtggtgggttacctcggttacggggtctatgagcgtcgtatcgcggcgcatgaagcgtctatcgagccgcccgcaggggctgaggcggtcatgccgcaatcggctccgcaggccgttcccgcggctgatgtagcgccggtgctgaccgctcaggagtatcttgagctgcgcacgcctcgggtgcctgacgtgccaagctccgcgccgatctacgacgagttgacgaagccggtgacgtatcccaagccgttctgcctgtcgtccagggacgaagagcttgtgcggcgcaatgcgctgaaaatggagctgggttatcgttcagggcgcttgtacggttgccgctgcaacagccagcaaggcacgcggatgctgatcagttttgatgcgtgcatgaactacgtggagaacggtgcgttcgatccggcgattcctgatcgcgttgtaggcgcaggcgggttcgggccaggcgagggacgagccggtacgatcccgcaggcgccgaccgctcgaccggttgagtcggtcagccaggctcgtgtcactgtggtgcctgatacgagccgcttacctcgcacgctctga

SEQ ID NO: 345432 - DNA, 312 bp, Pseudomonas aeruginosa
atgccaatgtttgttgcgctgttttcgttcttgagttcgattgctggtccactagtggccaaagtgctgatatcgctgggtattggcgcggtcacgtatacgggtattagtctgatgattagtcaggtcaagacgtatgcggtttccatgtttggaagcgtcggtgcggactatgcggcgatcctggggcttgccaaagttgatgtggctttgaatatcgtctttgcggcggttgttgcgcgcgctgtgatttctggcatggataaggcgagcggtagtattaccaagctcggtagcgtcaagggtaattaa

SEQ ID NO: 345433 - DNA, 1341 bp, Pseudomonas aeruginosa
atgaagcttgcaccggcatttattcttttgacactgtttccgttttctgcgatggctcagaattattattggattctgaacgggccgacggctccggggtcgttctcaagtcctgatgcggcctgtcaagcgggattggaaatttataaaaaacaatatccggctgttacgtttgaaatcaaagaccgttttccagtttcggctgagggtttccgttgtaatgtttggcgttattacaatgggaatcgcattgatcctgattggactatctctgttcagcgcaagggtgatagttgcccttcgggttttatctttaacagtcaaacggggcgttgtgatgaaccgccaccgcctgacccttgccgcgataaagcaggacagcccgcatcattcactctgatgcgtcccgatctcggcggtcttggctcggttgaaaacgtctgtatgaatggttgtcaggtggctatcggttcggccacttgcggcccgctgaattctgacccgacaaagggtttctgctctggtactggtacgtatacggggtctcaatgttcgtcgaccgatgagatgggcggcggcaataacccggacccggacccgaacccggacccgccggatcagcccgatccgccggacaagcctgatgagaatgggtgcatccctccggcccagtggtcgggaacgacctgtgtcatgccgcctaaagagcctggggacggggatggcggcgatggcggcagtgatggcggtagcggtggtggaaacaacaatggtggcggtgacggctccggtggtggtgatggtaccggtggcggtgatgggtcgggtaatggcgatggctccggcaatggtgacggctcgggtgatggtggcggcactggtggtggtgataagccgggcgaggaggaggggaagtgcgacccggccaaggaccccagttgtaagccgtcgagcgtgacgggtgagagttgcgatgcggacctctcttgcgagggcgacgcgattcagtgcgcgattctcaggcagcagaagaaacaaacttgtgcgtgggattacgacaaggctaaggccactattcaggctgaaatcttgaaagatgaatacaagctcaagagttcatcgatcgatacgggcaagttgttcagtgacggtacaagtgccagtcgctggcttccggctacgtgtccagcgccgaaagtaatttctctgcgtcttgcgcccagccagacgtttagttgggagccggagtgtcaaatggcaacttcgttagcgccgattattgtcgggctggcttcggtgtttttcgcggtttatgtcggtcgatccctaggagggtcttga

SEQ ID NO: 345434 - DNA, 207 bp, Pseudomonas aeruginosa
atgcaaaagctgaaaaagatgttcgttcgtggcggcgtggtcctgggctcggtcggtctgctggctggccaggccatggctgaagttccggctgctgccactactgcgttgaccgaggcgcaggcagatggtgtcgccattggcggaaccgtcctgggcgtgatcatcgctattgcggcgttcaaatatatccgccgcgctctctaa

SEQ ID NO: 345435 - DNA, 459 bp, Pseudomonas aeruginosa
atgatcgacccagcagacaagcaaacccaagccatccccctggagcagccgaagcgcgggcgcggtcggccagccaccggcaaggccctgtcggacgcagagcgggcgcggcgctaccgggcgaacaagaaaaatcgtgacgcccagccgtcacgaaaagaggccccatcgatccccgccgatggcgtaaaggaaatcctcgacggctggcagcgcacccaagaggaactcgaccaggcactgcaacgaattgccgagctggaagccgaattagcgtcacgcgtcacgaaaaaagaagaagccgaggcgaagacttgggcaattcaagagcgcaagggtaaggcgcgctggcagaccatcagcaagggcctgacccggaaggccggagaacgccagttcgacaagctgctgtcgggcctgacagatccgcgctacacctaccgcatgattgaagaataa

SEQ ID NO: 345436 - DNA, 126 bp, Pseudomonas aeruginosa
atggcggtgcagtccagtgagcgtccggacttcaataccgccgcggtatcgatcccgctagtcaggctgcttcatcgtgaacagcctgtcagactgcttctgctggagtggctggggcgctgctga

SEQ ID NO: 345437 - DNA, 5124 bp, Pseudomonas aeruginosa
atgtcgccacttcctcaacccaagggcctgatattcgatcttgaggtggtgccgcccaagaacaatcaacctgcccgaatcatgatggtcggtgcccttcggcctgacttaggggcagagttggagctgaaggtctctggagacccgtccccagctttgcagcagctggatgcactgtccgacggggcgagtttcgtgctcggccacaatgtcatcgaccacgatctgcctatcttgcgcgaacattttcccggcatggctttgcatgctctgccggtcatcgacaccctgcgtctgtcgccactggcgtttccacaaaacccgtatcaccggctgatcaaggattacaagcttatccgtgacagcctcaactcgccgttgtccgactgccgctcgacgttggttctttttctggatcaacgccaggccttcacgcagttgaacgagaccaaccagacggaacttctctgctatcaggcgttgctggcgccgagtatgcggggagatctgggggctttcttcgcatccctgactgggcagtctccggtgtctgtacccgagctccgagcgcggtttccacaattgctgcaagagacggatccagcccttcagcgtgacttgaaggtatgccgagcacggcttgagcaactacttgaggaggatttacagcgggaggatctgcattggccgttggcctacgcactggcctggctccgtgtatctggcggcaactcggtactggcgccctgggtgcgacatcagtttccagaggttgggcggctaatctccgagctgcgtgatatgccgtgtgagcgcgaggattgtcagtactgtcagacgactcatgacccacgccacgagctcaagcgctacttcggcttccctgattttcgctatgagcagccagggaaaagtcttcagcacgatatcgttttggctggcatgcgtggacagcacgtactggccatcctggcgaccggcgggggcaagtcgctgtgctatcagttgccggcgctgaaccggtttcatcgtaacggcagccttaccgtcatcgtctcgccgctgcagtcgctgatgaaggatcaggtcgacgggctgctggagcgcaacgtccattgcgccgcagctctgaatggcctgctgaccatgccggagcgcgccgaggtactggagaagattcagatgggcgacgtcggcattttgcttgtgtcgcccgagcagttccgcaataaggctttccggcgagcgatccgccagcgccaggtcggtgcctggattttcgatgaggcgcactgcctgtcgaaatggggcagcgactttcggccagactatctttacgtatcccgcttcatccgggagtacaccggtgatcaaccgctggcgcagattggttgttttaccgcgacggccaagcccgatgtgctcgcagatatccagagccatttcagggaaagcctgggcattgagttcaaggtgttccccggagggcacgagcgaaccaatctgcattttgatgtgctgccctgcaccaaggcagagaagtggtcgcgtacggatggattattgcgagagcacctggacgctcaggagggcggtgcagtcgtcttcgtttccagtcgcaagagtgctgaggagctgtccgatttcctgattggtcaaggatggccttgcaagcactttcatgccggtcttgagcccaacaccaaaacggatattcaggacgacttcaaggctgggcaactgagaatcatcgtagctaccaacgccttcggaatgggcgtggacaaggctgatatccgtctcgtcgtgcatgccgacataccaggttcgctggagaactacctgcaggaggcgggcagggctgggcgtgatcagggcgatgcgcgctgtgtgctgttgtacgacccgcaggacatcgaaacccagttcggcatgagcgagcgctcgaagctcagcatccgcgacatccagcagatcctgcgcaagttgcgtaacgagagcaatcggcgtaagggcggcaagctggtcatcacggcgggtgaaatcctgctggacgatgacgttgaaaccagcttctccgcggatgagcgtgatgccgaaaccaaggtcgttacggcggttgcctggctggagcgtggtgattacctcaaacgtgaggaaaaccatacgcagattttcccggcacggctggatgtgagcgaggaagaggccgagaagcgcttgctgaaggccgagttgccgcaacgtcgattggaggagttcaaggctattctgcgctttctctacggcgccgatgttgatgaacgggtgaataccgaccagttgatgcagttgaccagtctggagtcggaagaggttgccagcgcactcaagcaattggaggagatggggctgctggtcaacgactcgcagataacgctgtatgtgcgccatggtgtgacgggggcttccagtcaacgcctttccagctccctggagctggaaagggctttgttgcaatgcctgccagagcaggcaccggacgccgagcatggcgattggcaggatttgaatctgccggcattgaccgctgaacttaagtccgcgacagggttggatgaactgctcccgctgcatgtgctgcggctgttgcgcagcctggcccaagatcatgatgccgatgatcagcagcgcagtagccttgagctcaggcaactcaatcgtgactacctcaaactgcgtatcaagggtggtcattcctgggcgaagattgttggctttggtgacgtgcggcgtgcattggctagcaagttcctggaactgttggtcggtaagctaccggcaggattgcgtggcgcggatctgctggtcgaaacgagttttggcgaattgctccaggtgatcgaaggtgacctcgaactgccgcatctgattccgccgaacaggcgccgtaaggtgattgagcatgtcctgctttatttgcatcggcaggacattttgaccctcaaccacggcatgacggtcatgcgtcgggccatgaccatcgaggtcaagaaggaagacaagcgtaagaccttcctcaaggaggactacttgcgactcgacgagcactaccgcgagaagcgcattcaggttcatgtgatgcgtgaatatgcggaagtggcgctgaaggagatggctgaggcgttgcgcctggtgctggactacttcaccgactccaagcaggcgtttatcaagcggcattttaatgggcgggaggacgtgctcaagctggcgaccagcgaggagtcatggaaatcgattatcgagtcgctgagcactactcagaaactgatagtcgccgacgatgacgacataaatcggctggtgctggctgggccgggctccggcaagacacgtgtgatcgtgcatcgcatcgcttacctgctgcgggtgcggcgagtaccagcgaccagcatcgtggcgttgaccttcaaccgccacgcggcgaacgagatccgcaagcggctgttggccttggtcggggccgatgcctacggtgtcagcgtcctgacctatcacagcatggccatgcgcttgaccggcacccgtttcgagcgaggcgcgacggtcgacgagcgagccctcaaacaagtattgagcgatgccgtcgagttgctggagggtaagcgcaatattgagggcgaggacgacctgcgcgagcagctactgcgcggctaccgttacatcttggttgatgaataccaggacatcgacaacctgcaataccgtctggtcagtgctctggctgggcggcacgcggaggaagatggtcggttgtgcatcatggcggtaggcgacgatgaccagaacatctatgcctggcgcgataccaataatcgttatatcgagcgcttctgcgaggactatgaggcctcgaccagcttcctggtcgataactatcgttcttccctgcgcatcatcgaggcggccaaccaactcattggccagaatttggctcgactgaaagaggccaatcccatccggatcgacagggctcggcaggagctgcccgctggcgggctatgggaagagcgggacgagcagcggaaaggtcaggtaatgcgactgctgatcgacccgagcgaccgtgagcagggcaacctgcaggcacaggcggccatggtggagttgggacggttactcgcgctagaacaggggagctggaacggctgtgcggttctggctcggacgcaccgctatctgtggccgatccaggcctggtgcgagcagcacgatattccttatttcctggcagcagacaaggaaacggcgttacccattactcggcagcgcagttttgtggctgcaatcgactatatgcgagaaatcaaaggtgctttgtgcgcggctgacgcatggcagcgtttgtcgggtagcaatcaactggtggaagccgagtggaagagttttttccagacggcctttgagcaaatgcgaggagaattgggcgactgccaacttggcagtggtgccttgatcgactggctgtacgactacgcccgtgaattgcgtcaacagtccaaggacggcctctatcttggtaccgtgcattcggccaaaggtctggagttccgccatgtcgttctgctggatggtggctggagcacgcaggtcgataccctggctgatgagcgacgtttgtactacgtggggatgacgcgagctgaacagaccctgacgttgtgcgaattcgctgacggcaatccattcagtcgcagcctgatgagagatgttcagcagcatgagtttcagggacaacctcttcctgggttggaggtgcgctttcagcaactcacgctgaaggagatcgatattggttttgccggtcgtcaatcaccacatgcccggatacacaaggccattgaggcgcttcgcgagggcgatccgctgacgttgaaggaagaggctggccggtatcaactgctcgacaggcaaggcaacgtggttgggcgaaccgctaagtcattccagccacagatcggcttcgatcaatgcgaagtcgcagccgtcatggtgcggtttactgaggatagtgaggagcagtatagggatttgaataagtgtgagcgctgggaggtggttgtgccgagggggagagggtag

SEQ ID NO: 345438 - DNA, 177 bp, Pseudomonas aeruginosa
atgaacaccaacgattcttgcaccaaaatcaccgcatgcttggacgtgctggcagtagcgctcgcaagtcacggccacaagtggtcggacagggagcgccaagcctacgaagaggctatcgagctggcctctacttctgccggttgtagggagactggttcgtcggcttcagactaa

SEQ ID NO: 345439 - DNA, 564 bp, Pseudomonas aeruginosa
atggagcggttacgttcctacaacttctacagcctcctggcggagctggccttccgcttcgaaaacatcgaggacgcctcggtgttctaccgcaacctctacggcgaggccggggcggagacgccggagcgctcgcaccccgcgttgctgtcccacctgatgacctacttcgacattccgctgcgcatcgatttcccggcgctgcatccgctggagaaggcctacctcaacaaccgtatccgttgcgtgcggcacaccgatgtcgcctggggccttgcgctcctgtacgcggtcgagtcggtgagctgcgtcaaccaccggcgcatctacgaactcctgcagcgcctgggcgtgcccgagcaacccagcgagttccatcgcctgcacggcacccaggacgagatcgataccgaggagatgtgggcgctgatcgccaagttcgcgccgagcgaagacttccagcgcaagttcatgcagtcgctggcgcgccacttcgaaatcaaccgggcctacttcgacctgctctgggagcagatgcaggcgaattccctggccatggcctga

SEQ ID NO: 345440 - DNA, 1974 bp, Pseudomonas aeruginosa; identical to SEQ ID NO: 330740

SEQ ID NO: 345441 - DNA, 1215 bp, Pseudomonas aeruginosa
atgatgggacagttaccgggaggacagcagcgcctgttctactcgttcaatctcgaagatcacgtcccggcccaacatctcctgcgcagcatcgaccagtgcctggatctcagtgatctgcgcgcctatctggcggatttctatagccccatcgggcgtccctcgattgacccggaattgatggtgcgcatgctggtcgtcggctactgctatggcattcgttccgagcggcgattatgcgaagaggtgcacctgaacttggcctatcgctggttctgccgactgggtttggaagacgaagtccccaatcactcgaccttctcgaagaatcgccatggccgtttccgtgacagcgatctgttccgctggttgttcaatgaggtgctacggcgctgcatggcagccggcctggtgaagggtgaaggtttcgctgtcgacgcaagcatcatcaaggcggatgccagccggcaacgtggggtggcaggagatgaggtcgattggcgcgatccaaagctcagcagccgcgccgtgcgcgagtacctcgaagcccttgatgaagaggcgctggctgaagctctccccaagaaaatttcgctcaccgatcctcagtcccgttggacagcagcgccaggcggcccggcctactttgcctactccacgaactacctgattgacactgagcatggcgtgatcatggatgtggaagctaccccggcgcaccgtaccgccgaagtcgattcgaccaggacgatggtcgagcgtgtcgaggcgcagttcgacctcacgccggaacgcctcatcggcgacaccgcctatggcactgccccgatgctggcctggatggtcgaagagaaagacatcgagccgcatgtgccggtgtgggacaagactgagcgcaaggatgacagcctttccagcaacgacttccactggaatcaggaggccaatgaataccgctgcccagccggcaaaccactgcgcagtgaatggcgtgctttcacccagcaaagatcgcgggtaaccaaggccaacaccattatctaccgctccagccaaaccgactgcgccacctgtccgctgaaagaaaagtgctgccccaacacgccgaaccggaagatcgtccgcagcatccatgaggctgcccgcgacgtggcacgacgcatcgccaagacgccggaatacctagtctctcgttgcgaagtaaccgctccataa

SEQ ID NO: 345442 - DNA, 1506 bp, Pseudomonas aeruginosa
atggcagtgttcgcacccaatgcgcaagcaacggcgagcattggtgcgccttcgaacttcatatcggcctggccccaacactggaaccagatcgagtcgcaagtgaaacgactccaggtacgtatcgccaaggcaacacgagaaggcaggtggggcaaggtgcaagccttgcaacgactgctgactcgctcgttcagcggcaaactgttggccgtgaaacgagtgacggaaaacagaggcaagagaacaccgggcgttgatggcaagatctggtcgactccggtggctaaatcgacgggagcacaagcgttacagcatcggggctatcggcctcaaccgctgagacgcatctacatacccaaaagcaatggcaagaagcgtccgctgggaattccaacgatgcgggatcgtgcgatgcaggcgctgtggaaactggcacttgagccggttgccgaaacgcgtgcagaccccaactcctatggatttcggccgcagcgatccactgccgatgcaatcgcacattgcttcaatgcactggcgaaacgtggttcggcgcattgggtactggaagctgacattcgaggctgtttcgacaatatcagtcacgattggctgctcaccaacgtgcccatggataaggtggttctgcgcaaatggcttcgagcggggtatgtcgatcagggagccttgttcgcaacggaggcaggaaccccgcaagggggaatcatctctccggtacttgcgaattggacgctggatggcctggaagatgtcgtccatgcaagcgtggcttcgacagcgcgcaagcgtaagccattcaagatacacgtcgtacgatatgccgatgacttcatcatcacaggggccacgaaagctgttttgcaacatcaggttcgtcctgcaattgaggcgttcctgaaagagcgaggcttggaactctctgatgaaaagactcagataacgcatatctcgcaaggcttcgattttctgggccagaacgtacgcaagtacgccggcaagctactcatcactccggctcgcaagagtgtgaaggcattgctggataaggtgcgggaaatcgcgaacgcaaacaagacggcgactcaagctaacttgatcttgaccctgaacccggtgatccgaggatgggccatgtatcatcgccatgttgtcgccgccaagcgtttcgcatggatcgaccatcagatttggcaagtgttatggcgctgggcagttcgccggcacgccatgaaaagtgcccattgggtaaaacaacgctactttcgtgtcgtgggtcaacggcactgggttttcgccacccaggagaaagcgcgcggcatgagtcaacccgcttggctgtatgccgccgccagtgtttcgatcgtgcggcatatcaaaatatgcagtgcagcgaacccgttcgatccggcatggacgttttaccttgagcgccgaagagcgcatcgtcaggttacccagtctcactcaggctgctggaaggcttga

SEQ ID NO: 345443 - DNA, 558 bp, Pseudomonas aeruginosa
atggatttaactgctgccgatgagaaattgctgaaggccctggcgatcgccatcgttgaccacccgcgagccacgttcaaagaaatagcccaggcagcgggagtcagcaaggcgacgctaaacaggttttgcggcacccgcgacaacctgatcgagatgcttctggatcatggttcggtggttatttatcgggtcattgccgatgccgatcttgagtcggcgcccttggacgcattgcatcgcctgatcgaaggccatttgactcacagggagttgttggttttcctctcatttcagtggcgcccggacacgtttgatttagatgcaggcggctgccgatggctgccttactcagaaacgctggacgagttctttctacgcgggcaaaaactgggcgtattccgtatcgatatcggtgccccggcgcttaccgaaatcttctcctccttgatcttcggcctggtagacgccgagcgccgcggccgtatcgcacgcgcaggtatggcggcgttgatcgagcaattcttcctgaacggcgcttgcaactaccaaacttaa

SEQ ID NO: 345444 - DNA, 1164 bp, Pseudomonas aeruginosa
atgaacaaatttcgcgagtggatcactttttccgtgatctcctgtttggtcgccgtgaccctggttggctgcgacaagcccgaagagcaaggggaggaggcgccggcgcgtgaagtcgatgtgctcagcgtgcagaccgagcccttcaccgtggttgccgagctaccaggacgcatcgagccggtgcgtgtcgccgaggtgcgcgcgcgggtggcggggatcgtgctcaagcgcacctttgaggaaggggccgacgtgaaggccggcgacgtgctgttccagatcgaccctgcgccgttcaaagcggccctgtcgcgggcgcagggtgaactggcccgcgccgaggcgcagttgttccaggcccaggcgatggttcgccgatacgagccgctggtgaagatcaacgccgtcagccagcaggatttcgacaacgccaaggccgctctgcagagtgcccaggccgacaagcgatcggcccaggccaatgtcgaaaccgcccgcctggacctgggctatgccgaggttcgcgcacccattgccggacgcatcggccgagcccaggtcaccgaaggggcgctggtaggccagggtgaggcgactctgctagcgcgtatccagcaacttgatccggtgtacgccgacttcacccagccggctgccgacgccctgcgcctgcgcgcggccatcgccgagggcaaggttgccggcgctagcgaccagccgttgtcgctgcgcgtcgatggtaccgatatcgagagcaagggcacgctgctgttcactgatatctcggtggatcgcagcaccgggcaaatcgccctgcgagggcagttcgacaaccccgagggcgtgttgctgccgggtatgtacgtgcgtgtgcgcacgccgcaggggctcaaccagaacgccatcctggtgccgcaacgtgccgtgcagcgttcggctgacggtcaggccagcgtgatgctgctggggcagggcgataccgtcgaggcgcgccaggtcaccaccggtgccatgcagggctcgcgctggcagatcagcgagggcctgcaggtcggcgacaaggtgatcaccagctcgctggcggctatccgtccgggcgccaaggtcatcccccgcgagcaagatgccgccgaagccgctccacagtcccaggcgcagtaa

SEQ ID NO: 345445 - DNA, 3135 bp, Pseudomonas aeruginosa
atgtccctgtttttcatccggcgccccaatttcgcctgggtagtcgccctgttcatctcgctgggtggcctgctggccatcccgttcctgccggtggcgcagtaccccaacgtggcgccgccgcagatcaccgtgaccgccacctatcccggcgcttcggcgcaggtgctcaccgactcggtgaccagcgtcatcgaggaagaactcaacggcgccaagaacctgctgtacttcgagtccaccagcaacgccaacggcatcgccgagatcaccgtcaccttccagccagggaccgaccccgaactggcccaggttgacgtgcagaaccgtctgaagaaggccgaggcacgtatgccgcaggccgtgctgaccctcggcatccagaccgagcaggccaccgccggcttcctgctgatctatgcgctgagctacaccgatggcgacaaggacgccaacgtcacggcgctggccgattacgccgcgcgcaacatcaacaacgaaatccgtcgcgtgaacggcgtcggcaagctgcagttcttcgcctccgaggcggccatgcgcgtgtggatcgatccgcagaagctggtcggctacggcctgtccatcgatgacgtgaacaacgcgatccgcgcgcagaacgtgcaggtgccggccggtgccttcggcagcacgccgggttccagcgagcaggagctgacggcgaccctggcggtcaagggcaccctggacaacccgcaggaattcgccgccatcgtgctgcgtgccaaccaggacggctcgcgcctgaccctgggcgacgtggcacgcatcgaggtcggcagccaggactacaacttcggctcgcgccaggacggcaagcccgccgttgccgccgccgtgcagctgtcgcccggtgccaacgcgatccagaccgccgaggcggtcaagcagcgtctgaccgagctgtcggccaacttcccggacaacgtcgagttctccgtgccgtacgacacctcgcgcttcgtcgacgtggccatcgacaaggtcatcatgaccctcatcgaggccatggtgctggtgttcctggtgatgttcctgttcctgcagaacgtgcgctacaccctgatcccgtccatcgtcgtgccggtgtgtctgcttggtaccctgaccttcatgtacctgctgggcttctcggtgaacatgatgaccatgttcggcatggtgctggccatcggcatcttggtggacgacgccatcgtggtggtggagaacgtcgagcggatcatggccgaggaaggcctggcgccggtgccggcgaccatcaaggcgatggggcaggtgtccggggcgatcatcggtatcaccctggtgctgtcggcggtgttcctgccgctggccttcatggccggctcggtgggggtgatctaccagcagttctcgctgtcgctggcggtgtcgatcctgttctcgggctttcttgcgctgaccttcaccccggcgctgtgtgccacgctgctcaaaccgatccccgagggccatcacgagaagaccggtttcttcggctggttcaaccgcaagttcaccgccctgaccggccgctacaccaaactcaacggcaagctggtgccgcgcgccgggcgggtgatgttcatctacctgggcgtggtggtgctgatgggtttcttctacctgcgcctgccggaatccttcgtgccggtggaagaccagggctacatgatcgtcgacatccagttgccgccaggcgctacccgtgagcgcacctcggccacgggtgaggagctggaagagtttctgatggcccgcgaggccgtgcagacgtcctttctggtcctcggcttcagcttctccggcatgggtgagaacgcggccattgccttcccgctgctcaaggactggtccgagcgagattcttcgcagtcgccggaagccgagtcggctgcggtcaaccagcacttcgccaacctcgatgacggcgcgatcatggcggtgccgccaccgccggtcgaaggcctgggcaactcgggtggtttcgccctgcgcctgcaggaccgcgccggccttggccgcgatgccctgttggcagcgcgcgatgaagtgctgggcaaggtcaacggcaatccgaagttcctctacgccatgatggaaggtctggccgaggcgccgcagctgcgcctggtgatcgaccgtgagcaggcccgcacgctgggtgtcagcttcgaagcgatcagcagcgcgctgtccactgcgttcggctcgtcggtgatcaacgacttcgccaacgccggccgccagcagcgcgtggtggtacaggccgaacaggccgagcgcatgacgccggaaagcgtcctgcgcctgcatgtgcccaacgacagcggcagcctggtaccgctgagtgctttcgtcaccacgagctgggaggaaggcccggtgcaggtcgcgcgttacaacggttacccgtcgatccgcattgccggtgacgccgcgcccggcgtgagcactggcgaggcgatgctcgaactggagcgcatcgctgccgagctgcccgaaggtatcggctacgagtggaccgggctttcgtatcaggagcgggtcgccagcggccaggcgacgatgctgttcgcgctggccatcaccgtggtgttcctgctgctggtggcgctctacgagagctgggcgatcccgctgacggtgatgctgatcgtgccggtcggcgcactcggcgcggtactggcggtgactgccatcggcctgcccaacgacgtgtacttcaaggtcggcctgatcaccgtgatcggcctggcggcgaagaacgccattctcatcgtcgagttcgccaaggacctgtgggaagacggctactcgctgcgcgatgccgctgtcgaagccgcgcgcctgcgtttccgcccgatcatcatgacctccatggcgttcatgctcggcgtggtgccgctggccatcgccactggcgccggcgctgcgagccagcgcgcactgggcaccggggtgctgggcgggatgctcagcgcgaccatgctcggggtgatcttcgtgccgatcttcttcgtctgggtgctgtcgctgctgcgcaccaaacctcagcaaaccgacaaccatcccctgcataaagcggagtaa

SEQ ID NO: 345446 - DNA, 1434 bp, Pseudomonas aeruginosa
atgacctctcacttcatgctccgtcgcgctctgctgcccctggccatcgccgccctggcggggtgttcgctggccccgacctacgagcgcccgcaggcaccggtcgcgtcgcactggcaagccgccgacgcggagggcgcccgtgcccaggcgctggactggcagaccttcatcgtcgatgccgacttgcgccgcgcggtggatacggcgctgagcaacaaccgcagcctgcgccaggcgctgctggatatcgaagctgcgcgtgcccagtaccgcatccagcgtgctgatcgcctgccttcgatcaacgccaatgccagcggcaaccgccagcgcctgcctgccgatctgtcgcagaccgggcgctcggaagtgaccagcaactatcaggtcggcctcggcctcgcggagtacgaagtcgacctgttcggccgcgtgcgcaacctctccgaggccgtgctggagacctacctggcgaccgaggaggcgacccgtgccacgcagatcagcctggttgccgaggtcatccaggcctacctgacccgcgatggtgcgctacgccgcatggccctggtcgaacaaaccctggacagccgcatggcctcgctggagctggtcagccagcgccgtgcagcgggggccgccaccgccctggattaccaggaagcggtcggccttgccgaacaggctagggccgagcgcgagagcaccgaacgccagttacgccaggcggacaacgccctggtcctgttgctcggcacgccagatgccgctcgcctgctgcccgcgacgccccgcgacgacctgatggtgctgcaggacatcgcccccggcaccagctcggaactgatcgaacggcgcccggacattctcgccagcgagcaccgcctcaaggcgcgcaatgccgatatcggtgcagctcgcgccgcgttctttccccggatcagcctgaccggttcggtgggcagctccagtgccgagttgtccggattgttcgatggcggctcgcgggcctggagctttgccccgacgctgtcgctgccgatcttcgccggtggccgcaaccgcgccaacctggacctcgccgaagtgcgccaggacgcggcggtggccgactacgaaggcaccatccagaccgccttccgcgaagtggccgatgccctggccgccaccgacaccctgcgccgcgaggaggctgcccgccaggctctggccggttccagcgaggctgcgatggccctggctaaggcgcgttacgagggcggcgtggacgactacctgcgttatcttgacgcccagcgcagcacctttagcaaccagaccacactaattcaaatcagcacggaacggcagattgcgctggttgacctgttcaggtctctgggcggtggctggggccaaactgaaccgatggccgggatcggcgctgagtga

SEQ ID NO: 345447 - DNA, 1371 bp, Pseudomonas aeruginosa
atgatgggacagctaccgggtggacagcagcgtctgttctactcgttcaatctggaagaccacgtcccagcccaacacctcctgcgcagtatcgaccagagcctggatctgagtgacctgcgcagctaccttgcggatttctatagccccatcggacgcccctcgatcgacccggagttgatggtgcggatgctggtcgttggctactgctacggcatccgttccgagcgacggctgtgcgaagaggtgcatttaaatctggcctatcgttggttctgccggctgggtctggaagacgaagtacccaatcactcaaccttctcgaagaatcgccacggtcgtttccgtgacagcggtctgttccgttggttgttcaatgaggtgctgcgccgctgcatggcggctggcctggtcaaaggcgaaggcttcgctgtggacgccagcatcatcaaggcggatgccagccggcaacgtggagtgacgggagatgaagtcgattggcgtgatcccgcgctcagcagccgcgctgtgcgcgagtatcttgaagcccttgatgaagaggcgctggctgaagctcttcccaagaaaatctcgctcaccgatccgctgtcccgttggactgctgcgccaggcggcccggccttctttgcctactccacgaattacctgatcgataccgagcatggcgtgatcatggatgtggaagcgactccggcgcatcgtactgccgaggtcgattcgaccaggacgatggttgatcgcgttgaagcgcagtttaacctcacgccagagcgcctcattggtgataccgcctatggcactgccccgatgctggcctggatggtcgaagaaaagaacatcgacccgcatgtccctgtctgggacaagaccgagcgcaaagacgacagcttctccagtaacgacttccactggaatccggaggccaatgaataccactgcccaaccggcaaaccgctacgcagtgaatggcgcgccttcacccagaaaagatcgcgggtgaccaaggccaacaccatcatctaccgctccagtcaaaccgactgcgccacatgtccgctgaaagcgaagtgctgccctaacacaccgaatcggaagatcgtccgcagcatccatgaagctgcccgcgacgtggcccgacgcatcgccaagacaccggaataccttgtctctcgatgcgaacggaagaaggtggagatgcttttcgcccacctcaaacggatcatgaaactcgaccgtttacgattgcgtggcctgacaggtgccgctgacgaattcaccttggctgcgacggtgcagaacctgcgccgcatggccaagcttttgcctcaagggccaccactcacgggatag

SEQ ID NO: 345448 - DNA, 876 bp, Pseudomonas aeruginosa
atggcacgaaaaaccacctctgttacacctccgcagccgaagctgagactgacatctcaagagatcgaccgtggccttgctcggctatctgaacgaattgcagagcttcgcgcttttgacctcaataccgtccgggatgggaatacacccgagctgaaggctttggaggttgccatcaaggatagtctgaccagatgcttcggggaggacaccagcgcctatcgtacctacgccgccgccaccgacctcacgtattacccgatgatgatcagtagcggacagcggatcgattactactcgccaattcaacgccgagtgctgagctctattgctttgcttgagcaagcacagaaaagcttgaaggaggacttggcagatctcccagaatcggagggcgtcgagaccgactcggcccatgaaaataaagctgcccactcagatcgagtatttttggttcacggccatgacgagggagctagagagtcggtggctcgattccttgagaaactcggtcttgagccagtcattctccatgaacaggcaaatcgtgggcgcaccgtaatcgagaagattgaaggacaccgagacgtaggatttgcagtggtgctgctcacgcctgacgacgaaggctgcgtaaagggcggacaattggagccacgtgccaggcaaaacgtcctgttggagcttggctattttcttggctacctaggtcgtgatcgagtctgtgcactgaatcgtggccaggttgaaattccaagcgacttcgcaggcgtggtctggacctcgatgaatgacgaaggttggaagcaagccttgagccgggagcttcaggacgctgggtacgaaattgattggaacaaggtgatgcgcagctag

SEQ ID NO: 345449 - DNA, 294 bp, Pseudomonas aeruginosa
atggaactgaatacggcgttcgggctcgcactcaagcagctacgtaagcatcgaaaactgactcaggaggacttcacggcggtcagcagtcgaacctacctgagcactctagagagagggcagaagggccccacgatccagaagcttgagcaactggcaggtgtgcttggtgttcatcccgctaccctattgattgccgcttacctcgccaaggatcctcaccgagacagtcaagagctaatcgcccgtttgagcgacgagttgcaagctcttggtctaaccgaccaatactga

SEQ ID NO: 345450 - DNA, 414 bp, Pseudomonas aeruginosa
atgttcattacctatcgccataccgaggtgcgcctggatcggccgttcgagtattcaccggctcagctgtggacggctgtcgaacaggatcttcaatcgccatggttctacgtgcaaatcgccagactggacgggggcgaggtggccgccagcacactactgctccagcacatccatgacttggagagcgttataagaagccagtcaaaacgcgcatgggtcgagcaagtacagatcgtaacgcctgcacacctcaacgggcaggcgaggtggctaatggaacccctgagagaggcgcacctcgtgcaggacaacaagggaactagaggcttggtatataaggtggaaaataacgtccgctactccctgcacccactgaatcgccccggcttttgtggaggccgtttcgtttaa

SEQ ID NO: 345451 - DNA, 528 bp, Pseudomonas aeruginosa
atgcccagcgccttgttgatcatcgacgtccagtccgacctgtgtagcggcgactacgcctgtttcgacatcgacaacgtactgcagagggtcaataccttgagctctgcggcgcgacaggctggcgtgccagtggtgctggtgcagcacgaagacgacgacctccagtacggcagcgacggctggcgcctggatccgcgcctgcttaccgaggccactgacctgcgagtgcgcaagactactccggatgccttcttgcgcaccgacctggccgagcgcctgcaatcacgcgctatcgaccacctggtgatctgcggcctgcagagcgactactgcgtcgacaccaccacccgtcgcgccctggccgagggttacgcggtgacgctggtaggcgatgcccattccactgtcgccaacgccgtgctcagcgccgcgcagatcaccgcgcaccacaatgccgtgctgggcagcatcagcagcttcggcaagcgtgccaggatcgtccctgccgccaacgtgcatttctga

SEQ ID NO: 345452 - DNA, 921 bp, Pseudomonas aeruginosa
atgaacttcgactggaacgacatcccgatcctcctcgccctttctcgtcatggcagcatgagcgccgccggccgagcgctgggcgtcgatccctcgaccatgagccggcgcctggtggcggcggaagccgcgctgcagacccggctgttcatccgcgacaactccggctacaaggccacagatgccggcgaggcgttcctcggccatgccgagcgtattctcggcgacgtgcagagcatgttgctggagacccgcgacgaagccagcgccatcagcggctgcgtacgcatcacggcggtggacttcctcttcagccactggctggtgcagcacatgccccacctggcgcggacctacccggccctgcagctgcaactgatcccggcgaaccgttcgctgtccttcacccgtcgcgaggccgacttcgccctgcgcctggcgcgccccgcagaggatgccgcgctggtgatgcgcaaggtcgccgacattggcttcgccgtgtatgcagccacctccttctcccgcgtgccggtggagctgtggccacaacaggcctggctgggttatggcgaggagctggacgataccccggaaatggcctgggtgcgccgcttcgcccccaacgccggcttcgccctgcgcgccagcagcgtgacgacgctgatccacgcctgccagagcggcctgggcatggctctgctgccgtgcattctcggcgatcgcgagggtctggtacgcctttccgggccggtggtggtgagggaaatctggctgctcagccaccgcgatgccgggcgcattggccgcttccaggcagtcagcgactggctgcgcgaggtgttcgaccaggacgctacgcagctcagcggagagcatctggacgcacgggtgctggggccggtggaaatcagccgcggctga

SEQ ID NO: 345453 - DNA, 666 bp, Pseudomonas aeruginosa
atgaaggacattatcctggcgtcggtgctgacctgcccgcactgtggctttgccaagcaggaaagcatgcctacggaggcctgcctgttttactacgagtgcagttcctgcgggacgctgctacgaccaacgccgggagattgttgcgtgttttgttctttcggctcggtgaagtgcccgcccatacaggccgggagctgctgcgccagtgacgtattgcaggtggccactgcgcagaatcagccggaggcggaccgccgtcagtcatgcgggcccaatgcccacgacactgccagcaagcgctctaccttgatcctgttgtggtttattcctgcgatagtcgccagcgctgccctgcttgccgcagacgcctacatggggttgctgcttgtggccgctttggcattcgcggtcatgggggcggcctgtgcggtaaatgcggcgcgttgcggacggctacattgtttcgtcacgggtccgtacttcctgctgttggcgctagctgcggttggcatttacctgtatccgggctggggaggcgggtcggcacagatatggctgctgactactttcgcactgttgtcgccattgctggtctggctgccggagcgcctggcccggcgtacctacttctgcactggagatgcttctggtcgacaagcgtag

SEQ ID NO: 345454 - DNA, 711 bp, Pseudomonas aeruginosa
atgtccaccgcgtggcgctgcacggtcaaatcaaccagttattcaggagcaggtgctgtttcattccgactaggacagccaatacgtcagtcgtctgtttcggcagcggctatggcgatatcggatggagcagagtatgggccgttggggcaactgccaggacaatccaccgatagcgcgtctattccggagcctgaagccggagtggattccatcaatcgggtacatgacgactcaggaggctcagcgggacatcagtcgctacctgatgcatcgctacaactgggtcaggtcgcatcagtgcaacgacggactaccgtctgcggtggccgaagaaaaactcaatccactgttcgggatgggttaaccactacatttgctttatcgggaaactcggataacgggatcagcgtatttcgccagaatcgggaagccctctttagggtttccctaaagagtcggatgtatagattttataacactccttgtggtgggcattctccacctctcagcctgggacagaccaagcagcccttttccagactacgcttgtcgaccagaagcatctccagtgcagaagtaggtacgccgggccaggcgctccggcagccagaccagcaatggcgacaacagtgcgaaagtagtcagcagccatatctgtgccgacccgcctccccagcccggatacaggtaaatgccaaccgcagctag

SEQ ID NO: 345455 - DNA, 1476 bp, Pseudomonas aeruginosa
atgaacccatacctgcggtcttcgttgagcgcgctgatcctgctgggcggctgtgccgcggtggggcccgactatgcgccgccgagcgcgtccgcaccggccagcttcggcgcgatgccggcgggtatcgatggcggtggcgtggaggtcgagtggtggcgcgggttcgacgagccagccctggagtctctgatccagcgggcgctcgcggcgaacctcgacatcgcccttgccggcgcgcgcctggacgaagcgaaggcgctgctgcgcgagagccgcgaagagttcctgccgcgcggcgggccggcgttcgattaccaggcccggcggcgcggcgaggtggaaacaccggccggccagcagcgcgacatcgagacctatcgcggcgcgctggaggcttcctgggaaatcgacctgttcggccgggtgcggcgctcggtggaggccgccgaggcgcaggcgggttcgcgcgaggccctgctgcgcaacgtgcaggcgagcgtcgcggctacggttgccatgacctggttccagctacagggcatcgaggccgaacttgcggtggtccatgacatcgccggcaaccagcgcgacagcctggagatggtcgagcgcctggtcagcgccggctccgcccacgagttcgaccggttacgcgccgaagcgttattgcacaacgtcgaggcggccgtgcccgacctcgaacggcgccgcgccgccacccgcaatgcgctggccgttctcctcgcggaagccccgcaggccttcagcccgccggtcgcccgcgcctccggggaaaggctgacgctccgcaccctcggggtcggtgacccggcggggctgctggcgcgccgcgccgacatcgccgcggccgaacgcaacctggcggccgcgaccgcacgtatcggcgtcgagaccgcggggctgtatccgcaggtcgaggtacgcggttcgatcggcctggtcgccggcaatctcgatgctttggacgagagtggtacgtccttcaacgtcctgaacccggtgattcgctgggcgttactcgaccgcggtcgcgtgcgggcgcggatcgccgccagcgaagcccgtgcgcaggaggcattgatcctctacgaccggacggtactgcgcgccctgcaggagaccgatgatgccttcaacggctatggcgctgccgctgacaggctccgcctgcgcctgctcgaggcgacggccaatcgcgaggcggcgcgcctggcccgggagcgcttcgtccagggggacggcgagtacctggacgtgctcgaggcggaacgctcggactacctcagccggcgcgcattgagcatcgcgcgcaccgagcagcgccttgccgtcgtgggtatctacaaggcgctggggggtggctgggaggcctgcgcgggggcgcggcgctgtggcgtggctaccgacgatacctctccaggcgtggcacggcagcgcgacagtcgctcctga

SEQ ID NO: 345456 - DNA, 816 bp, Pseudomonas aeruginosa
atgaagaacagtcaccagcgcgcattgcggggtgaggtgggcggatggtcggacggtgcgacccgccgcaacacccgcttcctgtactccatcctcgaagaccgcctcgacggcattggcctggcggttaccctgaccctgcgcgactgcccgcccagtgcggatgcctggcagcgtcttcgcaacgcctggatcgccaggatgaagcgtatgggcatgctccgcctgcactgggtcactgagtggcaacgccgcggggtcccgcacttgcactgcgccatctggtttcccgacgcgctccgcgagcaatacggtgatcaggtcctgggcgtcctgcgcgcccgcatcgtctgggcctggctggagatcgccgctgcctacggggtgggggagaggggccagcacgtgcacccgattgacggaccaattggttggttccagtacctgtcgaagcacgccgcccgtggggtgaagcactaccagcgctcggccgagggcatccccgaagcctggcggaagaagaccgggcgcatgtggggtcactggggtgactggcccgttcgggagggtatccgcgtccacctggagaccagcgatggggggttctacgcctgtcgccggatggtccgtgcctggcgcctggccgatgcccgcgcctctggcgatcgccaccggattcgcgcggcccgccgcatgttcacctgccacgatgaaccgcagtcccgcaccaggggctggtcggagtggatccccgaagacacgttctgcgcgttcctggccaacctggcgacgcgagggtacagcgtgacctgctga

SEQ ID NO: 345457 - DNA, 282 bp, Pseudomonas aeruginosa
atggctaagccgtatcctatcgtcccgctgtcctggctggacggtctcaacgacctcaatgaccaattggtggcctacgaactggctgtccgggcgctgttccggatgttcgccgaggacggatcgccctacgagctggagacggtgctgtcgggtctgcatgacctggtgcagccggtgatcgagggctatcggtcgatagccgatcagtgccgcaccgctgaatcgctgggcatggtgggcgtggcccaactggccgacgacgcggagtcctctgcgtaa

SEQ ID NO: 345458 - DNA, 258 bp, Pseudomonas aeruginosa
atgaccaggcagttgaccactctcacgctgtgcctgctgctcgtcagctgcacgacccacaaggctgagccggccaggcccgccttcgacagcagccgcaatccagacctgctctcaccggacctgtacccgaatggcgtacaaccggagaaggagcccgtcgtgcgctacgggcgctacaccctggtcagcacccagccggacgctggccagcgcgacctgatggcacagattatcgacgtgaccatcccgtcgtaa

SEQ ID NO: 345459 - DNA, 141 bp, Pseudomonas aeruginosa
atgcagtacgtgatgagccgctcgggttactcgctgtgcccggcagaggccggtcatgtgaacatcctctacacccggccgctgccggcggctcagtacaagctcggccccatgaccctgcgcaacgtaaccgctccataa

SEQ ID NO: 345460 - DNA, 984 bp, Pseudomonas aeruginosa
atggcattggtgggtaaacgcgatggccgcaatttcggctacggcgggcaattgagctatgcagggccgcaggcgctgaaagatatgttcggcggcggccactacggcacggtcaaggcgcacagtgatcggtggcaggcattcgtcaaatggtgccgctcagaacaggggcccggtatcaatgatgcgcggcagattgatcgcaaagtgttggccgactatgcggcgtatctgcgtgacgtggttaagcgcggtggcctcgccgtcagcaccgcacaaaatcggctatccagcgttaacaggaccatggcggcgcttcgcggtgatcaatacgtgaagttgccaagcccgagcaaggccttgggtctgcagcgcagcggtgttcggcattcgatgccgcaaggccaagaccgcgatcaaatcacgcaggtcgtcgatgcgctttgtagccgtgatcagttgcgacccgcagcgatcattctcttggcgcgcgccaccggcatgcgcttgcgtgaggccatcctagctgacctgccacggctatgccgagaggccaaagacctcggcaagatcaacattcaggacggcaccaaaggcggtcgcgccggcgcttcggcgccacgctggattacagtggatcagcatattcgcgatgcacttggatttgcggagcgggcttcgccagtaggtagccgaagcctgatcgtcccaaacgaaagctacgtggatgttctgcagcaagtagttcgcccggcgcgggacgtcctgcacacacatgacctcaaaggctttcatgaactgcgagctgcttacgcatgtgagcgctatgagcagatcacccagcaccgagcacctatcaatggcggtcgctgcaacgagatagacagaagccttgatcgtgatgcccgaacgcaaatcggctatgagctgggacacggtcggatcgatgtagtcgctgcctatatcggtggccggcatgagtaa

SEQ ID NO: 345461 - DNA, 1365 bp, Pseudomonas aeruginosa
atgagtgccgcccgtagcttcaagaagtattttgcccgcaaacaactacttggcatctacacggataagatcaagaaatccggtgctattgggcttgatcgcactcgcccgtccaagctcgattccaggctgactgatgagcttgaactgatcgtccaaaaggttaagcaggggaagtatcgattcactgcctacaaggaaaagctgattctaaagggagcgacttcgcttccccgacagatctcaattccgaccgcgcgggatcgaatcgtgttgcgcgccttgtgtgaatgcctcgcagaagtctacccgacggccaagctgtcattgccccaggttgttattgaagatctgaaaactgcgctcgcatccggtgcttatgtcgagtatgccaaaatcgacctgaagagcttctacccctcgatcccgcataccctgattgatgccgctatccgaaagaagattcgcaagcctgagctcaagcacctgataacgtcggcaatcaccacgccgactgtgtctgaatcaagaggcagaaaggacacgcccaacttgaccatcggtgtgccccaggggctggccatttcaaacctgctcgctgagatcgcactgcaggagatcgacctggcgttcagtggcaggccagggatatggtacaagcgctacgtggacgacatcctgctcctgacgccagccgggcattccgagacagtggccaaagagctgatcactgaactgcaaagaatggagctgcacccgcacgatttcggcccggactcgaagtcgaagtacgcccccctgaccgacccgttcagtttcttgggttaccagatcgaaggtggccatgtcatcatccgacgagaaagcatcctccgtttcgaatcgtccattgccaatatcttcaccgcataccggcacaaggtcgcaaccgctaggtcgcctaaggatatggagcgcgcccgcgcgtattgcgaatggaaagtgaatctgcggatcaccggatgcttcttcgaaggaaaacgacgaggctgggcatcctacttttcccagatcacatcgaccgcccagttacggtcggtcaatcacacgatacgcaatttgaccaaacgctcctcgctggaaggaagaatcaagctcaagtcgctgatcaagaccttctacgagctcaagcgtggaagagccggtaatcacgcctacattccaaacttggatgatcacagcatcgcggataaacggaaggtgttagcgctgtggattggtgatgacgttgccacgcttcgcgatgaccaggtggaacggctctttgcgatcaaggtgagcaaggccgtgagggagcttgaagaggatattgcccagcgatcatga

SEQ ID NO: 345462 - DNA, 543 bp, Pseudomonas aeruginosa
gtgaaggacagtgtctggttcacctacaaagctcgtatgcaggcccataatcgcctggagtggctggactttcattcacagatgcttctgatctggtacgcaattctcagcaccgttctgggtgtcttggccatccgctatgagcacatcctcggccctgacaccgacgtactggccaccgtactttctgttgcgctcctgggcgtctcgcttgccgttacaaaccgggatttccgggtacgggccatggccatgcgcaaaaactacctgcagttgcaggggctgtaccgtgagcttgccccgaacaccgaccctactctcactcagacgcagcagtatgatgagttgctcgctgagtcagagaatcacagagggatcgatgaccgaatcgcccgggtattttcgacgggcttgaccagtcgaacccctactgcgttcgagagctgctacgccatttcctggctcggtgcgcgcctggttatcaccgtcgccctgtacgcccttccccttgcagcagccgcatatacctgggtagggaaatga

SEQ ID NO: 345463 - DNA, 1005 bp, Pseudomonas aeruginosa
atgaataagatattgtgggtcaaatttgggtggtcagaatattatcgaggtggcgacatcgccggtaactttgcctggctgaatcaaaacaaggggacggagaacgaaggacgaggtcatgaagcctacaactttatgccagatgtcaatgggacttactactgctatgtacctccacaaggaggtaactacgcaccttatcacgacgacccagaaggatggacagttgtgtgcctggccaaaaatccggcaactccaggcatacacgtggttggttggtacgaaaacgcaacacttcatggtgagtggatagtccgccccaataacaccgatccgcgacagcaaattttccctcatcctgcttacgactggtcatattgcataaccagcaattccgcttacttcatcccgcccgaggagcgaattctgccgttctcggatccatccgtgaaacaggggaaatactcgtttctcgacggcccagacgttaccaagaccgagaataaggcaagggttcaagctcgacttgagagcttaatgaatcgcctggcctcagtcgcaattcacaaccccaatgaacacagcgtttttgacccacaactggatcaggtcgatccactccggggatttggtacccctgagcatcgtaaagccgtggagttggccgcggaaaaagcagtgatcgaatattatatagaacaaggctatagctcccagcgcacaacacacctgccctgcggatacgactttatattcaagcgcggagagtcagcgctgcatctcgaagtcaagggtacagccggcacgacaccacgttttttccttacgcgtaacgaacacaatgcaggattgatgcttaacccagactggaggttagccatggtgacgtcggcgctatctgactccccgcaagtcacagtgtacaatgctcgtcagctaaaagaggcatttaacctcgacccttacgtttacattggagaattcgtaccaaaacccgaatcttaa

SEQ ID NO: 345464 - DNA, 1095 bp, Pseudomonas aeruginosa
atgtccaaggtcattgcccaacttgccagcaccgtccccagcgacgacctgctcgcccagatagatatcgctgaggtttacgagaagttccacagcacgttcaagcgcctcgacgatttcaagcgggtccgcgacgaacacgagcagcgtagctttctcggccgactgttcaatcgcggcgaactgaagaacgcccagctcgacgcccaggaagtgcaggcggaattcgccaaaactctcgctcaattgatggtaatcagctcgttgcaggcccagcaactgactgaacagcaggggcaactggccgaccagcagaagaccttggatgccaaggccgaggagctggccaggcagaacatgcgcctcgaacagcaccaggccgtaatcaagcaccaggccgcaggcttacgccaatacgtcaccgacctgttgaaagtccaggggctgactgacgaacatggcgagatgctgatcagcatcgccaaagaagtaatggaaacccgggatcgcctgctggcggacttcgacaatcgcatgcaacaggtgcagggcgcattggacgaacagcagcggttgctccgggaagtcatcgatgagcaggcaagctccttggaacagcgcctcacgcagttgcaacatgaggtcgactcaaacctggaacaacgtctccaggctgtcgaggaaggtctgctctctacactcaacgaacagcgccgcgaagccacccgccagactgaacggctgaatgccgacctggcagtccaagcgcagcagcgagacgagaagcaacgcgacctggatcgccagctctcggaactgcgcgaagtgctggccgaacaggcccaaacgctgcttaacgaacgcaaagaacgacagcaggagcgggccgagcaccaagccgaactgcacgtcttacgcaacgaacagagcaatggcgaaatacgtcttcgccgcgagcagcgccggctcctggccggaatatgtggcttggcgttagtgtgcgcaagcgccatcgccggcctcactttctggaatacctcaaagcctgttttggccccagtcgaaatccacgaacctcaaataccagccccatga

SEQ ID NO: 345465 - DNA, 1662 bp, Pseudomonas aeruginosa
atgacctcccgaccgaccctgcaaggcgacccgctgctcaccgccaatctcgatgccctgctcagctccgtggtagatgccgaccaacgccagttgcaggtgcccgatggccctcgctccgaacgcgaggcgctgaaggacaagcgcctccaggaactgctcgaccgctgtcgcgaagaagccctgcaacaagtggtcggcccctttggattgaccccggcaatgttctcagacatcgatggtggcaacgtcaccacccaacacaatgctaatcaggatatctacgccaaagcatccgagcactataaccggaaagccgactacgactactccgccgcgaaacaacagaaaatgaaggatgcggtgaaggacggcacgatgaactcgcaaacattcatcgacacctacaccaatgaaaaggcaccgacaaagcgcaccgccaagtcaaatggcaagctggtgatgaacgccgagctggatcacaccatccccctgaagcaggcacacaaagaaggcgcttggatgcttactccggagcaacgcaaggcgttggcctcggaaaaagacaatctgcatttcaccacctttgaaaataaccgagaaaagagtgataccgccgcagagaccgcgctctctgccgaaaacggttacgacgagtccattaccaagccgctgatcgacaaggctcgcgccgccatcgatcagcatcagcccgataccaaagaccgcttgctctaccacggcaaggagctgggcatcacaggcgcgaaggagttcggcaaaaccggcctacgcagggcaatgggggtgctgttattcgaggtggtcaacggcagcttcgtcgaagtacacaaagtggtcagccagcgtgacgatcagcagcccctgctcgaccgcgtggtggcagcggttgagcgtgtgttgaagcgcgttcagagcaagtttaaggcagctttcgaagctttcttcgagggcggcctgcaaggccttgtgagcaacctgctgaccttcctaatcaacaacctcattaccacatcggccaaagttgtaaccatcatccgagaaggcatgcaagagctgttcaaggccctcaggctactgctctggccacccaaggaaatgtccggcaccgaggttatgcgggcggtcagcaagagcttggccggcctattcaccctgggtgccggcatgctcctggagcaatcggtgaacaccttcatcgtcggcatcccgatgctcgcaccgctcgccggaatgatcgccccggtgctcaccggcctgatgaccggcctcgccaacgctctgctgatgtacgccatcgactcgcttatcgattggatgatggataagggcaccgatttcatcaacgctcagatcgataccctgcaagccaccgccgaactcggcgagcgcatgatcgaacaggtagagctgcaatttcgactttcggcgcgataccggatgatggtccagctcaatcagcgcatctccgtgcgcttcgaccaggcaaccgaggccgcgcaagcctcagtgcagcacgcgcaaggcgccataggagaacaggcggagactatcgcctcgctctccctggccatcgatagcaagaaacagttcaacgaacgcttcggtttgttgcttcagcagttcaggaaggaaacataa

SEQ ID NO: 345466 - DNA, 690 bp, Pseudomonas aeruginosa
atgaaatggcttttgagattctacatcgctctgatcggagcagatttagcagccctggccttttggatgtggaaacggctacacgatgcccaggcggatttcacactagttgaaatcagccccttcttagtcgctgccggggtaattgctgcgttgcttacccttggtttcaatcaggctagaagctcgtcggacgactatctcgaaagcgcttccgagttcctctcaaaggcattcgagactttagaccgcagtaaagatagcgaaggccgccctctgaatgaccgaatggtctggctgaccgcatctcgattactagccacatcagaactcattgcagaaaaaatcatgtttgaaagccacaagctgatttggcaggagcagcaggaatattggcgcggacggatgcgcgatctggtttccccacgcggacatggtttcccctctgagtactacgccgcaagcccccgagacttcatcatggtatcgggcgatgctcgccaaccactctctgagacctcattggcagcaatttatcgatttatagaatggccaaaaaatcgagtagatcctctgagaaaataccagcccttcactgacgacgaattagaggaaatggcgattcggggcccccggggcctagccagaatattgcaggagtcacgtgcgttaagggacaagtccaactaa

SEQ ID NO: 345467 - DNA, 1209 bp, Pseudomonas aeruginosa
gtggtcaccaacaaaaactttacagaaaaaacaaataacgatagtaaagaagtcggattccattaccaatactattacttcatttatcggctacttaacttaaaatctggccaatccgttggccttgaagttaaggatgacgtgcacacagatttagataatgacactcaattgctattccaacttaaacacacggtcaagaaagcaacttcaggagacacgacggcgctaaccgagcttgacgaagacctttggaaaacccttcataactggacaaaaataatatctgacgacgcggcaaaaaggcagggaaaagcagaacagattaaattcgtcaagcggtcggaatttcacttagttacaaacaaaacagaaagcaagaaaaatatatttctattagagctagacaacttcaaatgttctaaaaagagctttggcgacctgcgaatctacattgaaggactttgcaaaaaaacaaaaaactctgatattgaaaactatataaatattgttttgagccttgacgatgaagtattatcacttttcctcagcagagtccatcttgaactagcgcttgatgatcttcatgcattaattaagcagtcaatcagagaaaaaatggtagagcaaacaagggtagatctcgttttcgagcgcctggactctaacatcagaagtgacaactacataaacatcaaaaatggtgaaaaaattgttttggactttgactcgttctactcacgctatagaagtatattttcatcctcgcgagaaccattacaactaaataaaccattcaaacccgcataccctgaagatgtttttgcacagacatttgtaaagcaactcatagcaattaatgcagtaaagaaagaagatctagagcgtgcatttgaacttactacgcaacgacttaaaatagctcgctttatagaagactggcaccaatcaggggagcttgttacagatgaaattgaagctttccacagtgatgtaaaaggaaaatggagaaattcctttgaacactggtgcgaagactgcctagatcatgaaacggtcgcaaaagcaaagtcactactccatgagcttcgcaaaatcgagttctcaattgctaacagcgcgctgaatactgaactaagcaacggtgagctataccacctctctgatgaaaatctgattggatggcaccgtgactggaagaccatatga

SEQ ID NO: 345468 - DNA, 1686 bp, Pseudomonas aeruginosa
  misc_feature (17)..(26): n is a, c, g, or t
  misc_feature (412)..(421): n is a, c, g, or t
atgacaacgtcagttgnnnnnnnnnncgtcagttggtatgggatcaagttttatataaatgataaagactactttctagctcgtcgcagcccaaacggaaacatggtttcctccgagtactttttttcgtcgatcggtgaagtacctatcacacctatagccaccatagatcaagaggacctaaggagaattctcgaggctgagttctcaatcgacgacagaattaaaatgcctttcgggggaaaggttattaaatccggatctaaagtttcattccgatatttcttcttattcaacaccatatctgacgatataatattgaatagtaaaaccttttttgataagcaggaaatagaccgatatcgtgaagcacttccaaggatatttgatcttgcgctagggattgacgatnnnnnnnnnnaagagcaacttcaaagagagatcgcaaagcacgaacgaaaaaaaacaaccttatcggacaaccagagtagcttcgcaagcgagattcgtgaaatcgcatcaaaagcagccgagttcggacttataccagaggtcgataaggatgttactgcaattagcttacgtgattcattatccaacacgaacataacaccaaactatgacgcctcaaccaaacgacgcgcagatgtaaatagcgagttattctcaataaatagacaaatacgaaaatactctcaattcaccgaagaatataaaaactacaaatcgacgatcaaaaactcgcaagacagccttaagccattaagaatcttaatggatcgttcaggagaagtcattaaatcatccatattcgacgaattaattagcagtttacaggttgacctacgaacaatcgatgaagcaatcaaggctcgaagaccagttgaaagtcaggtaaccgcagctgtaaaaaaactccaggaacgcaagcaatctctacaagaagaactacaagtccttcctgaagtaccgcgctcgttcaaagaacttcaagacatgtgggtattcctaggtgaggcgcgaggaaaactaagcatctatgctcgaattgatgataagcaagcaaacaaacaagtaccacctgatacatctaacctagctagtgagcttgactcaatccaagttaaggatgttgagtcagagcgggcagcaacaattagccttatcgatgaggtggctgccgcactcatgctggagactggtacagcgcttgaaaattatgctacatggtatgcgagcttcaactataaagaaaagaaaattcaacttaggaaaccgaaatccacgcttattgaaaacgtaggaagcagttcaaaccacatgttcctacatttaattcacttcttagcgctgcatgaagtagcactaaataaaaactcaaagttcattcctagcttcttaatcatagaccagccgagcaggccttactggggagatgatgaagaatctgatccggagaatttgcttcacagtgatagagtcaagataagaacagcattcgagatgctcgacaatttcattaacagggcgaacaaagaatataggaaagaatttcagatcatcgtctttgagcatgtaccaacgtcaatgttcgacgacatgaaaaacacccacttactacctgtatttagaggcggcactgcactcataccactttcatggaagaacaaccaatcaggcaaatga

SEQ ID NO: 345469 - DNA, 984 bp, Pseudomonas aeruginosa
atgactgcccgagtagtctaccaaccctgctcggacgatactgcacgcaagaatctacagaccactattctcaacccagtgcagctcagtgaagtcgaagacttgctagagcctgagttgcgagctgagctgcattccgcataccccgacggcaagcttttcatctggggacttgcatcacctagaacaagaaatgcctggcttaccatggagccaggtgacaccgtcatcttcaacactaaagcagtcgtcacagtcagtgcctgctttactcatcgtacgcataatcgcgatcttgccttgaagctatggggttgggcagatgcctcatctggcatcacatgggaaaacatctacttcgtaactgatgtacgccaccacgcaattcgcttcaaatccatacaagcgcatatcggcagccaacatgaccgctccttctatcgatacaacgaggagcagagcgcagcgatccttgaaggttttgcagagcttgaccacgactacggcgacaacgacgtcaccttggaggatgcccgttatgacatccaaaaccaacctactgacggagtcgcgaaccgtgccactcgattagaacataagtacatcgtacggcacttattccaaaacaaactcaccagtacctgttgcatttgccttaaggaataccctcggcatttgctggtagcggcacatatcaagaggcggtctgcttgtagctcagacgagaagctcgacatcgaaaatattgcagcccccatgtgccggcttggttgtgatccattgttcgagcatggctacatttctgtgagaaacggagaagtcgtcatgcatccttctcgcgaaatgaccgaggctacagctagctatgtcaatagcgtgctgggcaagcaagtgtcggtatggaacaaaaagaacagaaagtactttgactggcatctcaatgctcatgggtttgaacctgcagagctggcaaacataaattga

SEQ ID NO: 345470 - DNA, 990 bp, Pseudomonas aeruginosa
atgattaatgatttctctccagcctatttcacccgaaagggaggaacctacataggcgattctcgtgaactcttggccgctctgcccgacaacagcatcaacctggtcatgaccagcccccccttcgccctccagcgccagaaagaatatggcaacctcgatcagcacgagtacatcgactggttccttgagttcgccaagttggtgcacagaaagctgaaggatgacggcagcttcgttgtggacttcggcggggcgtatatgaagggtgtgccagcccgcagtctctataatttccgcgtgatgattcggatggtagatgagttggggttctttcttgcagaggatttctactggttcaatccgtcaaagctgccgagcccaatcgagtgggtgaacaagcgcaaactacgtgtgaaggactcgatcaacaccgtctggtggttcagcaaaaccgagtggcctaaatcagatatcaccaaagtcctcgctccctatagtgaccgtatgaagaagctgatagaggacccggataagttctacacccccaagacccgcccctcggggcacgacattggcaagagcttcgcaaaagataacggcggggcaattccacccaacctattgcagattccaaactccgagtccaacgggcagtacctatccggttgcaaggccgtgggcctcaaggggcacccggcgcgctttcctgcgaagctaccggaattcttcattcggatgctgaccgaccctaacgacattgtcgtggatatcttcggtggctcgaatactaccggccaggtcgcagagacggagggacgccggtggatggcattcgaggctttacccgagtatgtgggagcctccgctttccgcttccttgataagggtttgcccccggagacgatgaaggaactctatgaacgaattgtcgcaggtgaatccgtggaccttgaggagtaccaacagcaatcggccctagccatctag

SEQ ID NO: 345471 - DNA, 237 bp, Pseudomonas aeruginosa
atggaaaagaagtcaaagccctctgaggcacggcggcggttcgccgtgaacctgaggatcgcgcgggggaagctcgggctgtcgcaggaggcattggccgacgcggcgggtctgcaccggacctacgttggttcggtggagcgaggtgagcgaaacatctccatcgacaacatcgagcggctggcaatcgccctggacgtttctcccgcatcactgctggaggaaccaaaggaatga

SEQ ID NO: 345472 - DNA, 564 bp, Pseudomonas aeruginosa
atgacattgaagccgcatgaagattacgctcgcctgcaagccgcctggccgtccattgaggaataccaggggctggcgaccgagcatggtatcgacgatatctttcaggataatggcggcaagctgctgcaggtgcttctccttctcggtcttcgcattatccctggtcgagagggtaacgatgcggttgatgcggatggacgcgaatatgagcttaagtcggtcaacattgagttgaccaagagcttctcgacccaccatcacatgaatcccctcatcatcgccaagtacaggcaggtgccatgggtgtttgctatctaccgccatatcgcacttcaggctgtgtacctcttggagcctacggacctcgagttctatttccaaaaatgggaggggaagtggcatgtagacgggggcaaggacatcaacaatccaaaaattccagcgaaatacgtcatagagcacgggcgcctggtttatgggaaggagcctgacctttcgtccagacgccgcgtacagcccacgccgcccgatgctgcgggtttcgagcctgacgaggtctaa

SEQ ID NO: 345473 - DNA, 195 bp, Pseudomonas aeruginosa
atggagcgcctgttccgcagtctgaggtcggaatggattccggcgaccggctacctgacggcgcaggaagcccagcgggacatcagtcattacctgatgtatcgctacaactggatcaggccgcatcaatttaacgacgggctaccacctgcggtggccgaagaaaaactcaacccactgtccgggatgggttga

SEQ ID NO: 345474 - DNA, 2253 bp, Pseudomonas aeruginosa
atgcccttccgatacaacaccatgaatgcggttgagccggatggatcgttcgacttccgcgacgcccacgacaacaccggcaaccttgatctcgcgatgaacggggcggcgcttgcatggacggaccgtctcggccgttctaaaaagtcctgggcaggcatcgaggatcaggtaaacgcctggctcgacagccagggcttcgagccaggtttcctcgtgtacgtcgacggctccccgctgaccgtagatcgcccgacccaactgatccagcgcggggacaacatctacagcgtcaagcgcccggcatcgttccccgtcaatctgaccgggaactgggcgacggaccagaacctgctcgttgcgcaggttgaccggacgctgcaagacaccctggccaccagcgctggcgccgggatgatcggctatcgcgagcgcaccgtcgccgaccgcctgaacgatactgcgaacgtaaaggactacggcgctatcgcagacggggcttatcacccgttgtcagagcggttcgctacgctcgccgaggcgcaggcggtttatccgcacgccactgcgctgaccgacagtatcgactgggcggcgtatcaggcggcaatcaactccggggcgccgcatgtgcatgcgccaggcgggcactacgtcatgaatcgcggaactctcgctgagcgggatattcggtataccggcgatggctatgctacccgcgtggatttcagcctcgcagatggcccaggtagctgcatgctgacgcggggtgagcttgtgcaaatcggcgatctgtccgtgagcgtggttaaaggcgctcgcacgctgacatttgccgctgcaccagacctggctccgggcgacgtggttatcgtgtacaaccccaccaacggctcttggctggctgatcgcgatccgtatcgcgctggcgagatgtggaaggtccattcggtaagcggtagcactgtcacgatctacggaaacagctcgtcggtgtacctgttctccgaagtggacgtataccgcatgcgcggcgttcgcgtgtctgtcgatcagatgcatttttcgccatcggacacatattccattgcgccgttcaaggtggttttcggcgatggagttaaggtttccaactactacgctagcgatgtcacgctttacacagggctagaagtagaacgatgctttgacgtttcgatcaatgcggtttcaagcccgaacagatcgccggcagtcaatgacgaatatgggattactatctcaaactgccataacttctcggtttacggcggttatgcggcagcaaccaggcacgctgtcgcgcttggcggaatggacgacgtgtgctgcgttcctaaccgtcacggcctgatatacgggatgaacattgaggggatcgacttagcgtcggataccagcgcgggagacatgcacgggaatgccgacaaaatcacatacgacaactgcgagtttcggaatggggtaattcttcaagggcgcgacgcaactgttcgtaacagcactgtctacggagtatccagcacttccggagaagcgatctatggatcggaagtttacggtggcacctacaccatcgagaataatcgatttatcagctatggcgatggcgcagcgtttggaatcatccatatatcgccaagttccactcagcgcgaagcattgctgatcatcgcgcgaaacaatacattcgagttgccgaatgccacggggtcgacgaaagtgtttttcctgcgtggacgcaatagcccgcttccgattagcgcaaacattgacggagtacacgtccatatggcatctgtcgcgatgcaatgtttcctattcgcggacgacagcatcaagtctgaacttctttctaactaccttattattgacaatgtttacgggccattcggaacatcgttgctttacccgacaaccaagaatgcgaacattcctacgcgtcagatggagcagagtggggaagtaacagttaccactaacggaactgcaacggctctgccggcttccaacgtcagtttccgatatccatactctaagaagccaatggcggtagcctgcgcatcaggcgtcaacggggtagcattttctagccttggggggcaatctccggtgccaattgtgtacgctgttgtcgctgcttctatccggcctggactggttgctgcaacctcttcgttcacctcaggagagcaggcggtcgtggggtggcgggcggggatcaaggagatataa

SEQ ID NO: 345475 - DNA, 777 bp, Pseudomonas aeruginosa; identical to SEQ ID NO: 342029

SEQ ID NO: 345476 - DNA, 1497 bp, Pseudomonas aeruginosa
atgtccaatgacaacgaagtacctggttccatggttattgtcgcacaaggtccagacgatcaatacgcatacgaggttccccctatcgatagcgcggccgttgccgggaatatgtttggcgacttaattcaaagagacatatatctacagaaaaacatttattatccagtccgatctatttttgaacaaggaacaaaagaaaagaaggagatcaacaagaaagtatctgatcaagtcgatggcttgctaaagcagatcactcaaggaaaaagggaggccacaaggcaagagcgactcgatgtcatgtcggcagtcctgcacaagatggaatctgatcttgaaggatacaaaaagacctttaccaaaggcccattcattgactacgaaaagcagtcaagcctctccatctatgaggcctgggtcaagatctgggagaagaactcttgggaagaaagaaagaagtacccttttcagcagcttgttagagatgaactggagcgggcggttgcctactacaaacaagattcactctctgaagcggtaaaagtgctaagacaggagctcaacaagcaaaaagcactaaaggaaaaagaggacctctctcaactggagcgggactacagaacccgaaaggcgaatctcgagatgaaagtacaatccgagcttgatcaagcgggaagtgctttgcctccattggtcagtccaacgccagagcaatggcttgaacgtgccacaagactggttacgcaagcaattgctgataaaaagcagctgcagaccacaaataatactcttatcaagaattccccaacccctctagaaaagcagaaagccatctacaatggtgagctacttgtggatgagatagccagtctacaggcccgcttagttaagctgaacgccgaaacgacacgacgcaggacagaagcagaacgcaaggcggccgaggaacaagcgttgcaagatgctattaaatttactgccgacttttataaggaagtaactgagaaatttggcgcacgaacatcggagatggcgcgccaactggccgaaggcgccagggggaaaaatatcaggagttcggcggaagcaatcaagtcgtttgaaaagcacaaggatgcgttaaataaaaaacttagccttaaagataggcaagccattgccaaagcctttgattctctagacaagcagatgatggcgaagagccttgagaaatttagcaaaggctttggagttgtaggcaaagctattgacgccgccagcctgtaccaagagttcaagatatctacggaaaccggggactggaaaccattctttgtaaaaattgaaacactaactgctggtgcggccgccagttggcttgtgggtattgcatttgccacggcaacagccactcctataggcattctggggttcgcactggtaatggcagttaccggggcgatgattgacgaagaccttctagaaaaagcaaacaatcttgtaatatccatttaa

SEQ ID NO: 345477 - DNA, 1083 bp, Pseudomonas aeruginosa
atggatccgctcgacgaactggttgaaggcatcgccgagcacgccgaattcatcgcggctggtcacggcgaggcgcttggtcaggtcgccctcgccctgggcgatgtcctgcatggcacggcccatcaggtgcagcggctgcatcagcaggcggatcagcaggccgagcaggaccaggatggcgacgatggagatcagcgcggcggcgatggccgagacgcggaacttgctgagcatggcgtaggccttgtccttgtcgatggacagcgccaggtaccaggtcaccgaaggcaggcccttgatcggggtaaaggcgaggatgcgggtatgcccgtgcaattcggcctcgctgaaaccggtggcgatcttcggcgtgttctgcgggtagacctcgctcagggtcttcatcacctgctctttgtccgggtgcaccaggatcttgccgtcgccgctgaccaggaaggcgtagcccatgccgctgaagtccagcgaattgatgatctgtaccagggtcttcaggctgaggtcgccgcccaccacgccgagggtgttgccggcggccttcaccggcgtcgccgcggtgatgatcagttcctgggtggcggcgtcgacgtagggctcggtcagggtcaggccgccggccgctacggcgtccttgtaccagggccggctgcgcggatcgtagccggccggcatcgggctgtccgggcgcatggtgaagacgccgtcctgctggccgaggtaggtgaagctgaaggtcgaggtcagggccggctgttcgagcagggcgctgacggcttccgggctgtggtcgcgggccagggtctgggcggtctgctcgaccagcaacagacggccgccgagccagttctggatgttgctggaggtcacgtcacccatctcccgcaggtagctttcgaggtcctcgcggatcgcgttgcgctgcaggtaatcgttgtagagggtgaacagtgcgaaagcggcgaacaccacgagggaggccgcgaggaggatcttgtggctgaacttcagacttttgatcatgttgtattgcgtccaggagtatgtagcgccagtctttga

SEQ ID NO: 345478 - DNA, 507 bp, Pseudomonas aeruginosa
gtggacggggtgaagctccagttgccgctgccgtcggcagtgacctgcccgatgggattgccgctgccatcggtcagggtcaccgtggcgcccggttcggcggtgccgctgatctccgcgccgttgctcggattgaccaccggcgcggccggcgccaccgagtccacggtggtgctggccggagcgctggtattgccggtcgggtcgctggccgtggcgttgaccacggtgccgttgggcaacggcgtgcccggtgtgaagctccagttgccgctgccgtcggcggtgacctggccaatcgggttgccgttgccgtcggtcagggtcacggtggcgcccggctcggcggtaccgctgagcgtggtgccgttgctcgggttgagcaccggcgccgccggggcttgcgagtccacggtgacgctggcgcccgggctgctattgccggcggcgtcctgggccaccacgttgaccacggtgccgttggcgatcggcgtggacggggtgtag

SEQ ID NO: 345479 - DNA, 507 bp, Pseudomonas aeruginosa
ttgatagccgtcggcgccgaggtcgatccttggcagagtgttgcgggccgcaccacccagctcggcgccggcgccgaggccaggacctggcagagtgatgcgggccgcatcacccagttcgccgtcggcgccgaggccaggacctggcagagtgatgcgggccgcatcacccagttcgccgtcggcgccgaggccaggacctggcagagtgatgcgggccgcatcacccagttcgccgccggcgccgaggccaggacctggcagagtgatgcgggccgcatcacccagttcgccgccggcgccgaggccaggacctggcagagtgatgcgggccgcatcacccagttcgccgccggcgccgaggccaggacctggcggagtgttgcgggccgcaacacccagcttgccggcggcgccgaggccaggacctggcagagtgatgcgggccgcatcacccagttcgccgccggcgccgccccaagggaaaatcaccttgctcgacagtga

SEQ ID NO: 345480 - DNA, 297 bp, Pseudomonas aeruginosa
atggccgaagagatcaacatcgacatggagcgctaccactcaacggccggcgatccacctcggcgcgatgctgacgtaaagcggcaggaggcccaggagctggacgaactggttcagcagttcttggccggcggcgggcagatcgagaaagtcgggtacaagatgcgcgagctgccggacactttcgtcatcaaccccatgaagacgccggtatacaacggtgccctggccgagaactcgtcgctcaaagcgaaggctgccgcaccgcgcctggaggtgttccatggcactcgctag

SEQ ID NO: 345481 - DNA, 567 bp, Pseudomonas aeruginosa
atggcactcgctagggggctgctcagcaagatccacatcgctcgtcagcaactcggtctgcaggacgatgtctatcggcagaagctgcagatgatgttcggcaagggttcggcgcgggaactcaacctgcgccaggccgagcagttgctgacggagttcaagcgcctgggctggcaaccacagcccagcaagcgagcagccggcaagccgcacaattggcggcaactgccagcggaggtcgaggtgatcgaggctcaacttaccaacatggggctgccttggagctacgccgatgcgatcgccaaacgccagtttggcgtagccaaactggcctggctgaagaagcctgaacagctcaaagcagtgttggctgccctgcatgttgagcaggagaagcgagggctcttgggtaacgtggaggaactgctcaagctgctcggcgagcatgatccaaactggagggcggatctggaacacctgcccaaaggctgggagcggcgacgtccagttctcaagagcctggtcgaaacactgcgtgcagcagcgtctgctcgggggctcttgtaa

SEQ ID NO: 345482 - DNA, 678 bp, Pseudomonas aeruginosa
atgaaagccgtggtattccatgacatcggcgacatccgcctggaagacgtggcggagccgcgcctgcaggaacccaccgacgccatcgtgcggctgaccgcctcggcgatctgcggcaccgacctgcacttcgtccgtggcagcgtcggcggcatgcgtccgggaaccatcctcggccatgagggcgtgggcatcgtcgaggcgctcggcgacgaagtgcgcaacctgcaggtcggcgaccgggtggttattccctcgaccatcgcctgcggcaattgcgtgtattgccgagccggctactacgcccagtgcgacgtcgccaaccccggcggcagccaggccggcaccgcgttcttcggcggtccccgggccaacggcggcttccatgggctgcaagccgagaaagcgcggattccctatgccaacatcggcctgatccgcctgcccagcagcatcagcgacgaccaggcgatactcctgtcggacatcttccccaccggttacttcggcgccgaactggccggtatcgcccccggcaacaccgcgccgtgttcggctgcggtccggtcggccagttcgccatcgccagcgcgttgctcctcggcgccgcccgggtgttcgccatcgaccgccacccggaccgcctgcacatggcccgccagcaaggcgccgaagtga

SEQ ID NO: 345483 - DNA, 1176 bp, Pseudomonas aeruginosa
atgaaaatcaaatccgtccgtacccgcgtcttcgaatggaagggcaaggtcgtcccgccgcaggtgcacttctgcaccaatgccagcgacatcctgttcgagaagggagacgccatgggctcgttccgcttccacggctggctggtggtggagatcgagaccgacgacggcctcgtcggcatcggcaactgcgccctggcgccgcgcgtagcgaaggaaatcgtcgacctctacctggcgccgatctgcatcggcgaagacccgttcgacaacgagtacatctggcagaagatgtatcgccgcacccacgcctggggccgcaagggcatcggcatggcagccatctcggcggtggacctggcgatctgggacatcatgggcaaggcggtgaacaagccggtgttcaagctgctcggcggccgcaccaaggagaagatctggacctacgcctcgaagctctacgccaacgacaacctcgacgccttcctcgaagaggcccagggctacctgaaccagggcttcaccgcgctgaagatgcgcttcggctatggccccaaggacggcccggcgggcatgcgcaggaacatcgagcaggtccgcgcgctacgcgaactggccgggccggacatcgacatcatgctcgaatgctacatgggctggaccctggaatacgcccggcggatgctgccgaagctcgccgagttcgaaccgcgctggctggaggagccggtgatcgccgatgacatcgagggctacgtcgagctgaagaagatggggatcatgccgatctccggcggcgagcacgaattcaccggccacggcttcaaggacctgctggagcgccgcgcggtggacgtcatccagtacgacaccaaccgcgtcggcgggatcaccgccgcgcgcaagatcaacgccatggccgaggcctggtcagtgccggtgatcccgcacgccggacagttgcacaactatcacctgaccatggccagcaccgcctcgccgatggccgagttcttcccggtgttcgacgtcgaggtcggcaacgagctgttctactacgtgttcaagggcgagccgcagccggtcgacggctatatccagctggacgaccacaagcccggcctgggcctggagatatccgaagagcacctcaaggatttcatcatcatcgagtga

SEQ ID NO: 345484 - DNA, 303 bp, Pseudomonas aeruginosa
gtgatcgccgacgccaagaccaaggtctatggcgatgccgatccggcactgacctaccaggtttccgggctgaagaacggcgataccgctggcgcggtgctcaatggcggcggcctggttcgtgtatccggcgaaaacgtaggcaactatgcgattcagcagggtggcctgggtctggtcagcggtaactatgacctggcttaccagggcaacaacctgaccatcaccaaggcactgctcaatgtgatcgccgacggcaagaccaaggtctatggcgacgccgacccgagcctgacctactag

SEQ ID NO: 345485 - DNA, 1185 bp, Pseudomonas aeruginosa; identical to SEQ ID NO: 339143

SEQ ID NO: 345486 - DNA, 1188 bp, Pseudomonas aeruginosa
atggcccacccaccccagatccgcatccccgccacctacctgcgcggcggcaccagcaagggcgtgttcttccgcctggaagacctgccggaatcctgccgggtccccggcgaggcgcgcgaccggctgttcatgcgggtgatcggcagtcccgacccctatgccgcgcacatcgacgggatgggcggcgccacctccagcaccagcaagtgcgtgatcctctcgaagagcagccagccgggccatgacgtcgactacctctacggccaggtctccatcgacaagcccttcgtcgactggagcggcaactgcggcaacctctccaccggggccggcgccttcgccctgcacgccgggctggtggatccggcgcggataccggaaaacggcatctgcgaggtgcgcatctggcaggccaatatcggcaagaccatcatcgcccacgtgccggtgagcggcggccaagtccaggaaaccggcgacttcgaactggacggagtgaccttcccggcggccgagatcgtgctggagttcctcgacccgtccgacgacggcgaggacggcggcgccatgttccccaccggcaacctggtggacgacctggaggtgccgggggtcggcaccttcaaggcgaccatgatcaacgccgggattcccacggtgttcgtcaatgccgaggagatcggctaccgcggcaccgagctgcgcgaagagatcaacggcgacccgcagcaactggcgcgcttcgaacggatccgcgtcgccggcgccctgcgcatgggcctgatcaagacccccgaggaagccgcgacccgccagcacacgccgaagatcgccttcgtcgccccgccccgcgactaccgcaccgccagcggcaagctggtggcggccggcgatatcgacctgctggtccgcgcgctgtccatgggcaagctgcaccacgcgatgatgggtaccgcggcggtggccatcggcaccgccgcggccattcccggcaccctggtgaacctcgccgccggcggcggcgaacgcagcgcggtacgcttcggccatccctccggcaccctgcgagtgggcgccgaggccagccaggcgaacggcgaatggacggtgaccaaggcgatcatgagccgcagcgcgcgaatcctcatggaaggctgggtgcgcgtacccggcgaggccttctga

SEQ ID NO: 345487 - DNA, 717 bp, Pseudomonas aeruginosa
atggctggccgtcagggcatcttccatgtcagcgcgatccttgtccttgatggcctggttcgaaatgaagtagatgagtgtatacggacggccagtcgcaacaatttttgcgacgtcagagcggaccttcggcttccagtctgccttggcacttatggcgaagccccaacgctggctagccgacgccgggatgccctcataccacagcgtcgcaattgccggggcgaccggatacgtctcggtgtcgaccttgctgtcaccaccgccggtaggcccggtttgtggtatcaagttcgggcaaagctccttttcgccgagcacccgcgcgaagttttcaaacgcggtttcttccttgcgactcgtcagaaagtccaaatggaactcgaactgacgtcggtccatctcgccaacttcaacatgcaaggtatcggagtacagctcggggcgtcgcgctcgcatgaactccctgtagctcggcttcatattcttatcgttcatggaaaccttcaaagtacgcaaatatccggaccgagctcgcaggatggcctatccccaatgaaagtgtctagggtattgagttggagcccctgcagcatctcaggaatcgaacaggccagatttgcaatagtccgattccgcgttgtggctagttgtgccgatcacaaggaatccccctgtcattgccacaaccagaggctgcgtcgtcgcaatacttag

SEQ ID NO: 345488 - DNA, 861 bp, Pseudomonas aeruginosa
atgaatgacaaggcggtcatctatctcgattgcggagactttcatctggtcgagggttcccacagttttaaaatctgggtctatctcgccgcgccgggagaggctttgcgttcctacgagcgctccagcttcagtcattccgatctgactacggctgttcctaaggcctacaagcgactgtatcctgagttgccctatgatgccttcacgcatcacccccctctttcctggcagaaccgggtattcagcttcctggctgataacggcatcgctctagatatcgagcagttgctcaatcgcagtgactaccagccttaccttcgtaaatttggtatgcctgtggtcaatgccaagcgaacacccgtgccgcctccaagtcagacagattttcccgcagagccggcgcgttcacgtgttggcaagactggcgcgacaacgatgtcagcgcctcaggggcgtaagcctgcagagatgattgcgagggactccagagctattcctagagaagaggcggccacagtacggcgaagcaaccagcagcatgatccggtagtgtcgcactccgtcagttcacctgatgcggctgctcctgcaacggcacgtccgtctctggtaggtgaaggattattgacaggcttgaaaccctctgcactgaagatactgcgctacttcgtggacaaccccggtgacaaagtccgatatgcagcgaatgttttcggtgtggactcgcgtgaaatcaatcagattttgtatggcccgttgaaggacatgtgcacgcgtgatgagcagttcggctggacggtgaatgaggcggcacgtctcgcgcttgaggcgttggatgaacaggacagggctgaataa

SEQ ID NO: 345489 - DNA, 342 bp, Pseudomonas aeruginosa; identical to SEQ ID NO: 324664

SEQ ID NO: 345490 - DNA, 345 bp, Pseudomonas aeruginosa
atggctggcattgcgctccggctgcaaggcttccaccagttgctcgaacggcaggtcctggtgcgcctgggcctccagcgcgcgttggcgggcctgtgccagcagctcgtcgaagcccatccgaccgtccaggtcggccttgagcacctgggtgttgacgaagaagccgatcagccgctcggtctccacgcggttgcgattggcgatcggcacaccgacacggatatccgcctgcccgctgtagcgatacaacagcgcctggaacgaggccagcaacagcatgaaactactggcgccttcacgctgggccaaggctctcacggcctcgaccagttcccgcgatag

SEQ ID NO: 345491 - DNA, 504 bp, Pseudomonas aeruginosa
gtgaagggtgacacctacaaggacaaggtccgcaagaccgaattcaccgaagacgaagacggcaacatcaccgaggtgaggatcctcacagaccgtttcatcccgatcatccgggcatgggaaatgacaccctcctcggtcaaccagggccgcgtgctgaccatcagctcgtcggctgcgaccacggaagaggctgaagagccccaacctgagccggcccccgaaccgctgctgttcagccctggccaagtcgtaatgaccgctgccgtgagccacctggtggaaaccggtcaactcaacccagcgcctttgctgaaccgccatctggcgggagattgggggacgctggaccaggaagactggaacaccaaccagagagccctgaagttcggcgataggctgctgtcgtcctacgacatcgacgccggcggcgaatccaggctctggatcatcactgaggcagaccgcagctcaaccacgcttttgcttcctagcgattactga

SEQ ID NO: 345492 - DNA, 480 bp, Pseudomonas aeruginosa
gtgaataaccagcagattcccctgtatttcatgggcgtcgatgccttgaccgccgagcgcgataccttgctcaaacgcaagggcgatgacttcaccgagccccgcgtagcgacgatccagcaagagctgaaacagttggagaacaaccgtgaagtgcaatacctgcaggctcgaaagggcgaggagcgtttcttcgaaaacatcgacaagctgcgtggagagcaggcgcgtctacagaccttgagggcaagtgaccttaagatcgaactggtacgggtcgaccagaaagctgcaacgcctctgagaccgatcaagccacgcaaggctctggtggtggccttgggcctcctgggtgggctggcgctcggcgtgctggtggctctggttcgggcgatgttgcgtgccccacggcaacgggtacaggaagatagcctgccgccgggagtcgtcagcctcgaccggagcctttccgggacctga

SEQ ID NO: 345493 - DNA, 1530 bp, Pseudomonas aeruginosa
atggccatcgaaaagaaaaccatccgcctgctgattctggaagactcgcagaacgaagccgaacgcctggtcagtctgttccgcaatgccggccacgcgacccgcgtacatcgactgacctctcccgaggacctcgccgaaaccctccagcaaagctgggacctgctgatcgccgcgccgaccagcgagtgtctcgagcccggcgaggcgctcgccaccttgcgccgccagtcgcgcgacatcccgttcatccagctggtggccgacaacagctccgacgccatcaccgacgccttgatgctcggcgcccaggacgccctgccgcaaggcgaggacgagcgcctggtgctggtcgccaaccgcgagctggccggcctcgccgaacgccgcgcgcgccgcgccgccgaactcgccctgcgcgaggcggaaaaacgctgccagttgctgctcgacagctcggtcgacgccatcacctacgtccacgacggcatgcacatctacgccaaccgctcctacatggcgctgttcggctacgaggacgccgaggaactggaaggcctgccggtcatcgacctgatcgcctcctgcgaccagggcgccttcaaggatttcctcaagggctaccagaacgaccagcgccagaccgaactggtttgcaccggggtcaagctcgacggccaggaattcaaggcgcgcatcagcctctccgccgccacgtacgacggcgaaccctgcatccaggtggtgatccgcggcgaggtcgacaacgccgagctggaagaaaagctccgcgaagtcagcagccaggacccggtcaccggtctctacaaccgcagccacttcctcgacctgatggatgccgccgtgcagcaggcggtgaccgcccgcaagccgtcgaccctggcctatatccatctcaacggctacccctcgctccaggccgaccacgggctttccgggatcgacctgctgctcggccagttggccggactgatgcgtgaacagttcggcgaggaagccgacctggcgcgtttcggcgattcgatcttcgccgccctgttcaagggcaagactcccgagcaggcgcaagcggcgctgcaacgactgctgaagaaagtcgagaaccaccttttcgagctgaacggccgcagcgcccaggccaccctcagcatcggcgtcgccggtctcgacgagaagaccgccaaggcccaggacgtgatgaaccgtgcgcatcgctgcgccgatgacgcggcacgcaagggcgggtcgcagatcaagagtacaacccggcggaagagcttgccgccgccgcccagcgcggcgacgtcatcgcgatcctccagcaggcgctggagaccaacagcttccgcctgctgttccagccagtcatcagcctgcgcggcgacagccacgagaactacgaggtgctcctgcgcctgctcaatccgcagggccaggaagtgccgccggcggagttcctgcatgccgccaaggaagccgggctggcggagaagatcgaccgctgggtga

SEQ ID NO: 345494 - DNA, 750 bp, Pseudomonas aeruginosa; identical to SEQ ID NO: 329605

SEQ ID NO: 345495 - DNA, 705 bp, Pseudomonas aeruginosa
  misc_feature (561)..(561): n is a, c, g, or t
atgaagatcaccgagatggcgctgcgcgccagtcgacttacctactttgtagcgctcatcattttcgtcgccggcatcgcgaccttcctgaattttccttctcaggaggagccgactgtcacggtccgcgatgcgatggtcacggcgttgaacccggggctgcccgccgaacgcgttgagcaactcattgcccggccgatcgaggagcgcttgcgcgaactggcagaggtcaagcgcgtgacgagcaccgtgcgcgcaggcagcgccatgatccaggtcacgatctgggaccgctacaccgacttggcaccgatctggcagcgcgtccgggccaaggtcgccgattcgaaggatgccttaccacagagcacgatggggcctttcgtcgacgaagacttcggccgcgtcgcggttgcctcgattgcggtcactgcaccaggttactccatgagcgagatgcgcgtcgcgctcaagcagatgcgcgaccgcctgtacaccgtgcctggtattgagcgcatcactttctacggcctgcaggaagagcgcgtctatctcgaattngatcggcctaggctcgcgcgattggagctgacaccacaggggggtgatcgaccaactcgtcaaacagaacgtcgtcgcttcgggtggacaaattgttgtcggcggcatcaatgcaaccttggcggtcagtggcgaagtgcgtga

SEQ ID NO: 345496 - DNA, 456 bp, Pseudomonas aeruginosa
atgcaaattaattttgagaatctgaccattggcgtttttgccaaggcggccggggtcaatgtggagaccatccggttctaccagcgcaagggcctgctgccggagccagacaagccctatggcagcattcgccgctatggcgaggcggatgtaacacgagtgcggttcgtgaaatcgacccagcggctgggctttagcctggacgaaatcgccgagctactgcggctggaggatggcacccattgcgaggaagccagcggcctggccgagcacaagctcaaggatgtgcgcgagaagatggccgacttggcacgcatggaggccgtgctgtctgaactggtgtgcgcctgccatgcgcggaaagggaacgtttcctgcccgctgattgcgtcactgcaagacggaacgaagctcgctgcatcggcgcgggggagtcacggggcgactacgccttag

SEQ ID NO: 345497 - DNA, 1065 bp, Pseudomonas aeruginosa
atgtcgctgccggcgttgatcatccagcgcgcgaaccctcagctctacaacctgatcaccaatggcatcctgcaggcgcggatcgactacgaccgctcgaaagggacttgcagagcgatcgccgagaagatggctgacatcgctggcgagcagaccggctgggggaaaatcgccgaaggccaggccctgggtgccacactggcctctggcgggaaagacgccgtatccgccctcgaagcagtggagaagaagggcggcaacgatggcataacctgggtcggtggagacaaggccggcggctccggccagaagcccattcgcatcgtcaacgacgtgacccgggcgggctacaacctgttgaccagccgctcagtgaatgactcgtcgagcgtgccttccgccacttgcaacaacggcctggtctgcaacacctggtcctccccccaggaagccgccgcgttcgccacccgggttctgggcgaacaacagcaacagacctgtgaaggctgtcagaagacggtgacggcggcaggcgtcggcctgaccccgctgatccaagagacctacgacaagaagctccagtcgctgcaggagctgctgtcgaaaagtaagccactgaccgccgagaacctggctgcggccggcaccgatgccttgccgatcacccgcggcgtcatcgaggcgctgcgcgacgagcgtgaccaggacgtcctggcgcgccgcctggcgtccgatgtctccctgatggacgtgctcagcaaggccctgttgttgcagcgcctgatgttcgccggcgccaaggagcccaacgtcgccgccaacggcctggccacccaagccgtcgatcagcagaccagcctcctgcagcaggagatctccaatctcaagaccgaactggaactccgtcgcgagttggccagcaattcgcccatgcgggtcatcgagcgcgggcaacagcgcgcctcagggtccagtggcgtgttcgagtcggcgcccgatgccgatcgcctcgatcgcctgcaggccccctctgccgccgacggcaagacgggagggagaccgtga

SEQ ID NO: 345498 - DNA, 867 bp, Pseudomonas aeruginosa
atgaatgcgaaagcgacttcggttgtatccaccaagggtggtgtagggaaatccaccaccgccgccaacctcggtgcattttgcgccgatgctggcctgaagaccctcctcatcgacctggaccccgtccagccctccctatcttcgtactacgagctacctgaagtcgcccagggcggcatctacgacctgctcgccgccaacataactgacccagcgaggatcatctccaggacgattatccccaacctggacgtcgtgatttccaacgaccagaacaaccagctcaacaacctactgctccaggcgcccgatggccggctccggctggcaaacctcatgccgtccctgaaacagggctacgacctggtgctgatcgacacccaaggtgcgcgctccgctttactcgaaatggtcgtgctcgcatcggatctggttgtttcccccctgcagcccaacatgctcactgcccgcgagttcaaccgcggcaccatgcaaatgctcgatggactgcgtccctacgagcgcctcggcatgcggatccccaaggttcagatcgtcatcaactgcctggaccagaccaatgactcccgggcgattcacgagaatgtgcgtgccatcttcgatgagcatcaggatatttctgtactcgaaacgactgtcccggatgccgtcgtgtttcgcaatgcagcatcgcgcgggctaccagcgcaccgcctcgaaacgcggcaaccctcgaatcgcacatcagcgcccgcgctggaaatcatccgtaacctggccatcgaggtctttcccgagtggactgaccgcttcctcgcgctgacgccggaggcggtagcagcactggtcaagggagggcgctga

SEQ ID NO: 345499 - DNA, 738 bp, Pseudomonas aeruginosa
atggcgaagcctcctatcacccaagcccgcgacgtcgacgcggaacttgtgctgcaactgaacaagttcggcagcgccgccgaccttcggagccaacaggccaagttgaccggcgctgcgcgagaaatacgcaagctgactggtggcggtaccgacctgttcgggaagctgggttgctacttgagcttcgagcaaaagcagctcctacaagacgctgcgcgcttgctcgactcggtgaaccagcaggtcgagcatgcgaaggaaaagcgtgatcgcgacgagaaacaggccaagaagcggcgtgagctgcgcgggcgcctggccaagcaactggtcgactcgaactacccgcttccgggaaatacgctcgaagagcggctggaaatcctgcagatcgcgttgatctacaaccgggccaaggtgttcgatcccctgtactccacgcaccagctccactcaaaactcaaacgctggctggagcgtcccaagcagctcatcgggtggcgcagtgaagccgagtatttcgctagtcaggtggggagcctgcgatgtgacttcattagccacctgactcacgaaatcgcctacgacgatggcagagaagtcgaggagcgcctgcgcgtcatcaagcagaaggtcgctgactgcaccgcacagatcgctctgaccagcgaggagcaggaaacccttcagctctggacagacgctctgcaatcggctccggagggcctcatatga

SEQ ID NO: 345500 - DNA, 498 bp, Pseudomonas aeruginosa
gtgcaagtcggcggtctgcacccgatcaccgacctctggtacatcgagcggtcgatcgatacccccgagatcctgcgacagcacatcgctgacctggctgaagagatcgctctgcacgtcggcgcccctggcgaaatcgtcaggatccagggcggtgtgggttacacgtatcgcgagcccaatgaagaccctgagattactgattcagcgctgcacctcatgacgctgcttcaagcgctcagcggccaggtccaagtcgtcctgaactcacacgaccagcagacctgccgcgatgcactgggtgaattccagttctcagctggcctcgctcagttgctgctgggccaacccaccacaagcgatcagccatccaaccaggcaggccgtctcaatgacgaagccctggtgaaactgttccggatcattcgtcttgcccgacgcctggttgaccttgagctgccgccggccaccttcgagcaagcagctaccgaccagtga

SEQ ID NO: 345501 - DNA, 525 bp, Pseudomonas aeruginosa
gtggacgagacggtctacagccagggcgtgacgcttcaggcccggctgctgaccaacaccagcgagggccagttggccccggcgctggccgctaccgacagcctgacgctgaccgggcgccaaggtaagccatacccgccaggccagtttcgcatcaacggcagcgcgtacccggccaaggtctacggggcgctgtcggtgagctgggcgaagcgcgaccggatcggccaggccgaccagttgatcgataccacggtcggcaacatcgggcccgaagatggggcgacggtgacgctccaggtctacagcggcacgacgctaaagcgcacctatgccggcctcacatccagtaactggtcctatccggtggccgaagacgtcgctgacggcccgctccaggacgtgcgcctggtcctgcgcagcgtccgcgacggcatccaatcctggcagcaacacgacatcaccatcgaacgacacggcctgggcttccgcctcggcgaggaactaggaggcgtttccgcatga

SEQ ID NO: 345502 - DNA, 522 bp, Pseudomonas aeruginosa
atgcagtacatctcgttcatcaagggcaagggcgggaagaaggtcaccgactacttccgcgatttcatcggctgccaggagggcatcgactcaccgggcgaaacccgcgccctgctcaaggccttcagcgacttcgtggagagcgagggcatggccgaggaacaggcccgcgagaaaaccgagacgctggtcgactacgccacctcgcaggcgcgcatcggcgagccgatgaccctcgacgcgctttcggaactgatggacgagcagcaaccgcgggcgttctacgactacatccgtaacaaggactacggcctgtcgccggaaatcccggcggacaagcgcaccctcaaccagttccgccgcttcaccggccgcgccgaaggcctgtcgatcagcttcgaggcgcacctgctgggctccaggatcgagtacgacgaggagcgcgacacgctgcggatcaacagtgtccccactcagcttcgtgaccagcttaagcggcgcaaggcccaaattggagaatga

SEQ ID NO: 345503 - DNA, 525 bp, Pseudomonas aeruginosa
gtggacgagacggtctacagccagggcgtgaccctacaggccaggctgctgacgaacaccagtggcggccagctggccccggcgctggccgccactgacagcctcaccctgaccgggcgccagggtaagccgtatccgcccggtcaattccgcattaacggcagcgcgtacccaacgaaagtctacggggcgctgtcggtgagctgggcgaagcgcgaccgcatcggccaagccgaccagttgatcgataccacggtcggcaacatcggcccggaagctggggcgacggtaacgctccaggtctacagcggcacgacactgaagcgcacctacgccggcctcacatccagcagctggtcctatccgttggccgaggacatggcggatggtccgctccaggacgtgcgccttgtcctgcgcagtgtccgcgacggcatcaactcttggcagcagcacgacatcacgattgaacgccacggcctcggtttccggcttggcgatgaactaggaggggtttccgcatga

SEQ ID NO: 345504 - DNA, 276 bp, Pseudomonas aeruginosa
atgaagaaactgtttgcctccctcgccctcgccgccgttgttgcccccgtctgggccgccacccagaccgtcacgctgtccgtaccgggcatgacctgctccacctgcccgatcaccgtcaagaaggcgatttccaaggtcgaaggcgtcagcaaagttaacgtgaccttcgagacacgcgaagcggttgtcaccttcgatgatgccaagaccagcgtgcagaagctgaccaaggccaccgaagacgcaggctatccgtccagcgtcaagaagtga

SEQ ID NO: 345505 - DNA, 219 bp, Pseudomonas aeruginosa; identical to SEQ ID NO: 330011

SEQ ID NO: 345506 - DNA, 255 bp, Pseudomonas aeruginosa
atgctcatgccggaagaagtcctccttctgcaactgatcgccgacaatgtcccatgccgcgttgtccagcatcaggccgccgagtaccccttgctccgcctcgacggagtgcggcggcgtaagttccagaacactcacttcgagtcctcccggctgatctgcagaaacgtgcttccgctgccgtccggggagccgatgatctccagcgctttcacttccaccttggcggactcgatgatcaccgaacccacatga

SEQ ID NO: 345507 - DNA, 3207 bp, Pseudomonas aeruginosa
atggcgttcctatctgaagctgccgtggagcaagcgctgttggatcaactgcgcgcactcaattacagcatcgaacttgaggaggacataggcccagatgctgacgcttccaaaagcaagcgaccggagcgcgaaagccacgatgaggtcgtgctcaaaaatcggtttgaagacgccgtagcgcgtcttaatcctggcctaccattggaggcacgccaggacgcgattcggaaggtgacgcagtccgagctaccctcattgcttgaggagaactaccgtctccacaagctgatgacggaaggtgtggatgtcgaatactacgcccatgatggcacgctaaccgctggcaaggtcgcgctcatcgatttcgaacgtccggaactgaacgactggctggcagtaagccagttcgttgtgatcagcggccagaacaaacggcgacccgatgtggtggtgtttgttaacggcttgccgcttattgtgatcgaactgaaagcgccgggcagcgcgggggcgcatctgctgggcgctttcaaccagctccagacctacaagcagcagatcccagcgctgttcaataccaattcgctactggtcacctcggacggtattacggcgcgggtgggttcgttgtcagcagatctagagcgcttcatgccgtggcgcaccacggacggcacaaacgttgctccgaaaggcgcgcctgaactttcaacattgattgaaggtgtgctcgaacatcgccgcctgctggccctactgcgcgattttacggtatttggcgaaaccggttcggggctgaccaagatcatcgcgggctatcaccagtttcacgcggtgcgtcatgcagtggcatcgactattcgtgcttcggcctccgtgcaaggcgtggcagaagccccttccgactatggtttgccaagcgtgaaaacgcaggggcaaggcgacaaacgcgctggggtgatctggcacacccaaggttccgggaagagcttcctgatggcgttctatgccggtcaactggtgaaacacccggccatggccaacccaacgctggtggtgctgaccgatcgcaatgatctcgacgaccagctcttcgcgaccttttcaatgtgtcgtgacctgatccgccaaacgccggttcaggccgagagccgcgaagatcttcagaaggttttgagccgggcatcgggcggcgtgatatttacgactttgcagaagttcggcgagatcgctgaaccactcaccacgcgccgcaatgtggttgtcatcgcagatgaggcgcaccgcagtcaatacggcttcaatgccaaggtggacgcgaagaccggtgaaatatcctacggttttgccaagtacatgcgcgacgccctgccgaacgcatccttcattggctttaccggcacgcccattgaggctgccgacgtcaacacgccagcggtgtttggcaactacatcgatgtctacgacatcagccgtgctgtcgaggacggcgcgaccgtaccgatctactacgagtcgcggctggcgcgcatcgaactcgacgaggaagaaaagccaaagatcgacacggaggtcaacgacttaaccgaagaatattcagacgtcgatcaggagcggttcaagaagaaatggtcaacggtcgaagccttagttggcagcgacaagcgtctggctcttgtggccaaagatatggtcgcccactttgaggatcgcgtggcagccctcgacggcaaagcgatggtggtgtgtatgagccgtcgtatctgcgtcaagctctacgatgagatcgtcaagttgcggccagattggcacagcttagacgacagtgcgggcgcagttaagatcgtgatgacgggcgcagcgagcgacccgcaggaatggcaacagcacatcggccataaggcccgacgcgatctgctggccaagagagcccgtgaccccaaagacccgctcaagctggtgatcgtacgcgatatgtggcttaccggctttgatgcaccttgcatgcacacgatgtacgtggacaagccgatgcaggggcacggacttatgcaggcgattgcacgagtgaatcgcgtgttccgcgataagcctgcgggcttaattgtggactacatcggtattgcacaaaacctgaagtctgctctgcagcagtactccaaaaaagaccaggagaacactggcgtcgacgaagcacaggccattgctgtgatgatggagaagtacgaggtcgtgcgagacatgtaccacggctacaactacgtctccgcaatgaatggcacgccacagcagcgtctggcgatgatggcgggggccatagagtggattctcgcccttcaacagcaactagctgaaaaagagaaaaccaaagaaggtaagaagaacgcccaccgccgctatcaggatgctgtgctggctctgtccaaggccttcgccctggcatctgcctccgacgaggcccgcgacattcgcgaggaggtcggcttcttccaggcaatccgcgctgcgctggtcaagagcagcactggctccggcgtgactgagcaagaacgcgagttggccatccagcagattgtcagccgtgcggtgatctcgaccgagatcgtggacattcttgccgctacgggcatcaagagcccggacatctccatcctctcggacgagtttctcgcggaagtgcagcagatggagaaaaagaaccttgcgttggaagccttacgcaagctgctcaacgacggtattcgctcacgcagcaaagccaacgttgtgcagaccaaagctttttcggagcggttagaggacgcggtggcgcgctaccacgccaacgccatcacgaccgccgaagtgctgcaggagctgatccagctggccaaagacatccgagaggcgcgccaacgcggcgaagaagctggtctgtcagatgaagaaatcgccttctacgacgcactggccgagaatgaaagtgcggtacaaatgatgggtgacgacaagctcaagctgattgcccacgaattgctgatgagcttacgcgaaaacgtctcggtcgactgggcgcatcgggaatcagcccgcgcaagaatgcgagtgctggtaaagcgcattctgcgcaagtacggctacccgccagacctccaagacatggcagtgcaaacggtgctgcagcaggctgaggctttgtcttcgggatggagcgtttcgaggtaa

SEQ ID NO: 345508 - DNA, 747 bp, Pseudomonas aeruginosa
atgacccttgattggtgccccggcatgcgtatggcctgcagccattggcgagacgcccctatgttgcagcagaccttcgaggcgatggaacgcaatctggagcacaacaacgatgcgtgcatcgactgcgctaaaaccgttgtcgaggtggtctgtcgcgtggtggtggacagcttccacactcttcaaaccccgctcaagcccgtgcaggaaactccttcgctttcggactggctgaccgctgcaatccgcgcgctcaagctcggcgatgtgcgtgatgaccggttcaagaagctggtgtccagccaccacaagttggccgacgccctgaacgatcttcgtaataaggcgggccccgctagccacggtaaagatccgtatctagagcggttagcagagcaccaccgccgcagcgcggttttggctgctgatgccatcgtggcttttttgtatcaggcctatctggatgcgcaacttgacccgatcagctcacgcgagccgtgggagcgatttgcagaagacaacgcgctgattgacgcgcgcgtggggcttgcggtggatgcagagaccggtgatttatgcacattgcgttttatgctgcctgggagcaaggaagtgccgatcacgatcaatatcgaggttagccgcttgttgtaccagcttgaccgggacgcctatgttgaggcgctgaacgcagcgcgcggggctccagctgtggagcctgtcgaagaacaaggagaatcctaa

SEQ ID NO: 345509 - DNA, 1251 bp, Pseudomonas aeruginosa
atggcgagtgaattcaccgttctgacgttggaagactgtcttgatgctttgattgactatcgcgggaagacaccacgcaaaacggatttcggcattccgttaattaccgcaaaagtagttaagtcgggccgtatcgatgctcccaatgagtacattgccgaagaggattatgaggcgtggatgacacgtggttatcctcaaattggcgatgtcgttttgactaccgaagctccgctgggcgaggttgcgcaaataaagttcctgccggtcgcgttagcccagcgaattgttacactgcgaggcaagcgtgacctacttgatagcggctacttgctctacctgatgcaatcgcaggaaatgcaagggaagcttctgggtcgcagctccggcacaacggtaataggcatcaagcaaagcgaacttcgcaaaatacagttggcgttgccacccatcggtgaacaacgcatcatcgcccacgtcctcggcaagttggatgataagatcgaactcaaccgtcagcagaacgagacgcttgaggcgatggcccgctccttgttcaaggcgtggtttgtggacttcgagccggtgcgcgccaagttggacggtcgctggcagcgcggccaatccctccccggtctgcccgctcacctctacgaactcttccccgaacgccttgttgactccgagctgggagaaattccggaggggtggggtgttggcccactcgaaaaacttctggttttgcagcgtggattcgatttaccaaatcaatcacgaatcgagggagagattccggtgattgcggctggcgggattaatggaacgcacaatgaagccatggttaaaggccccggggttgtgactggacgttcaggtgtattgggaaacgttttccttgaacttggtgattattggcctttgaatactacgctatgggtcaaggagtttcgcgctgcaaaaccgtgctatgcctacgagcttctacgctgttttgacttcaagatgttcaatgcaggctcagcggttccgacactaaatcgaaaccatattcacgtcttgccacaagttattcctccatccaaagttgtcggaatattcgaaagtatggcgatggcactatatgaagacattgtcgccaacaaccttgagtcccgctccctcgcccaaatccgcgacaccctgctgcccaagctcatctccggcgagctgcgcgtttcgaatacccagctcaacgtcggagcagcggtatga

SEQ ID NO: 345510 - DNA, 1578 bp, Pseudomonas aeruginosa
atggcacagaacgatacagccacaaacggcaacggcgccagcctcggtttcgaggcaaatcttttcaaggccgccgacaagctgcgcggcaacatggagccaagcgactacaagcatgtcgctctcgggctcatcttcttgaagtacatctccgacgctttcgaggccaagcacaaggcactgctggccgaagacgcacaagccgccgaggacaaggacgaatacctcgcggataacgtgttctgggtgccgaaggaggcacgctggtcgcacctgcaggccaatgcaaagctgcccactatcggtactttgatcgacgacgccatgcgtgccattgagaaggacaacgagtcgctcaaaggtgtactgccaaaggaatacgctcgacccgccctcaacaaggtgatggtaggcgagctgatcgacctgatctccggcattgcgctgggcgcggaaagcgatcgctccaaggacatcctcgggagagtgtacgaatacttcctcggccagttcgcaggtgccgaaggcaagcgcggtggcgaattctacacccctcgctcggttgtgcgtgtgctggttgaaatgctcgaaccggtgcctgatcccgcgcggggcgtggtgggccgcgtttacgacccttgctgcggctcgggagggatgttcgtacagtctgaaaagttcgtacaggagcacggtggtcgcataggcgacatcgcgatctatggacaggagtcgaactacaccacctggcgattggccaaaatgaacttagctgtgcggggtatcgactccgacattcgctggaacaacgagggcagcttccacaaggacgaactgcgcgaccttaaggccgactatattctcgccaacccgccgttcaacatctctgactggggtggtgaccgcctgcgtgaagacctacgctggaagttcggcgcgccgcccgtgggcaatgccaactatgcgtggctgcagcacatctaccaccacctcgcccccaacggcacggcgggcgtggtgctggcgaacggctcgatgagctccagccagtctggcgaaggcgagatccgcaaggccatgcttgaggctgacgtggtggattgcatggtggcgctgcccggccagcttttttactccacgcagattcccgcatgcctgtggttcctggcccgcaataagaatccgggttgcggtttgcgtgaccggcgcggccaggttctgttcattgacgcccgcaagatgggagtgctggtagatcgcacccggcgcgaactcaccgacgaggaaatccaaaagatcgctgatacctatcatgcttggcgcggtgagaaagacgttgccgagtacgccgacgtcgcggggttctgcaagtcggtatctatggaggaagtccgccaaaacggccacgtactgacgcctgggcgctatgtaggcacggaggagcagcgagacgatggcgagcccttcgtggaaaagatggcacgactttcagcccagtggcgtgaacagcgggcagcggcagccaagttggataaggtgattgaggccaacctgaaggagcttgggtatggcgagtga

SEQ ID NO: 345511 - DNA, 981 bp, Pseudomonas aeruginosa
atggcattggtgggtagacgcgatggccgcaatttcggctacggccgacagttgagctacgcggggccgcaagcgctgaaagacatgttcggcggcggccactacggcacggtcaaggcacactgtgatcggtggcaggcattcgtgaagtggtgccgctcagaacaggggccgggtatcaatgatgcgcagcatattgatcggaaggtgttggccgactatgcggcgtacctgcgcgaaatggtcgggcacggtgacctcgccgtcagcaccgcacaaaaccggttatccagcgttaacagaaccatggcggcgcttcgcggtgatcagtacgtgaagctgcccagtccgagcaaggcgttgggtatgcagcgcaccggggttcgccactcagtgccgcagggccaagaccgcgaacaggttaaacaaatcgtcgaggcgctttgccgcaatcatcagcaacgggccgcagcgattgttctgttggcgcgagccaccggcatgcgcttgcgtgaggcaatcttggctgacctgccacggctaagccgtgaggctaacgaccaaggtaggattaacattcaggatggcaccaaaggcggccgcgccggggcctcggcgccccgttggattacagtggacgatcatgttcgcgaggcgcttaggtttgcacggcagatgtcgcctgcgagtagccgtaacctgattgcaccacacgaaagctatctaaattttttacaagaagtcatccgccctgcgcgagacatcctgcatacacacaacctcaagggcttccatgaactacgagcggcgtacgcatgtgagcgctatgagcagatcacccagcatcgcgcgcctatcaacggtggtcggtgctacgccataaaccggcgcctagaccacgaggcccgcctgcggatcagccaagagctggggcatggccggattgatgtagtcgcctcatacatcggggggcggctatga

SEQ ID NO: 345512 - DNA, 1206 bp, Pseudomonas aeruginosa
atgagccagcttgagcaagagtacaaacaggtccaggcggacctgaagaaagtcggcgatgacctgcgcacctacgccgagcagtctgaaaaagaactgaaggtccattccaagctctccgaagaaaccaaggccagcgtcgacaagctgctggtttcccagggcgaactccaggcacgcctgcaggctgccgagcagctcatggccaagctggagaaaggaggcggccgcatcatcaccccggaaagcatgggcgaaaccttcgtcgcagctgaaggctacgacgcctgggctgcccgcgccgcgggcggtgcgaagggcagctttaccgttccggtgaaggctgcgatcaccagcctgaccggctctgctggcgacctgatccagccgcagcgcgtcggaatggtcctccccactcagcagcgcctcttcgtacgcgacctgctggcttgggggcgcactacctcgaactccatcgagtatgtgcgcgagaccggcttcaccaacaacgccgcgccggtgtcggagaacccgcagaacccgaagccggaatcggacatcaccttcgagctggataccgatccggtggccacgatcgcccactgggttcgtgcgtcccgccaggttctgtcggacgctccaatgctggccagctacatcgacggccgcctgcgctatggcctgaagctcaaggaggagatgcagctgctcaagggctccggcgtcggcctcaacctgaacggcctctacactcaggcgagcatctacgcgaaccctggcgtcgtcgttcaggctgagaccgccatcgaccgcctacgcctcgcgctactgcaggtcaccctggccgagtacgacgccgacggcatcgtgctgagcccagtggactgggccgcgatcgagctgaccaaggacaagaacaacaactatgtcttcgccaccccgaccggcctggccgttccgggtctgtggggtcgcccggttgttgcttccaagtccatggatatcggtgatttcctgactggctccttccagcaaggcgccgaaggttgggatcgcgaggacgtcagcgtcaccgtctccaccgaggaccgcgacaacctcgtgaagaacatggtcaccatcctctgcgaggagcgcgtgggcctgtcggtgttccgtccggaagccttcgtgaagggcgacttcgacggcctgccggcgtcctga

SEQ ID NO: 345513 - DNA, 1233 bp, Pseudomonas aeruginosa
atgaagcccaagacgaagaagccgagccggctaaaggctgccgttctgggctggctgggtgtaccggtcggcctgacggatgagacgttctggaatcagttcggcacgaatgtcgctggccaatcggtcaacgagtgttcggtcctcaagctgtctgctgtgtgggcctgcgcgcgcttgatcgccgagacaatctccactctgcccttgggcctctatgagaagaccgccagaggccggctggcgctgaccgatcacccgctctacagcatcattcattcccgtcccaacccggactccaccgcggtggtgttctgggaggcgatgatcgtctccatgttgttgcgggggaacggattcgcggagaagaactacatcggcaagcgcatggtgtcgatggacttcctggcgcctggccgcctttccatcacccgcgacatcaacgggaacaggaagtaccggtacaccgagaagaatgggacgcagcgcgatatccccgcgaagaacatcttccgtatcccgggcttcaccatcgacggtgattgggggctgtccgctatcgagtacgggtcgcaagttttcggatcagccctggcggccggaaacgctgccaacagcacattcgagaaaggcctggcgccgacagttgcgttcaccatgcagcgggtcctgaacaaggagcagcgaaccgagtttcgcgagagcctggccgaggtcagcggcgccatcaatgccgggaagtcgcctctgctcgagggcggcatggatgccaagaccattgggatcaaccccaaggatgcccagcttctggagtctcgcgcgttcagcgtggaagaaatctgccgctggttcagggtgccgcccttcatggtcggccagtcggagaagtccagctcctgggggaccgggatcgagcaacagatgatcggtttcctgacattcaccctgcggccttggctgactcgcatcgagcaggccatcaacaaggacctgctctcgctggccgaccagatgactacctacgcggagttttccgtggaaggcctgctgcgagctgacagcaaaggccgcgcggaatacctggcgagcatggtgaacagcggcctgatgacccgcgatgaaggtcgcgccaaggagaacctgccgctaatgggtggcaatgccgacgtgctcacagtgcagaccgcactgatccccctcgaccagctgggcaaggcccccgccggcaactga

SEQ ID NO: 345514 - DNA, 228 bp, Pseudomonas aeruginosa
atggctgacgaatacatctacgacgtcaagcacgtcgctcgggataacgatcggtcgctgattgtgcgctgcccccactgccaggaaatctgcggcatcgaaggcgatgatttggacgacgtggttggcgagcaataccaatgccgctgttccggctggttccagatcgattttgatgcgcgcatggcgaacaacccgctgccagccaacaaaggcattccgggataa

SEQ ID NO: 345515 - DNA, 447 bp, Pseudomonas aeruginosa
atgttttctggagacacgggcttccgcgttttcaagctcaatacctcgaatatacaagcttggaaccctaatccggaagatcttggtcaagctctcttcaatcatcaagatcacttggttaccgggcggactgagactgacattctctacgaattgctgctaaagctcggtctagacctgtgcgtccccatcgagcagcagcagatcgccggcaaaaccgtgcacagcatcggcggtggcgtcctgctggcctgcctgaccgagcagataacccgcgaccaagtggaagacctggctcaaggaattgttgcctggcacaaggcgcaagccccagccagcgacagcacctgcgtgttccgtgacagcgcctttgccgacgacattgccaaaaccaacctggccggcatcctcaaccaggccggcatcaaaaacgtgcggagcctgtaa

SEQ ID NO: 345516 - DNA, 861 bp, Pseudomonas aeruginosa
atgactcagaccgaactacaaaagacatttattgcaatgctttttgcatttgttgcatctacagtcgcccaacaaatagcagagctacttgtggtaattaccaataattggacctcagctacctcccctttcgacatatacgaaaacatacattcttacttctggctcctaatgccaacatttatgcactccgttctggcgttactgctattctccatgagctgggtcatgtggtcgaaatcagcggcacacaagaaagacattgaggatgtattctcaaagaaatacttagtcctcctatttgaagtagtacttgtcgtcctttattttgcagttgcgaaatccaacgaagctgatttcgccgcttacacaagagacaaggcaattacatcatttgtaggaaccccctccgcaaagcccgaagccttgcagatattttgggtcttctctctattcgtagtctgggattatcttgtcgatgtctttcagagtcctagacaaaaccacccaacagcgctcacatcaaaggtagcggcacacttacaaggagtcataacctactgctcaacctccctagtatgtgcagcactggcatatctggtcagcagactagcaccagtatctgggaccccataccaagcaacatttggcgacattgcactaattatgtcactattgttgttcaatagggccaaggcatttgagtactatctcaggaaggtattccctgaagaaaaaactcgccaaaccacggctagagacacgcctatcagcagcctaggattgaccctgattgctatactcaccatcatctatatctttagcgtcaccgcaatggcattcccatgcatcctaaaataa

SEQ ID NO: 345517 - DNA, 720 bp, Pseudomonas aeruginosa
atgggaatttctattgaggaagttgttgatggtgtctttaagctgcaaggggggggcgacagatgcatagagcataatggtgagaggctgtataggtttatggatagtttctacataaggaaagagcacctgtacgagctaactcctgatgaggttagcaatttgtgtcgtgctcgctcacgctatcctcagttaataactgatgttaatgatctggttcaatcaatattccgaagactagtctcacaggttaatcctagttcattgctggaaataggctcggggagcaggccgcttctaagcccgccgccagagagtattctctacgttatgtccgatgccgaccagagtgtgatgatggggacggccagtaaggcacaattttgtgagttttctagcacaaactccatgttgccatatgaggaaagcttttttgacatggttgtagcggtatttgtattgcagtttaatttctatgaggcgcagatcagtgaattgtatcgatgcattgcgccccaaggaatattcgtagctaacgtttaccgtaggccatcacacgcaagcaagcaactatgtgcccaattcgagtctaaaggatttaatgtacgcagaattgaggatcctcagtctctctgtagcgggcatgagtattggcttatcagtaagtgcgcggacaagattgccaaaaccgccgagcagcttcatgcttgccttagttag

SEQ ID NO: 345518 - DNA, 1203 bp, Pseudomonas aeruginosa
atgagttacagtttggaaactattaaccagctggatggtattgattggtcgttccctagtctcgctaactcaggaattcattcctttcattggtatccggcgacttatattgctgcaatacccggtacgttaatccctttctttgcgaaagaaggagaggtcgtacttgaccccttttgcggctcgggtactactggtgtagaggccatacgcctaggtagaagattcataggtgttgatactaatcctgtcgcgttgctgatgacgaatgcaaagctcagcttcccagaccctggacagcttcggaaagtcatcgatgacgtaatacggcgggcagagagtttatttggcatggctgaggttccagagcatccacgtgcggcggaacttctggattggtatcacccagaaacaatgaatacactgaatcgtctattggcttcaattatggaagttaagagcgatttatttagagaggcactgctttctgtgtattcaggagtcttgaagaattgcagttcacaaggtaagcattgggggtgggtgtgtgacaatgttaagcctaaagcgtcggaaatagttttcaaagatgctatttctgcatttgcaggcgcggcaaatgattatttgaaattttctaaatcatcattcgactcagtaaaggtccatgactcaggagttaagcgagcagatgtgagaggtcgctatagcctctttcatggcagttgtgttgatgagttaagaagattgtctccgggggctgtagatttcattatgacctcgccgccatattatggtgttgctgattatgtgaagtcacagagactaacctatctatggtttgatgtagatgagctggcagaaaaaaatttaggctttaggagttttgaagccttgcgaaagaatgaggctggtgcaaggtcgaatcgtttcagaaagaacagtcattccctctatatggattttatgagggcattctttgctcagtgctatcgtgttcttaagaataatggttatatggctttggttgttggtgagtctcaggcaagggaggcaactacggaaattctaattgattcagctatcgaggagggattctcattgtcctgccgagcagaaagagacatcaagcaaagtcggcgccgtctgatggcgaaggtaaagggcgaggacattttaattcttcagagaattgaaaaatag

SEQ ID NO: 345519 - DNA, 1296 bp, Pseudomonas aeruginosa
atggagtttcatgacattttgcatgggctcatccgctttgacgatgagaacctgacgccattacttgctgagcttatagatagtcctgaaattcatcgccttagaaatatgcggcagatgaatttcgatgttccactaattcaggaactggggcggtcaagacggctgccgcattctattggtgtcgctcatatcgccgtaactctggcgcatagatgcctattggattcaactcaaacaaagatcctgcttgcggctgcattgttgcatgacgctgcaattcctccgtatgggcatcttgttgagtccgagtttaagagtaaaaaccctggcttcaatcatgaaggtagattggaggagttgattcgggggactattaatgctcagaatctttacttggatatcgtccctgataagcaactccgtatctcggctattctagataagtatgatgttccttataacgatgttttggatgttgtgtgtcctaaaggaaatcaaagaagcccaatatcggcagatatagacattgacaacatagacaatgttcatcgaatggctgcgatgcttggctgggatggcgtgcgggagaatataagcggaataataaatagtgtttctttggacgggttgagtggtatgatttttagccagagctctattccgtatctagagaaatggctggattatcggcagaaaatttataccttgattattgctcatcccgcgtgtgttccatataacgcactgcaggctgatatggtcagaatagctgttgagaatgagctgataaagccggatgattggtggttggatgagccgagatttgaagaaaggctgaggaatgatcctcttacaaaagagcttgctaaacagttgatatctggatgtacatatcagcttgttgattatgtttggtttaagggatttccagttaaaaagaaactgaataatgcgcagattgttaagaatctgtcagaggttgtagaactgccagacgattatgggtatttcgtttggaacgaaaaaggccttatatcccgtgaagtcttagtgcccgggaaaaatggtaactccactcttggtcgaaactctactagctgcatgatcgcactggtaaaaaagacctcgggcaaaggtcgttggtctaaattgagaacaaatcaatggcgtacagatattgcgaaagccttcatgaagcagttcgagactgagatttttgaagtggatttcccagaaacgtatactggcaattacttgagtcataataatgagttacagtttggaaactattaa

SEQ ID NO: 345520 - DNA, 1176 bp, Pseudomonas aeruginosa
atgtccagtttcgaacgagagccaggctgcggcctggcggaaaatgtcgatcaggtgatcgaggcggcattcgccgaccagcgcctggtgggggcggtggtgctggtggcacaccgggggcagtggctctatcgacgggctgccggcctggccgaccgcgaagccggccggataatgggcgaggacagcctgttccgcctggcctcggtgagcaagccgatcgtcagcgtcgcggccctgagcctggtggacgagggccggctggccctcgatgagccgatcgccgactggttgccggcgttccgtccgcgcctggccgacggccgcgaggcgcgtatcacgccgcggcagttgctgagccacagcgccggcctcggctatcgcttcctcgaagccgacgcagacggcccctatgcccgcgccgggatttccgatggcatggacctgccgggtttcgacctggccgagaatctccgtcgcctggcctccgtgcccttgctctacgaacccggccgcgcctggggctattcgctggccaccgacgtgctcggcgcgctggtggagcgggtcgacgggcggccgctggcggaagcgctgcggcagcgggtcgggattccagccggcatgcgcgacagcggcttcctctgcgccgacgcgtgccgactggcggcggtctacgtcagcgaccggccacgcccgcgccgaatggccgggcgggagaccgtggcgccgttcgaggacagcgtcggcattcgcttcgagccgagtcgggctttcgaaccgtctgcctatgcgtccggcggggcggggatgatcggcagcgccggcgacgtgctgcgccttttggaaatccttcgccagggcggcgcgccgttgctgacgcctggcctggtggaggagatgggccgcgaccaggtacccggcctggaactgccggccaatcccggtttcggcttcggcctgggtttctccgtgctgcgcgacccggctatcgcgcaatcgccggaggctcccggcacctggcgctggggcggcgcctacgggcattcctggttcgtcgaccgggcccgcgaactgtcggtggtggcgcttaccaacaccctgttcgagggcatgtcgggacgcttcgtcaacgacctgcgcgacgccgtctaccgttccgcggagctgcgctga

SEQ ID NO: 345521 - DNA, 894 bp, Pseudomonas aeruginosa
atggacagcctcagcggtttcaccgtcttcgtccgcgtcgccgagacccgcagcatcgtcggcgccgcccggaccctcggcgtcagcgcctcggcggtgggcaagcgggtcgcccgcctggaagagaaactcggcgtgcgcctgttccaccgcagcacccgcagcatcaccctgaccgccgaaggcagcctgttcctcgagcgcagccggcgcatcctggccgagatcgaagccaccgagctggagctgtcgcaaagccgcgagaccccgcgcgggcgcctgcgggtcagcctgccgctggtcagcgggctggtcctgccgacgctcgccgatttcatgcaggcctatccggacatcgagctagacctcgacttcagcgatcgcgtggtggatgtcgtcgacgaaggcttcgacgtggtcctgcgcaccggccagccggtggattcgcggctgtccatgcgcgaactgggtgagttccagctgaagctggtcggctcgccggcctacttcgcccgccacggcacgccgcgctgcccggaagacctgctgcggcacacctgcctgcactaccgcttccccaataccggccgcctcgaggaatggccgctgcgccgcgcggacggcgaagccccgccgcagatcccggtgtcgatggtctgcaacaacatcgagacccgcgtctgcttcgccctgcgcgaccagggcatcgcctgcctgccggacttctcgatccgcgaggcgctgcgcgaagggcgcctggtcagcgtcctcgacgccttctgcgagcgccgcgcgcgattcttcctgctctggccgtccggccgccaggtctcgcccaagctgcgcgccttcatcgacttcgtcgcgccacgggtgatcgccacgctgggctga

SEQ ID NO: 345522 - DNA, 366 bp, Pseudomonas aeruginosa
atggccattaccgttatccgccacggcatcaccctcgacgaactggacgcctggggcagcgtcgccgacctcggctcggagatcctcgaaggcgaggtgaaagccttcggcaagatgaccgcaggagcccccaccgacccggtcagcgccgcctacttcggcaccaccgccggcaagttccgcatgacctatccgttcagcgaacaggccacggtggtcagcggcgaggtccgcctcaccgacgagtccaccggccagagcacgctctacaaggccggcgacagctggttcgtcagcaagggcaccccggtgctctgggaggttgccgacggcggcttcgtcaagcattactacgcggtggcttga

SEQ ID NO: 345523 - DNA, 1332 bp, Pseudomonas aeruginosa
atgagcgggcaggcgcggttgcgcgaagtcggcgccggcggcgcggcgctggaactggacgagaagcgtttttcccggctcggctgggggctggtgctgctcggcttcgtcggctttctcctgtgggccgggttggccccgctggacaagggtgtcggggtctccggcacggtgatggtggccggtagccgcaaggccgtgcagcaccctaccggcggcctggtcaggcacatccgcgtgcacgaaggcgagcgggttgaggcaggacaggtgctgctggagatggacgctacccaggcccgggcccaggccgatggcctgttcgcccagtacctggcggcgctggcgagtctggcgcggctgagcgccgagcgcgatgaaaaggcgcggatcgagtttcccgccgagctgctggcgctggacgacccgcgcctgccgaccttgctggaacagcagcggcagttgcacgacagccgtcggcgggcgctgcgcctggaactcgatggtctcgccgagacggtcgccggcagccaggcgcaactggacggcctgcaagccgcgctgcgcagcaaggagcagcagcgcgccgccctcgaggaacagttgcgcggcctgcgccaactggccagcgagggctacgtgccgcgcaaccgcctgctcgacagcgagcgcctgctggcccaggtcaacggcgagatcgccggcgacctcggcagcctcggcagtacccgccggcagatcctcgaactgcgcctgcgcatggcccagcggcgggagaagttccaggaagaggtgcgcgccagcctggccgacgcccaggtgcgcgccgaggagttgcgcaatcgcctggccagcgcgcgcttcgacctggccaacagcgaggtacgggcgccggtcgccggcctggtggtcggccaggaagtgttcaccgagggcggcgtgatcgcgcccggccagcaactgatggaaatcctcccggagcgccagccgctgctggtggacgctcggctgccggtggagatggtcgacaaggtccgcgtcggcctgccggtggagctgatgttcagcgccttcaaccagagcactacgccgcgggtggagggcgaagtgaccctggtttcggccgaccgcctgctggacgagcgcagcgaggcgccgtactaccgggtgcgcatccgcgtaggggaggagggcgtacgtcgcctggccggcctggagatccgcccggggatgccggtggaggccttcgtccgcagcggcgagcgctcgctgctgaactacctgttcaagccgctggccgaccgtacccacctggcgctgggggaagaatga

SEQ ID NO: 345524 - DNA, 618 bp, Pseudomonas aeruginosa
ttggttattgagtccgatgttgtaattttatcaaaaacaaggatgtctggctccaatgtttgcgtaggtggatatgacacttcaaaacatcggatgataaggctacttgactcgaacgccaaatcactaaacgccaactatccgtatgaagttggccaagtatatagaataaattaccaagcccgctacataattagccctccacacacagaggatgtcgcagtatataattatcagttcatcgactggtgcaatgtagattactttaatcagctaacgctctccctttcattaaaaaatgttaatctcaatgatttatttgatggaaaacttaattgggaaaacgatagcggctacataagtgaagagcgaaatatcaattacagcgttcaaattgcaatactaaatagcaacctaaaaaaagagagcgactacttcgtagacagtacaaacttcttcagcagaaaacgcgttaaatatgtgggatttaaaagcataaacgaaataccagacacaataccggcgggaactaaaatccgcttttccttagcaaggatgtgggacaaaaataacgacggaaatagaagatcatacctacagctttccggcatatattaa

SEQ ID NO: 345525 - DNA, 1197 bp, Pseudomonas aeruginosa
atgtcagttattaagaaagatacaaactacggctatttgaatttctttgaaattactgaaagcgggctttatcgaacgcagaagaaaacggacggcgagataaggtctaaaagctttggacttgatacaaccttagttttacgaaatataaaagcatgggtagactctagacgcttcaaagaaacctcaccttgggcagagcttggtgagtctggtgatccatcagtcatgtgttactgcaaagaaattcatgagtttgaaaacggtgattttctcctaacattgtggaagcatgacccaagcgactccaaaagctatcgagggctccgacttaacgaaaagggcgagcctatcgggtttatcagcaataattctttggacactggggatgatgttgtgtggggacatccttgctactactggataatcccgaaatcaaacttagtaatttcgataaaattcgaagattcaaaatgtgactctgacctgatgcaaaaatggattaattattgcgtccgatatcgtttgaaaatagataaattcaacaagcggcaacccggcgagtcagccaccacaatttattttagctcagaagcggcacctgaagattacagccttttatatcgcttctcaaaaaagataaaagaattcagaactagcgaagcatacctcaaaaaaatatgcgaaacgactaaacatgtactcttaagaaatgaggttatagtcagctccgaaattgtcgagcaggagaacaaaaaatctcaaaaaatgatgttaactttagataaagcaaacaatgaaatattcgattttattgaaaaaattatgggacgtttttttggcccaggccctgacaacgcagtaagtgacgacggcaagagaagagtcgaagtaaagcttgaagcaacaccaacttatgagcagatgcaagacttcatgaagtattcttccgacttccctgaagacggctgggcagatgtaatcttcattgatgaaaatgaaaataagacctctataaaaaaacatagattagtcgaaagggttatgttgcccaaaagcggagaaatatattctgcagctctgctatacgccacgatcgcaggaaatcgttcaaactatttacagtccatttccaacatcactaaagatgctgcagcaaccgaagaagctgaacaatcagatgcagtgctagcttaa

SEQ ID NO: 345526 - DNA, 1413 bp, Pseudomonas aeruginosa
atgactatcttagaaaacactattagcccatccagcaaaaatgatgaacttcaggcgctagcgaaaaagcatttattgatgcacttcacccacgctgcgtactacgacaacacgccactcaccatcatgagccggggagagggctgctgggtctgggacgaatcaggcaatcgctatctcgacggcctggcaggcttgttctgtgtaaatatcggctacagccatggggcagaaattggcgacgcggtaaaacgtcaaatgaaccagctcccttacttcagcaactggagctatgcccacgagccggccattcgtctagcggcgaaggtggcatcgctagcaccgccagagatgtcccgggtctttttcacctctagcggctcggagtccaatgaatcggcgatgaaattaatccgtcaatatcacactgcccgaggcaaccacgcaaaaaccaaatttattgctcgacgtgtgtcctaccatggcacaagttatggcgcgctttcacttaacggcatgaccaacatccgtaacagcttcgaacccctgataccaggtgttaggcatgtatctaacaccaagcgctacaagcgtcccgaaggcgaaagcgaagcacaattcacggcatttctgctcaacgaaattgagtcgctgattattcaggaaggcccggatacagttgcagggattttcatcgagcctatgcaaaatgccggtggtagcctgactccacccgctggctatgtccaaggcatacgccgcttgtgcgataaatacgacgtgctgctggtcgccgatgaggtcatctgcggatttggccgtctcggcgagtggtttggttcaattcgctacggcatccagccagacatcatcactttcgccaaaggcatcgcttcaggttacttccctctcggcggaatgattaccagcaatgcggttatggcgcctatcttggaaggcccgaatcaaatgtttctacatggtctgacttatggcggccacccgtctgcatgcgctgcagcgttagccaatatcgagatcatggagcgagagggagtgctcgataacgtgcggcgcaaccaagactatttccgtacgaagctcgaggcactcaaagcacacgccattgtcggagacgtgcgcggcgacggttatcactactcgctcgagctggtcaccgataaaggtaaccgtagctggacgtccctcgtaccgtccactgagtttgttgccacgcgccttgcaccggccctgctcaagtctggcttgctgtgtcgcgccgccgttgatcatgagggaaccccacttattcaattgtcaccacctttggtcctcacgcgtgaagaaatcgactggttggtggcgaaactggataccgtgctaagcgaccagatcgccattggattcgactag

SEQ ID NO: 345527 - DNA, 1443 bp, Pseudomonas aeruginosa
atgaatcagatagctgcagagggctcgaccctcgaggatttctccggctcgagcggttcacttggtgccgcaacacgaggcatgacccgcgttttggaattaccttcactcatcctgtttggcctagcttatatggtaccgttgaccgtcttcgcgacgtatggcttggtcacgcagaaaacctccggtcatctacccgccgcttatattattacccttcttaccatgttgtttaccgcctacagctacggacgtatggcggcatctctatcccacgccggctcggcatatgcctatgccagccaatcattcggtggcaaagtcggtttcatggtcggttgggctcttttgctcgactatctgttcatgccgatgatctgttatttggtcattggcatttacatggctcagtactttcctagcgtgccgatgtcggtgtggatccttactagtatactggccgtactagtgcttaacgttttgggcatcaagctgctggccaaagttaacttcgccctaattggtgtccaggttgtcttcatcatcgttttcattatcgcctcgattgtctcgattactcactcaccaacggtatctctgatccaacctttttacagccctgacatggactacaatgggttattcagcggtgctgcaacgctctgcctgtctttcctaggttttgatgcggtgtcgacgctttcggaagaaacccgcaacccaaagcgcaaccttccacgcgcaatcatgctatgcactatgatcagtggctttatgttcatagtgattgcctacgtcagccacctggccttcccggactggcatgcattcaaggacgctgactcagcaagcctgcaggtgatgcaaaaggtgggcgggtcattgatgtcggcgtttttcacggcgattttcgtcgcaggctgtttcgcgtgcgctatggcttcgcaagcaagtgtatcgcgcattctcttcgccatgggccgtgacggggtgttgcccaagcgcattttcggtctcaccagcaaacgattcggtacccccgtttcagccaccctggtcgtgagcctactgtctctcactgcacttgtgatcagcttggatctggcctcgacgatgatcagttttggcgcattaaccgccttctctttcgtcaatctttccgtgatcaagcatcacctctgcgacaaggggctacgtgggaccctacctctggtgcgctatggcctgcttccattgattggcctagcgttgaatctgtggctttggacaagtctttcctctgccactttcgaggtgggtctagcctggctcgctggaggtctgcttcatctgttctggttgaccagaggttttcgtcgtccccctcccaaattgcatcagcacgacgatgagcacaccttcaatggctgcacccaaacctgcgcgctgcagaaatctgcatag

SEQ ID NO: 345528 - DNA, 1158 bp, Pseudomonas aeruginosa
atgcagcactcacgaccactgacttattcccctgttacgcgcttcgaagatatgcgcattatcagcaaacatgttctggccaacgaagagcatgacacccgtctgctcctgcaatccgcgcatcccgggcagatacccgcaacgactcatgtcatcgtattggccctcgagcttgcgcggcagcgtggcctcagtgtcgatgctgtattacgagactgcaatttaccggtagaacacctgaattccccttcaaccagcgttacccgagaacaagagctgagggtattcgaaaatctcttggatctcagtggcgatgcgacagtagggcttgagatcgggcaacgcttgcatgtgtcctgtttcggtttgccgggctacacaatgctggtcagcgaaacggttcaggacgccctcaattgcttgagcaccttcccgctattgatgggcctgtactttaccgtgacgacacgcgaggaaggcgatagaacagcgatagtcattgatgattacagctactcgaagcgactcgaacccctgtgtacggacatgctgctagcggcgatcatggtgatagtcgaggaccttgttgggcacccggtacgaccggtagaggtgtcgctgcaacactgctgcccgtcacagcatgactaccgttcagagttgtttggttgtggcgtgcgttacggcgttactgaaaactcaatcaccttccccactcgcctgtttcgccagcccgctcccctagccaatgcagtcagcgtcgaatcgctctaccagcaatgcctggccatcgagcgcgactggaccgccaaagcctccagaaacctcatctcgcagatacgtgaactgctgacacgtgacttgagtgaatttaacacactggcgcaggcggcaaagtatttctgcctcaccgagcggacgctgcggcgacgtctgaagtcaaccaatatttcctttcagcagttgctcgacgaggcacgtcagagacgcgccaagaaactgctgctcgacggaatgaaaattgcagaaattgcggaacgcctaggctatagcgacatcgccagttttcggcatgcctttcgccgatggaccggcttatcgcccagtcaatatcgccagcgcgctatcacggcagtctccacatccataagcgattaa

SEQ ID NO: 345529 - DNA, 894 bp, Pseudomonas aeruginosa
atgccaattccagaatcgcagctcgaaacgtggtcccatcagggatcgattacccagtcgagcaacacctacaacacgatcaagagcgtcctggaggacagcgccacgccgtatgccggcaagaacttcaaagtgttccttcaaggctcgtacggtaacgacacgaatatctacgccgagagcgacgtggacatcgtcatccggctcgacgactgctttcacagcgatctcgaatctttgtccgatgacgaaaagtcggcctacaagcaggcattcagcgacgcgacctacacacatgccgacttcaagcgggacgtactgtcggtgcttgaggagcaatacggttcggccgtgaaagccggcgacaaggcgattgccattgacgcgagcggctcacggcgcaagtcggacgtgattgttgcgacgcaattccgtcgctacttcaagttccggtcagcaagcgactctgagtacgtcgaaggcatctgctttttcaacgctgctggcgagcgaatcgcgaactacccaaagcagcactcggcgaacctgacggcgaagcatcaggcctcttcgcagtggctcaaacctatggcccgggtgttcaagaacatgcgcagccggatggtcgaagacggcctgattaaggccggtatcgcaccttcgtactacatcgaaggcttgctgtacaacgtgccgaacgagaagctcaccaccagctatcaggactgcgtggtcaacaccttgaattggtatcggcaggaggcctcgaaaaccgacctcgtgtgtgccaacgagcagtattacctgctgcgagatggttaccacacgtgctggcgacaggcggcctgtgatgcgttcatcgaggcggcggtaaagctttggaacgactggtag

SEQ ID NO: 345530 - DNA, 948 bp, Pseudomonas aeruginosa
atgatggagtcgacagaagagtctgggtcgtctgccttcctgcgtgtccttacgttggacggcggcggcgctaagggcttctacacgctgggcgtactcaaggaaatcgaggcgatgatcgggtgcccactgcaccagaagttcgatctggtgttcggtaccagtacgggcgcgatcatcgcgtcactgatcgcgctcggtcacagcgtcgattccatcctggagctgtaccgcaagcacgtgcctaccgtgatgtcgcagaagaccgctccggctaggtcgcaggccctgaagaagctggcgagcgaggtcttcggcgatgcaacgttcagcgatgtgaggaccggcatcgggatcgtcacggccaagtggctgaccgagcgcccgatgatctttaagggcagcgtcgcgcaggcgcatggccgagtcggtacgttcgtcccgggctttggtgtgagcatcgcagacgctgtcaaggcgtcgtgctcggcctacccgttcttcgagcgaacgattgtcagaaccgcaatgggtgaggacattgagctgatcgacggcggctactgcgcaaacaacccgacgctgtacgcaatcgccgatgcggtccaggcgcttcagagagagcgcaaggacatccggcttgtgagcgttggcgtgggcatgtaccccgacccgaagccgagcctgttgatgtggctggcgaaaaaatatctcgtcagcgtccagttgctgcagaagaccctggagatcaacacgcagtcgatggaccagctgcggcagattctgttccatgacgtaccgaccatccgaatcaacgactcctacgtcacgcctgaaatggcgactgatctgctggaacacgacctcaaaaagctcggtgtcttgttccagcgagggcgggagtcgttcgcgtcgcgggagacgcagcttcgcgagctcttgatatag

SEQ ID NO: 345531 - DNA, 972 bp, Pseudomonas aeruginosa
atgctgatcgcgctgcacaaacaggcccgcaccacgccccacgtgcgggcgcagatcgccgccagtgacgagccggtggcggtgctggcacgccgctatggggtgaccgcgccgaccatctacaaatggaagcggcgcaccgatgtgcaggaccggtcgcacacggcgcaccggctgcaaacgacgttgactcccggccaggaagcaatcgtggtctacctgcgccgggccctgctgctgccgctggatgacctgttggccgtcacgcgcgagtttctgtgcccggaggtctcccggtccggcctggaccgctgcctgcgccgccacggggtaggcaatctgcacgccctgcgcccggcgccggacacagcggtcagcaagaccttcaaggcctacgtgcccggttttgtgcatatcgacgtgaagtacctgccccagatggcggacgagacccggcgacggtatctgtttgtggccatcgatcgggccacccgctgggtctacgtggccctgaaagccgacaagagcgcgcgctcggcgcgcgccttcctcagtgccctggccaaggcctgcccggtgcgcatcacgcgcctgctgaccgacaacggcactgagttcacggaccggctgttcggtggccgggcgcgggcaccgaccgggcagcatgaattcgatcgcctgtgccaggcactgggcatcgagcaccgcctgacgcccccgcgccacccgcagaccaacggcatggtggagcgcttcaacgggcgtatcgccgacctgctgcgcacgcaccatttccggtccggtgaggacctggagcagaccctgcaccgctatgtcacgctgtacaaccaccacctgcctcagcaggtactgaacgcccagactccggcgcaggcgctccagaattggcacgcttcaaaaccggagttgtttcttcgaaagcctaagaatcgtccgggacgtgacacttag

SEQ ID NO: 345532 - DNA, 2778 bp, Pseudomonas aeruginosa
atgaacgacttactgcacggccaaaaaactggctcgaccggcccggtggaatgccttggccagacattcccaagcgaacaggcgcggcgcgagcacttcaccaagctgctggccgagaagctgaaagatccggcatttcgcaaaatcgaaggtttcccgcagggtacggacgaggccatcctggcgatgtcggacccgccgtactacaccgcgtgcccaaatcccttcctcgaagacttcgtgcggcactatggaaagccatacgacccgagcgtgaagtacagccgcgagccgcagaccattgacgtctccgttggtaagaccgacccgctctacaaggctcactcgtatcacaccaaggttccacatcttgcgatcgtgccgtccatcttgcactacacggaaccgggcgacatcgtgctcgacggctttggtggctcgggtatgacaggtgttgcagcgcagtggtgcgcgtctgccccggctgcttatcgccatgaactggaaaccgaatggaagaagcaagggaaagctgcacctaagtggggagcccggcgcgtcgttcttaacgatctgtctccagcggcgacttttattgcctccaactacaacatcccattcgacgtcgagcaattcgctaaggctggtaagcaactgcttgaccagatggagcaggaaatcggctggatgtatgaaacgctgcacaccgatggaaagaccaaaggtcggatcgcatacacagtctggagcgaagtgttctcgtgtgcatcctgcgctggagatattgtcttcctagatgccgcgtttgatgaggagtcgagtcgagtttccaaggaaatagtctgcccgcattgtggtgcgacagcgccaaaagagcatcttgatctggtgtttgagacgtatatcgattcgaagagcaacactgtggagaagcgcccaaagcgcaggcccgtatcaattcgatattcgataggtaaagtcgtacacgaaaagaagcctgatcagttcgacctggacctactgcagcgaatcagtgcaatgccgatgccttcggcattgccatcggatgtcctgccagacatgcagatgggacgagtcgggcggatgaagacagcgaatgtccaaagcattccaaaattcttcctcccgcgatccgctcatgcacttgcatcaatgtgggataaggctaaggctcagcccgatgctcgtatacgcgcagcactgctattttttgtggagcaagccatatggacggcatcggtcttaaaccgctatcgaccttctgggttttcgcaagttaatcaatatttgacaggcgttttctacgtggcttcgcagcacgcagagtgcagtccctggtacatccttgaaggaaaactggggcggcttgcgaaggcgtttcaaaactatcgctcccacatgggatcagctgtcgtcaacacgggctcggctgcgtctatgccgcttccagaccaaagtgtcgattacatcttcaccgatcctcccttcggagagaacatctattactcggatctcaacttgctagttgagtcgtggcatggcgtgaagaccaactcaagtccagaggccattgttgatcgagtcaagaacaaaggtatccccgaataccagcacctcatgcagagatgtttcgctgagtattacagggtcctgaagccgggcagatggatgaccgtggtgttctccaatagccgagcggctgtttggaatgctattcaagtggcattgcagcaggttggcttcgtagtggctgaggtcaccacgctcgataaggtgaacttgagtttccagcaggtcgtttcgcctaatgctgttaagcaagatctgattatttccgcatacaagcctaacggcgggctggaggaacgcttcaatcggactggcgcgacagtggactctgcgtgggacttcgtgcagacgcacttgaaacagttgcctgcggtaaaagtaacgtccggatacccgcaagaattgttgagcatcgtcgagcgtgaccctcgtcgcatctacgatcgtatggcttcctggtttatccgccacggcacgatggtgccgatctcgacgccggagtttctgggcgaattgcccatccgcttccgtgagatggacggtatggtgtttctgcccgatcagttggtcgagtacgagaaggcgcggtcgcgtattccgcaggtgaagcaggcagaactgttcgtgtcggacgagcgcagtgccatcgactggttgaccaacttcctgctcaagcgcccatcaactcgatcggaaatccatcctgagtacatcccgcagatcggttcggccaagcgcaaaggcgagatcattccggaattggaccagctgctggaagacaacttcttgcgctatgacggctccggcgaggtgccgagccagatccacagctacctctcgaccaaccacaaggatctgcgcgggttggagaagaatagtgccgcactcgtggccaaggccaaggatcgctggtacgtaccagacccaaacaaggcgcaagacctagagaagaaacgcgaaaaggcactcctcaaggaattcgacgcctatcgatcgttcactggtcgcaagatcaaggagtcgcgtctggaggtgctgcgtgcaggcttccgagcggcgtgggccagtaaggactacgcgacgatcatcagcattgccaacaagctgcctgaggaaacgctgcaagaggacgagaagctgctcaccctctatgacctcgcgctgacccgcaccgaagacgggatctga

SEQ ID NO: 345533 - DNA, 2271 bp, Pseudomonas aeruginosa
  misc_feature (324)..(324): n is a, c, g, or t
atgtcttggcgatccaatatcgacttcgctgtaaagcgcgtacgaaaagcggtcgcaagacgaatcgcagcattatggcagtacacctacagagcccaataccagcttggagtgtggaagcttcgatacggcaatatcgctttttatgccgtgcttttccctctcgtctctgcaagcgcctacctgtctccggctctccagaatgtgcttgccagctattactcgacagaacacacgatcgaaggtctgcgcggtttgatcctaaatgcgggaaccgcgctgataggggcggctgcgatcgttacgtcgctcgtactgttcgcnatgcaggtgaacatcgagcgcatgcctcatgggctattccgccgtctgagcgcagatcggaagttgctcggcgcgttcgcgtcggcattcctccttgcaatcggagttgccactctgtcgacttttgtggataaggcccggctggcgctcgtcgtgctcgcagcctcatgggcggtcgtattcatactgatctcgttcatgtacgcctatcggcgcgctttggttctcatcaatcccttgcagcaactcggcatactcattcaagacacccgtaaggaattgcggacctgggctaaacgggctcagcgcgcgatgccactccttgagcgcgaagaaaacgcaagtgccacgtcgtcaccatcggactccacacacgatatggctcgtacagctttttttcagatcaacaatcgatgggccgatggcacaaaacgagcgatccggcatgcgatgtcgtttgctcggcgctatgcggaacaaggagattatgaagtttctggcgcggcactgaactccgtcgttggcatcaatgctgcctacatcgactccaagggtaaaactttctacgccaacagcccatttgtcgaaaatccattttccagcgacggcttcatcaacgatacgttggagcacctgcggcaaaacgtgcagagtgggattgcacgtcgggatgagcagcagatcgagcagacactgcaagcgatggctgcactggtccgggtgtatctcggtatcgattactccagcccgtatgcctcgaaaagccacgcgcagctcgctgcaggataccttgcaagcgccgtgcaggccgtagttcctcatggcatggccgatgttctgctagaggggcaacggctcatggggcaatctgcgcagtatcttctcgtccatggagatccgaacgacatagcaacgctcagcgaaaaaattgcgttgattgcgtgtactggctgcgcgaaggaggattaccgccccgtcacgatggaaggcatgacgcagcttgcgaatctcacctttgatctacttcgctctgggagccgcgacattcacttcgccgttggggaaatccgacgagatgttgctttggtggtgaagctatttctcaacgtaccagatactcccctgtcgagcagccatagcacattcctagggccgtactactcgtcgacgagcatgcagagcttgaggtcgcggcttacggcattggcgaacgcgatctctgaagcgcaaccggacaacacgggcgcccaatcagtcatacggaacatcgagcgttgggcagatggcctttaccaaacggagaaggagctccttctcgaagctgtaaaggcgaagtctcacttcgcgtttgacatgattcactggatcacaggcgtgaccgaaatcctgttggcaatatcaaatgcccccgcatgcgaccatcacagccaagaggaacttcggaagcacgcgcgctggctgattgcgaccttgacctggattcccgatgacaaggacacggtgaccttcgttgagaacttccagatgaccgagacattgtttgaagccgctgtcaatgctcgaaatcgtggttgcgatgagatcgcaagggagatcggggaaagcctgttgtcatggacattcaaaggcgggaggtatcaaacaggctggggagtgcttgagagggggctttgtggtcttgcagcattcgccgtctatggtggggatgaagagatctcactactcagaaccgcagtcgtatctcgattgaccgggaagtctgctctggagcaggaaatccgcgatcgaactgccagagaaatcctggaacgcgccgcgaacctgtacaggcaaggacactggtcgtcacggatcgaaatggcgattgctcaatccgaccatgcgaaactgcgtccactgctggaggaaattgccttcgcgctgtcgccaggcacagccaacaagtag

SEQ ID NO: 345534 - DNA, 1203 bp, Pseudomonas aeruginosa
atgccacacactaggccggccattagtgctgcaaagacggctctcgtgctgtccggtggcggtgcgcgcgccgcctaccaggtcggtgtgcttcaggctttggtgacgttgcgccgtgaacacctgggcgaaggggcgcccaaccccttcggtatcctatgcggcacctcggcaggcgcaatcaacgccgccgctttagcctgtcgcgcagactcctttgacgctggcgtggaagctattgccgcagtttggcgcaacttcaatgctggtcaggtgtatcgcaccgacgcgcttggtatcgctcgcagcggcgcacagtggctgagcgcgatctcggtaggctggatgttggcacgctggcgcaaagaagggccgcattcactactggacaatggaccactagccgaactgctgcgacattgggcgcctttggaactgctgccgcacatgttggcccagcgccatctgcgtgcgctggcgatcggcgcgtccagttacaccagcggcgagcacttcaccttctttgagtccaccggcgacatgacgggctacgaacgctcgcagcggctggccgtgcctatgcggctgggattggcgcacttgctcgcttcggcggctatcccattcgtgttcccggcacaacgcatcgaacatacggagcatgccggctggtacggcgacggctcgatgcggcagaccgcgccgatctctccggccatccacctgggggcacaacgtatgctcatcgtcggcgtcggtcggatgcatgaacctcgcgggcgaatcgtgcgtaacggcggctacccgacactggcccaagtcggaggacacgtgctgtcgaacatctttctcgacgcgctcacggtggacatcgagcgtatggagcgcgtcaaccgtacccttggaatgatgacgctgggccagcgcatggccacctcactacgcccggtgaaggcgctggtgattgcgccgagcgagcgcatcgacgacattgcggcacgccaccaaaagcacctaccgcgggccgtgcgcgctctgttgcgcggcgtcggctcgtccagcgcgagcggcgacttgagcggcgccgccctggtcagctatctgctgttcgaggctccattcacccaggaggtaatggcgctgggtgaacgcgacacgctggcgcaacggcaggcagtccgcgaatttttcgggtggctctga

SEQ ID NO: 345535 - DNA, 1038 bp, Pseudomonas aeruginosa
atgtcccaatccacgcaggtcaaccgccgcatcgtcctcgcctcgcgcccccacggcgccccgacccgggataacttccgcatcgagcaggttccgcttcctgagcccggcgcgggccaggtgctgctgcgcaccgtctacctgtcgctcgatccctacatgcgcggacggatgagcgacgcgccgtcctacgcgccgccggtggaactcggcgcggtcatggtcggcggcacggtcagccgggtggaagcctcgaaccatcccgggttcaaggtcggcgactgggtactctcggccaacggctggcaggactacgcgctatccgacggcagcggcctggcgcgcctgggcgagtcgccggagcatccgtcctacgccctgggcctgctcggcatgcccggcttcaccgcctacatgggcctgctcgacatcggcaagccccaggccggcgagaccctggtggtggccgccgccaccgggccggtcggcgccaccgtcggacagatcggcaagctcaagggctgccgagtggtcggcgtcgccggcggtgcggaaaaatgccgccacgccgtgcaggtgctcggcttcgatgcctgcctcgaccaccatgccgcggacttcgccgaacgactggccgaggcctgcccggacggcatcgacatctattacgagaacgtcggcggcaaggtcttcgacgccgtcttcccgctgctcaacgccaaggcccggatcccgatctgcggcatcgtcgcccactacaacgacaccgagctgccacccgggccggaccgcttgccggcgctgatgggcacgatcctgcgcaagcgcatcaaggtgcagggcttcatcatcttcgacgactacggccatcgctacgatgaattccagcgcgacatatcgaagtggttcgccgacggcctcatccagtaccgcgaagagcgggtcgacggcctggagaatgcccccgaggccttcttcggcctgctccagggacgcaatttcggcaagctggtggtgcgcgtcggagccgacgcatga

SEQ ID NO: 345536 - DNA, 660 bp, Pseudomonas aeruginosa
atggcgagggtcaaatatgggcggccaatcggttgccggtcgcgctcgtcgaccacgatcaggtcgatgacggtgtggtcgatctgcacctgttccagcggcatggtgacttctggcggaatgccacccgcgccttgcaagggacgggcagcgtcctgcccgccccggctgcgggctattttcgccgggtgtagtccggcaatccgctgggccacggtgttgcgcgccggcaccggcagcttctgggttttgcacgcctgcgcgacttcgcggtggaacgccgccaggctgcgtttctgcttggtcaggaagcgcttttgcagcagctcgcggatgatgcgctcgaccggttccggcaagcgccccttgcctttgccgccgccggatcggccgggcgtcaggtctgttaccaggccagtaccctgccgggcgcgacggatcaggacatatacctgtcgccgggacaggcccagcgcttgggctgcctcatcggcggcttcatgcccgaccacctcaagcgctgccagtggcccgatgatttccgtccggtgccgggcttgcgcccatgcctcgtcgggcagggtggccacgccttgcgcggcaatcggtggagtgtctgatgtcatgcccaaacctcgctttggtgcacacgagtattga

SEQ ID NO: 345537 - DNA, 342 bp, Pseudomonas aeruginosa
atggaaacgttaaacgctgtagccgccctggcggccctcgcccaagaatcgcgcctcgcggtgttccggctgctcatccaggccggccccgccggcatggccgccgggaagatcagcgaagcggccggcatcccgccgtcctcgctgtccttccacctgaaagagctggcccacgccggcatggtcacgtcgcggcaggaaggccgctttgtgatctacgaggcgaatttctcgacggccgccgatctggtggccttcctcaccgagaactgctgcgggggcaacccttgcatgcctatctgcaacccggcctgtgccactaccgaagagaggtcatcatga

SEQ ID NO: 345538 - DNA, 474 bp, Pseudomonas aeruginosa
atgaaacgcctgcacgtgcatgtgtcagtcgaaaacctggcggacagcatccgcttctactcggccctgttcgcagccgagccgagcatcaccaagaacgattacgccaaatggatgctggacgatccgcgcgtgaacttcgccatctcggagcgcggccaagccaagggcctcgaccacctgggcatccaggccgagaacgccgacgagctggccgagctgggccagcgcctgaaagcggccgacctgccgcacctggcgcagccagatagcaactgctgctacgccaagtcggacaagcattggagcctcgatcccagcggcatcgcctgggaggcgttccacaccctcgacagcatcccgacctacggcgagcacggccgtaccgcgaccgaagcggcggcctcgggctgctgtagccctgttcaacaactcacttccaccgtggccccgaaagcctcgacgtgctgctga

SEQ ID NO: 345539 - DNA, 507 bp, Pseudomonas aeruginosa
atgaccgaaagaacctacaacgtcctcatcctctgcaccggcaattcggcccgcagcatcatggccgaagccctcatcaacacgatggggcaaggccgcttccgcgcctacagcgccggcagtcacccgaccggcaaggtcaatcccttcgccatcgaaaaggtggagtcggtgaagtacccgaccgagaacctgcgcagcaagagctgggacgagtacgccacgcccgacgcgccgaagatggacttcatcatcaccgtctgcgacaacgccgccggcgaagtctgcccggtgtggccaggtcagccgatctcggcgcattggggatttgaagacccggccgccgtcgaaggcactgacgacgagaagcgccgggccttcgatcaaaccttccggcacatgatgaaccgcgtccgcctgttcgtgaatctgccgctgacgatgctcgaccacacggccatcaagcgcgagctgtcgaacatcggcaagaccgagcaagaagcatga

SEQ ID NO: 345540 - DNA, 1068 bp, Pseudomonas aeruginosa
atgagcgccggcgcgcaggccgtcgccgtgaagccgcgccaagcaccgatgagcggcttcgagcgttacctgacgctgtgggtggccctgtgcatcgtcgccggcgttgcgctcggccagggcctgcctggcgtgttccaggccatcggccgcatggaggtggcccaggtcaatttgccggtcggcctgctgatttgggtgatgatcgtcccgatgctggtcaagatcgacttcggggcgctgcaccaggtcaaagagcattggcgcggcatcggcgtcacgctgttcgtgaattgggccgtcaagccgttttcgatggctctgctcgggtggctgttcatccggcaagtcttcgccccgtttctgccggccgatcaactggacagctacatcgcgggcttgatcttgctggccgccgcaccctgcacggctatggtgttcgtgtggagccggctaaccaatggcgacccacttttcacgctctcgcaagtggccttgaacgacgccatcatgatcgtggccttcgcgcccatcgtcggcttgctcctgggcatgtcctcgatcacggtgccctgggacacgctgctgatttcggtcgtgctctacatcgtcgtgccggtgatcttggcgcagctctggcggcgtcatctgctcaagcgagggcaggccgcctttgaccgggctatgcagaagatcgggccgtggtcgatggccgcgttgctgctaacgctggttctgctgttcgccttccaaggcgaggccatcatccggcagccgctggtgatcgccatgctggccgtgccgatcttgattcaagtgttcttcaattccgggttagcctattggctgaacaagcgggccggggaaaagcactccatcgcctgcccttcggccctgatcggtgccagcaacttcttcgagctggccgtggcggccgccatcagtttgttcggcctgcactccggcgcggccctggcaaccgtggtcggcgtcctggtcgaagtgccggtaatgctcttggttgtgcgtgtagtgaatcgctcgaagggctggtacgaacgaggttga

SEQ ID NO: 345541 - DNA, 459 bp, Pseudomonas aeruginosa
atgggcaagaaagaaactgaggaagcgattgcagacagccgcgccggccgcgttgccgggcggttcggctcggtcgatgagctgctggctgatctgaaagccgacgacacgccggagaacctggaaaactggttgcacgagaaagccggcccgacccatgacgcattgaaggccgacccggcccgcgccgtctcggctgacctggtgcgccacacgctcgatgagctgccggcccaatgcgactcttcggccgagctagccgcacaggaacgggaatggctggatgcgccggctgtgggccgcgagctgctgacgccctacggccccgccgaggcgctgaccacggccgaagccgtggccgcgttcctggccgacgccgaagctactgccgacccggcctacatcgagcacgcccgcgaagttgcggcacgtgcgcgggccatgcacggcatcaaatag

SEQ ID NO: 345542 - DNA, 282 bp, Pseudomonas aeruginosa
atggcgacgacagaaagcagttaccccgccgagttggccgcacggctcgctcttcagcagcagacctcgcagatcaagcgcagggactacctggccgctttcatggcggcacgcgcggacgtgaaggaagcgatggaggccggctacgcgctcaagatcatctgggagtacatgcgcgaaaccggccgtatcccttttcgatatgagacgttcctgaaatacgttcgccagcacatcaccaatgcgccacctggctccatgaatcagagcagcacgaagtga

SEQ ID NO: 345543 - DNA, 996 bp, Pseudomonas aeruginosa
atgaaaaatgtgtcaaccaccatcatttccaagggctgcgatcccactgtcgcggaagctatcaagcagttccatgatcggtggcagccctactccgcatcgtcgcggcaacaccccatcgttcggctgatagaagaactgatcgaccccgccgtggtcacgtatacggaaaagcttccactgcgctacgtgggccacatccccggagcagggacaggggtgggcctgagcgggatcattcgattgatcgggtttgatgcgatggttcgcttgcaacgggagctgctacggaagttcatccgccaggaggactgcgcaagcacaagggacaaacgatttacagcaactctcgaatcgctgtttgagctgatatgggcctgcgcctgcaagcaaccggtggaatctccaatacgaggctcggatggcaaaccacgcggcttgaatggaagacgccggcaaggattttgtcggttttgcggagagcttaccgccctagcttcgtttgcaggcgatgaatctcaattgcgcggagccgctgacacacttcgcttgagcagcctgtactgtgcggcgcatcagcccaagttgctgaacggcgcgggaaaccctacctatagacaagcaaaacgatctatcgctcagtttgatctcgaattggcccgacttagtcagcaatgcgcgaagcgatccaacccccatgcggcggcatccggcgacaaactggttgataactacttctttcactacatgctaggtcaaaccttgcagcctgccgacatggctgagctacgcaacctggcacgattgatggtggactcgaagctgtcagacaccaagaagaagattttgatgctccagtattccgggctaaatcagtcagagattgcagagcagctttcgagcaacgatcaacggccgctgacgcgccaagcagtatctaaaacccttaaggcactggcatccatccctgcaacgtttcacctgaagaagcaatag

SEQ ID NO: 345544 - DNA, 1611 bp, Pseudomonas aeruginosa
atgaacccgcaacctcgcaccccacgcggtgcgccccaggccgcgccactgctgtacggcagcgtgtgcagcggcatcgaggccgtgagcctcgcctggcaacccctcggcctcgaagccgcgtggttcgccgaaatcgagccgttcccgagcgccgtgctcgcccaccgctatccccgcgtgcccaacctgggcgacatgaccgcgatcgcccgccaggtgcgcgccggcaccgtgccagcgcccgacatcctggtcggcggcacgccgtgccagtcgttcagcgtggccggtgcgcgccgtgggctggatgacccgcgcggtgccttgacccttgcctatgtggagcttgccaatgccatcgaccaaacccgccgccaagaccgccgcccggcggcaacgctcgtctgggaaaacgtcccgggcgtcctcaacgaccgcagcaatgccttcggtcatttcctcggcgcattggccggagaaagccgtgcgctccagccgccaggggatcggtgggcgcacgctggttatgtgtctggaccctgccgccgcatcgcgtggcgcgtgctcgacgcgcaatatttcggtgtcgcccaacgccgcaagcgcgtgtttcttgtggcaagtggtggaaatgacctcgatcccgcagaagtactttttgagcgcgcaggcctgcacggggattcttcgccgggctgctcgccgtggcaagacgcttcccgcactgctggacatggcgctgcagcagcaggcggctacgccggattgaagcagccctatggtccggtcaccatgactttcgggtttggggggggcaatacggccggtcccatcgacgtggccgcttgcctgaccgccgcgcctggtccgaagaacgacttcgaggtcgaaactttcctcgcgcagtccatcgcaggcaacatcacccacacgctcagcaccgcaaacggcggcaagggcagcagcgaagacggcaccggcaagggtgttccaatcatcgccttcaccgcccagggcagcggtgcggatgcgatggcgaaccaggcgccgacgctgcgcgctggtgggcaccgcaacagccacgcgaatgcgggtgtggtgccagccgtcgctttcgcgcaaaactcccgtggtgaactgcggctcgaatccggtcacggccagctcgccggaacgctttccacgggcggcggcaagccgggccagggccggcccatggtgctcagtgtcgcgctgcgtggtcgcgccaagggactggccttcgagttgggcggcagtgtagcggccgcactgcgcaccagcggcggcggcgcggacaagccccatgtgctggcccccgacttcgaggcgcatttccgctacgactggaacgaccccggccccggcgactggtcgcactggcgggtgcggcggctgatgcccgtggagtgtgagcggctgcaaggcatgcccgacgactacacgctgatcccgtaccgcggcaagcccgcagcggacgccccgcgctacaaggcgatcggcaactccatggccgtctcgtgcatggcatggctgggccagcggctggtgcagtgcctgcacaagacgggttcaaccgattcggattga

SEQ ID NO: 345545 - DNA, 369 bp, Pseudomonas aeruginosa
atgagcaccatccgtctacagacgaaccagaaccgcctgatcgaaacttttcgccatgcgttcacccaagcctcaatgctgggcgagctgctacagaacgcccggcgcgcaaaggcccgccacatccacatcaccaccgaaggcgacacactcaccgtcagcgacgacggcgaaggtatcgccaacctccagaccctcatctgcatcgccgaatccggctggaacgaggaactgaaggcccgggaaaaccccttcggcatcggcatcctctccacgctgtacttcgcgcgcagcctgcgcgtgcattcgctggacatggcctttcgcgccaccaccgccgcgatcatcaacggcgaggacatcgtgtag

SEQ ID NO: 345546 - DNA, 738 bp, Pseudomonas aeruginosa
atgagcaggacgaagccagtagccgcgccgatgatggcgcgggtctatctgcgcgtcagcaccgacgcgcaggacttggaacgccaagaggcgatcatcacggccgcgaaggccgccggctactacgtcgccggcatctaccgtgagaaggcatccggcgcacgcgccgaccggcccgagctgctgcgcatgatcggcgacctacagcccggtgaggtggtcattgccgagaagatcgaccgcatcagccgcctacccttgcccgaggccgagcgcctggtggcctcgatacaggccaaaggcgcacgcctggccgtccctggcgtggtcgatctatccgacctggcggccgaggcccagggcgtcgccaagatcgtgctggaagccgtgcagaccatgcttttgcgcctggccttgcagatggcccgcgacgactacgaggacaggcgcgaacgccagcgccaaggcattgagttggcccgccaggccgggcgctacaagggccgccgtgctgatccgaagcgccgcgcccaggttgtcgcgctgcgcaagtccggccacagcatcaacaaaaccgccgagctggccgggtgcagtgcggcccaggtgaaacggatatgggccgaggtcagccaggccgaagcgaagcagcacggcgcgttcgtggaggacgcattgacggaagccgatgcgctggccgctgtcggccaggatgaacgccaggaggaaagggcatga

SEQ ID NO: 345547 - DNA, 225 bp, Pseudomonas aeruginosa
atgacgaagccgcaccaagacgacgagccgtttttcatcaccgaggaaattgcggccgaaatgatcgccggcggctacgagttcgagccgccgcccattccttgcaccatccgcctacgcgacgtgctggagcgcatgaccgatgccgagctagcattggagccgggcgagatcgccgaccaagagcgtgaacgccgacggtgcaagccgtgttcaacctcatga

SEQ ID NO: 345548 - DNA, 555 bp, Pseudomonas aeruginosa
atgcaagatattcaggatcgcttcagagccgtgatccgccacaacacttcagacacccgcagatatgcggagctggaggcgctcacaggtatccctgccgcgagctggaacaaggcctataacgagagacaaagaccaactgctgagatgcttcaagccattgcccggcagtggcctgaatacgcgttctggctcattacgggtgtcacagatgctcgctatggccacatatcttgtcgcgatggcattcgcagggagttctatccggaacggcgcttcggtagaagaggcactgcccaactctactttacccacctgatcgagatgttcaggcgcaagtacggagacaagagcctgtacccgctggaatccatggagcgggaagcagcggcgacactcattcaacttgagatgtcccgccgggcggaagaccaggccctcgatcctgacgagtcagtagctgaaaaatatcgagcagctgaagctgctgctctcgaagcgaaagcctcggagcagaacgaaacgggagtgacaagggaaaatgagcaaacttga

SEQ ID NO: 345549 - DNA, 315 bp, Pseudomonas aeruginosa
atgctggctcagcaagcgatggacgctcctggcaacgtcgacgcgcagctcgacctgttcggcgactatcagaacaacgttgctctgtacccgaagttccacgagtacttccgcgccaacaagccaccgctgcttgccgtgtggggaaagaacgacccgttcttcctgccggccggcgctgaggcgtacaagcgagacaacccgaacgcagaagtgcacttcgtggatggcggtcacttcgcgctcgagtccaacggcgacgagattgcgggctacatcctcgaattcctgggtcgcgtgcacgtcaagcgctga

SEQ ID NO: 345550 - DNA, 354 bp, Pseudomonas aeruginosa
atggcgaaaaatgacactccagattggctaagggtattcgagggtggtaaaggtagatctagtgatggctccgacaacaccggcggaagtggcggcggtggaggtaatgatttggaaaagcgcgtagaagcactggaaaaggctcttcccgacctacgggagagacttgtgcgcgtcgaaaccaaattggattccatggaaaaaaacatgtcaaccaaggacgaccttagggttctcaagggcgaaatcgccaccgaaatgcataaatcccttagtgatcagacctggcgattcattgggttctctgccggccttgccaccttggcgtttaccgctgccaagctgatccactaa

SEQ ID NO: 345551 - DNA, 735 bp, Pseudomonas aeruginosa; identical to SEQ ID NO: 320227

SEQ ID NO: 345552 - DNA, 1704 bp, Pseudomonas aeruginosa
atgaacgacacaattcaactcagcggcttggctcgccagctcgtcctgcatgaacttctcgatgaaaaggccgcccaacaggcccaatcgcaggcccagcgcaacaagttgtcgctggtaacctatctggtacagagcaagctagtgaaagggcaggccttgatcgaactggctgcggatcaattcggtatcgcctactgcgacctgaacagccttgagcgggacagtctgcccaaggatctgatcagcgagaagctggtgcgccagcatcgagtagttccgttgtggcgacgtggcaacaagctgttcgtcggcatctccgatccagccaaccaccaggcgattaacgatgtgcagttcagcacaggcctgactactgaagccatcctggtcgaggatgacaagctcggcatcatcatcgagaaactattcgaaaatgccactgacagccttgcaggactggacgacgtggatctggaaggcctggatgtcggttccggtgcgggcgcaagccaggatgatgattccagtgcagagacagacgacgccccggtggtgcgtttcgtcaacaaaatgttgttggatgcgatcagaggcggctcctccgacctgcatttcgagccctatgaaaagatttaccgcgtacgtttccgcaccgatggcatgctccatgaagtagccaagccgccgatccagttggccagccgtatttccgcgcgactcaaggtgatggccggcctggatatctccgaacggcgcaagccgcaggacgggcggatcaagatgcgcgtgtcgaagaccaagtccatcgacttccgcgtcaacaccctgccgaccctgtggggcgagaagatcgtgatgcgtatcctcgattcctccagcgcgcagatgggcatcgacgccctcggctacgaggaagaccagaaggaactctacctggctgcgctcaagcagccgcagggcatgatcctggtcaccgggcccaccggctcgggcaagacggtctccctgtacaccggcctgaacatcctcaacaccaccgacatcaacatctccactgccgaagacccggtggagatcaacttggaaggcatcaaccaggtcaacgtcaatccgcgccagggcatggacttctcccaggcgctgcgcgccttcctgcgccaggacccggacgtgatcatggtcggcgagattcgcgacctggagacggccgagatcgccatcaaggcggcgcagaccgggcatatggtgatgtccaccctgcacaccaacagcgccgccgagaccctgacccgcctgctgaacatgggcgtgccagcgttcaacctggcgacctcggtgaacctgatcatcgcccagcgacttgcgcgaaaactctgctcgcactgcaagaaagagcatgaggtaccgaaggaaacactcctccatgaaggcttccccgaggatcggatcggcaccttcaagctgtattcaccagtaggctgcgaccattgcaagaacggttacaagggccgtgtcggtatttatgaagtggttaaaaacaccccggccctgcagcggattatcatggaggaaggcaactccatcgagatcgccgagcaagcccgcaaagaaggcttcaacgatctgcgcacctcaggcctgctgaaagccatgcaggggatcaccagcctggaggaagtcaaccgcgtgaccaaggactaa

SEQ ID NO: 345553 - DNA, 699 bp, Pseudomonas aeruginosa
gtgcatttcgctggaagtcgttggagagccttttttatccatctactcattagtctggcaatttttatcgtattgctggcaatcatctgtttgtggtggtatcccggtgctttgttcgaaatagcaggaggatggcagggggtgcgcatcgttgccgctgtcgacatggttttggggccattgttgactctggttgtctatgatatgagaaagccagccatggagttagtgcgtgacttgggtgtcattgctctattacagttttcctgcctgtcggcgggagtttatgttgtctatcaggcgaggccgcttgctcttgttcatgtgtttgatacgtttcatgtgttgaatagggcgtcttatctgcaggctggcctttcttctgaagagttgatgaggtttaaagtgttttctcctgagtatttttatatcgacttgcctgcggagaaaaccgagtttcttgaactgcatgtaaaaggaatgctcgatggacgaccgctacagacccaattggagcgctacaagacattgccggtggtggcagggcaagttgagcggatagtggggaggaatgctcactccgttgggccaggttgtattcgtctggatattgaaagtgcctacgaaacgggaacgatctgtttcgataaagctcgccgttttttctttgacttccgcaagagtgatgctgcgacttga

SEQ ID NO: 345554 - DNA, 1506 bp, Pseudomonas aeruginosa
atgctggtagtcgagcgaggtccatgcgccgccgatatccatatcgcggtactggaccgtgtagtagccactcaacggaatctggttgcccttccggtcgatgaagatcaaaccgttcgggcaaaaaatgtcccactcgacaacgctagttttctcgcccgctgggcacgccgggaatgggcctcgccaacctccctcggagttcgaggtatcaacggtaatgcgcgacgtactggagttgagcggggagaagcctggccaacttggatcggtagcccccgcagacgtcaggcgctctaccgtgatctgttgggcgctatacgcagtgattcggaaccggagcccgcgcagaccgattgcggcatcaccggcacccacctgcagggcatttacgggggcgccgctgtcgtagttcagcgtgaggtttgtggagttgacggtgtttacgacgtagagccccgagttaacgccgacgacctgaatctcagtcccgacagacaggccaagctgcgcgatatcgcccgagatcgtgtcgcgcgcgcttccaccgccgtcgacgacggtgtacggatactgcgcctcaactcgcaggatcgttccggcaacccaatcagccgggaacgagccggcgccagaagggatgatgatgttgttccccgagaacgtgaacgtggtcgcggttgggttcggggtgagcgtcgaggactcggtgagttccaggcccgcattacctgtcgagctagcgcccacctccggcgcggagtgccaccagatggcggatgggtgggaaccaagactctggcctggctcgaaaatctggaaagaggcttccgcgccgagcgcgaggaacgtggtatcgccgatctttacgccgccttcctggatctggaaccgaccacgaccgatgcacagcagcatttcggtccactgttcacgtgggccagcgaaatacttcctgggcggcaggatgtagtcggggaagatcagccggcggccggcgacttcgcgaattgcgtcgccgagcttgaccttgtttcctcgcgcgctggagtcagccagggactcgccctgccccgggtttgtgggcatgcctggcaactgtggcatgagcatccggaatgcggactggacgcctttgaacagtgccgcggtgatcgtgaacggatcagtcccgcgcggcagcttgtagatgcgaacaatgtcgccgcggtcgatgatgcgctcggcccactcaccgggatggatgaactcctcatgggcttttttctgcttgtcggtaaggtcatcgcagagcgcaacctcagcggggacaacaccgatagagaacgggtggacgtcgtggcagcggtacccaggcgaattcgcggtcagccaggcatgaatcgtcattctgcggccgatcggatgccgctccagcggttctccgtcaaggagagatgggtagatttcgatcacggtagaataccaccttggagtatttgtcggagaacttctggagcggggtga

SEQ ID NO: 345555 - DNA, 978 bp, Pseudomonas aeruginosa
atgcagaagaccttctccgaactcgaatacaccggcaagaaaaagcaaacccgacgagatcgcttcctggcggatatcgagcagttggtgccctgggcacagctggaagctcaagtggcgccgttctaccgcgacaccaccggcaagcgcggacgcccctcgattgggttgtcgcgcatgctgcgcatgtatgtcgtgcagcagtgtttcggtttctccgatgaaggcaccgaagatgccatctacgacagccaggccattcgtggcttcatgggcatcgacctgggccgggagtcggcaccggatgccactaccttgttgcgctttcgccgcttgctggaaacccatcagctgacgcgggtgttgtttgaaacgatcaaccagcatctggccagtcggggtctgctgctcaaggaaggcaccatcgtcgatgccaccctgatcgccgcaccgccctcggtcaagaaccgagaaggtaagcgcgatcctgagatgcatcaggctaaaaaaggcaatcagtggcacttcgggatgaaggcccacattggcgtcgacgccacgtcggggctggtgcacagcctggtggggaccgcggctaacgtggccgatgtcacccaggtcgacaagctgctgcacggtgccgaaacctatgtctcgggagatgctggatacaccggtgcggccaagcgagcggagtatgctgaacgggacgttatctggtcgattgcagcacggccaagcagctaccagcatcacggcaaagacagcgtgctgttccgggtcaagcgcaagatcgaatacgccaaggcgcaactgcgtgccaaggtagagcatccgttccaagtgatcaaagtgcgcttcaaccatcgcaaagtccgttaccgtggactggaaaagaatacggcgcagttattcagtctgttcgggttggccaatctgatgctggcaaagcggtacttgcaacgggtggcgggataa

SEQ ID NO: 345556 - DNA, 1305 bp, Pseudomonas aeruginosa
atgtccaaagactctatggaaatagcaacaagtgagcgcccgacacaactagcccgtcgggagtttttggccaagagcagcgcgttgattggtaccgctgccttaggttctatcgtgacatcggcgcaagccgctcagccagactccttgccgcctactgagagtgtcgagcctttggccgtgccaccatggacgaagagccttggtgagcccactgccaaaccgtatggcacaccttccaaatttgaaactgctgctgtgcgttctctgtatcctggcttgaaagagcctatgtcggcatacagcacttcaccattgcaggagttagatggaattctgacgccgaatggtttgttctatgagcggcatcatgcgggtgtgccacagatcgatccaagtcaacatcagttgctggtccacggtctcaccaaacagtcgctggtgttttccgtggacgagatccgacagtttcctgctgtatctcgcatccatttcatcgaatgctctggcaatccctcattcctcccgccttgggggaagacggctgccgaggtagcaggcctggtgagttgtgcagaatggactggtgtaccattgaagacgttgctggaagaggcaggcctcaagccaggcgccaagtgggtggttgcggagggcgctgacggtgccgcgatgacccgcagtatccctcttgagaaatgcctcgatgacgtgatggtcgtgtatagccagaacggggaacggttacgaccggagcaaggctacccgctgcggcttcttgtgcccggtttcgagggcaacatgcagatcaaatggctgcggcggcttcatgtgacggatacccctgcctacagccgcgaggagaccgcgaagtacaccgacctcatggctgacgggcgatcccgaaagttctcgtttgtcatggaatgcaagtccctcatcacctcgccttcagggacgcaaaaactgacccgcaaggggctacatgagctgcgcggcatagcctggagtgggcacggaaagatcacccgtgttgatgtctccattgatggcggccagacttggtacgaagccaaactgcaggatccggtgctagacaaagctttgacagtgttcagagctccgtttgagtggcatggggagagtctcatgctcatcagtcgggccatcgatgagagcggttacgtgcagcccagtcttgagcaactcgtggaagtgcgtgggaaggtctcgttctatcacaacaatgccacccagccatggcgtattagccctgaaggggatgtcaccaatggtcgaggttaa

SEQ ID NO: 345557 - DNA, 978 bp, Pseudomonas aeruginosa
atgttcaacgcattggttatcaacaatgatgatgcaggctatgcgacaacgctgcaggagctcgacgacagcgcgttgccggcaggagatgtgacggtcaaggttcaatacagcactctgaactacaaggatgccttggccatcacgggcaaggggccggttgttcgtaagtttccgatggtgccagggattgatttcgcgggcaccgtagagcacagcgacaactcccactttgcgccaggtgacttggtcttgctcaatggctggggtgtcggtgagacgcattggggcggcctggccacacgcgcacgcgtcaacggcgattggctgatcccgattccggccgggatgaccgcggagcaggcgatggccatcgggacagccggctacactgcaatgctgtgtgtgacggctctggagcgcaatcgagtcgtaccgaaaaacggcccgatcctcgtaacaggggcaaatggtggcgtgggtagttttgccatcctcttgctgaaccggcttgggtacgaagtggtggcgagcaccggccgaccgcaggaggcggattacctcaggtcgttgggtgcttctgaaatcattgatcgtgccgaactgagcagcccaggcaaaccgttggccaaagagcgctgggcaggggtgattgactcggtaggcagccatacgctggtcaatgcttgtgcctctactaaatatgggggcgttgtagcggcctgtggccttgcacagggtatggacttcccggccaccgtggcgccgttcatcctgcggggggtgacccttgccggcatcgacagcgtcatgcgcccacgcgagcagcggataaaggcctgggagcgcctggcgcagctcgtcaacccagcacaactcatgcagatcacccggaaggttggcctcaatgaagccagccgactggctaatgagctgcttgcaggcgaggtgcgggggcgtgttgtcgtggagctctga

SEQ ID NO: 345558 - DNA, 642 bp, Pseudomonas aeruginosa
atgactcaaccagaccggacttcacatgatcccgctgctgcagaacagcaaacccagcggaacaacggaaaacgtgcggagctaatccgtattggcgtggcgatccttaccgagaaggggttttacaacacccctctggacgagatcgttaaggccgccggcgttccgaaaggatcgttttattactatttcaaaagcaaggacatctacaccctcgcggttatccaaagttattcggagtatttcatcaagaaactcgacaaacatctgctgaacccagagcaaactccactgaatcgcatccgaaactggacggatgatgcgggtcagagcctggcgaaatatgactataagcggggttgtctggttgggaatctcggccaagaactcgcggctcttgatgagaattatcgggttgcccttcgcgatgtactcgatagctggtgcaagaagatccaagactgcctggatgaggctaaacgcgtcggcgaaatcagtccggaggccgacactgctgcactgagtaagtttttctggaatgcctgggaaggcgcggttctatacacgaagctggataagtcccgaacggcgttggatctggcgcgtgacgcgtttctttccctcgctcaatctcgctcctaa

SEQ ID NO: 345559 - DNA, 1095 bp, Pseudomonas aeruginosa
atgcatgagttacagcgtgcctggggtctcggcgctttcgatatcggtatcctcacgaatgcagtccagatagggttcatattgggcaccctgatctctgctttgaccgggatggcagataagtacagtgctgcgaagcttttttgctactgcgctgtcgccggagctgttttcaacgggctattcgcattgttcagcggtggaattgtctcggctgtgatactccggctgggagtaggttttgccttggcgggcatttatccgctaggcatgaagcttctggtgacgtgggctcccggccgtgctgctgaaagcttggctttgctggtggcgatgctcacccttggtacgtcttcaacgcatgcgctcagggcctacctgcccaacctggattaccaattgctcgtcttggcctcttcagcactggcacttgtggcttcggtgatgatctggctgctcggtgaggggccgcatgcacgacgaaagctttctgcaaccattgagctggggaccgtgcttggggtattcagaatcccagagttccgcgctgcagccctgggctactttggccacatgtgggaactctatgcgttttggacactgacgccgctgttggtgctgaatgcactcaagggcgccagtgatgctcccgagcgagttgccctatggtcgttcgttgtcatcggagtaggcgcaattggctgtgttgttggaggccggctttctcgctacgtcggaagcggctataccgcgttcattgcacttggtctgtcgggggccatgtgtcttctgtacccgttcgtttcgcaactcagcactgaagtccagctcactgtgctactaatttgggggatcgcggtcgtcgccgattccccgcaattctcagccttgtcagtccaagcttgcccgcccgatcaggttggcggtgcgctgaccattcaaaatagcctgggcttcttcatctcagcctgcgccatctttgctacgactggtctttacgaactcatggctaccaacatctcttggctcttgctgcctggccctgtactcggcctgctcgcgatgcgcccactactgtcacaaaagccaggatag

SEQ ID NO: 345560 - DNA, 1395 bp, Pseudomonas aeruginosa
atgtccaattcaaatctgagcaccatcaatataaggccagccgcgctgctctccatcggagtgaagcggtttacacggatgtgtgtactgatcgtggagaaggctgttccggatccattcgtgatcgcaatccttctgaccctcctgaccgctatattggctttcatattcgcgccagccgcatctgttccgcaggttgtaacgagctggtacgacggcgtgtttaagatcgcaagcttcgctttcctggttgcccttacgctggtgacaggtcacgcgctatccacctcacgcccaatcgcaagactgctgaggcatttcgcgtcattgcccaatacagcagcgggcgccatgactatgacgttcttcgtttccatggctgcagggcttttgaattgggccgttgggctggtcgtggcaggcctgttcgcccgcgaagtggcgaaacgcgtacatgtcgattttgcttggctggtggcggcgtcatacgccggctggtcattctatgtgtgtgggatgtccagctcgattgccctggttagtgccacggcaggctcaccgatgaacatcatcgagtctgtgaccgggaaagtgcttccgatgagcgagtttctgacctcgccattgaatttcgtcccgcttctggtgctggcggttctgctgccaatgatccttcgcatgatgatgcccacacccgaccaaaccgtgtcggcagatcctcagaagctgatcgaagaagacactgtgaggcaggaagaggcccctaacacgttggctgggcgcttggatcacggtgcatggatcaacatgatcctgatcgttgcaggtgtcggttacatcggtctaaagctcgtcgaaggggccttcaaaatggatctgaacatgctggttctggtgttccttctttccggtctcgccttgcacagaactccgaaagcatatctgcgcgcaatcgacaacgccgcacgtatcgctgggccgattcttctgcagttccccctgtatggagggattatgggagtcatgtccgcgactggcctcgctgacgtggtctctaaatggttcatcaccttctcaaccactgagacgctgccattctggtcatacgcctcatcggtgctgattagcctgtttgtaccaagcgctggtgggcactggatcgtccaagcaccttttgtagtaccagccgccgagcatcttggcgttcatcaatcggcggtcgccattgccgtagctctgggtgagggtgcggccaacatgatccaaccgatgtgggtcatcccattgttggctatagccagagtcgggatgggacgagtgatgggcttcaccgtcatcatctttttcgcaatgttcgccgtcatggggacttctatgctgattctaagcctctga

SEQ ID NO: 345561 - DNA, 1503 bp, Pseudomonas aeruginosa
atgagctcatctctgaacctaggtgacctgatatccaacgcctgcaaaagagcacctaggtctgtcgccatcgaaacagacgatgatgtcgttgaccgcgcaggcctgcttactcaggcccaagccgtggcttctaggctgcttgctgaaggcgcacaggagaacgaacccatccacgttcgagtctccaacctgtcaagcgacttctcggcagtgctggggatttggcttgcaggctgcgtggcggttcccatacaccgaaccaccccgctctctgcttgcgaagcgattcaggctaaaaccaatgcacggtttcaagtagatgccacagagtgcccatcagagtgtgcaagcatcgttacccgtctgcgcattgaggcgccagagtttcgcccacagttggaaggcgtggcatttgtgctgttcacctcaggctccacaggcagccccaaaggcgtagtcatcggtcatcacgcctttgccatgaagttgatggcaatcgatgcaatgacgcatttcaaagccggtgagcggacactccttgttttgaacatcacgttcgtgttcggaatctggatgtcactgcttacgctgatgagtggcggtacgcttgtcatcaccaaaaagctgggctcggcagagctgctagatcggcttcatcatcacccgattgatcgggtcggggttgttcccactatgctgaggggcatcctggcgctggttactcaaggccacgataaaaagccttgcgcctggcttcggcagatcttcactggcggcgaacagctcagcgaacaccttgccgagcagatcgaggaagtttttccgaatgctgacttgattaacatttacggtctgaccgagacgctgagctgcgacttttttcagctttcgaatttcaggcgggtcaagccttatgcgctggggcttcccgcgagcggcgtgaattataggatcgtcgacgaacgcggtatgcccgtaaagccaggtcaacaaggtgaactgcagattcgaagtccgtaccttatggctggctacctcgatgaccctgagcttacggccgccgcgcatagcgacggctacttccgaacaggcgacctcgccttcatcaacgctgacggggacgtccagttcagaggtcgccagaaggagatcatcgttcgcggggggaacaaggtcacgccgatggagatcgagcaggccgtcgtgatgttccctggcatcaccaccgcgatggcgaccggtgtggaagatgctctcctcggggaaaagatccacgtactgatcgtaccttcgtcctccgccacaattgactttgagcacctccaagaatttctcacaagtaaactggagaaatacaagcttccagacgctttttacaccgcagagtgcgtaccagtggggcgaactggcaaggctgacagacgcgaattgaaagtgatgattaccaccgggctgctggttccggcttcggtcaaacaaagtgggagatcagtagcatga

SEQ ID NO: 345562 - DNA, 1143 bp, Pseudomonas aeruginosa
atgagtagttttaaaaccctgcggtatgaagtagatggcggtattgcacacctgatgcttgaccgcccggaaagactaaatgcgcttgggaaagcagcgctggacgagatcaatatcgccatggacttagctgaggaggactctgcagttaaggccatcatcatcagcggcaacggcaaggccttctcttccggatttgatctcaaagagcaaatggaagctcgcccggaaggggctgcagcatggcgtcaaattctcgcaagggacttctccaccacaatgcgcttctgggactgccccaagcccaccatcgctgccgtccatggctcatgcctcgcaggggcctttgaaattgcactcgcgtgtgacatcaccatcgccgctgaagacgccaccttcggtgaaccggagctaaagttcggcgcgggcatcgtgacgatgctgctgccctggatgataggagccaagcaggccaaggagatcattctgtgcggcgtggacgatatctctgccgacgaagccaggcgcctaggtattgtgaacagggtcgtcgccaacggaaaacatctggaagaggccatcaaggtcgcacaaactattgcagtgatcgaccccagcctaatgaaagccaccaagaccgcgatcaacttgagcgtcgaggcgatggggctaaagggggcacttcagcaagccctggatatcgaccatgccatcgaatcgaaaggttcgccggacaagcgagccttcatggatatcgcacgagaaggtgggctcaaagcggcacttgcctggcgagatcagcgatttcagacaccagaaataccattgtttccgaacggccctctgcccgactctctggggacggctaatgacacatttcaagcaatggttcttcgcaaaggcccggagggcttcacatcgaatctcgagcaactgacattcgcagatctacccgaggaagacaccttagttcagctcgagtattccactctgaattacaaggatgcattggccatcacgggtacaggaccgatcgttaaaagctggcctttagtgccaggcatcgacttcgccggtactgtggtggagacatcgcatcctcgtttaaagcctggacagaaggtagtcctaaggaaactctga

SEQ ID NO: 345563 - DNA, 225 bp, Pseudomonas aeruginosa
gtgccctcgtccccggcggtggcggtgccccagttcccggcggtggcggtgccccagttcccggcggtggcggtgcccttgtccccggcggtggcggtgccctcgtccccggcggtggcggtgccccagttcccggcggtggcggtgccccagttcccggcggtggcggtgcccttgtccccggcggtggcggtgccctcgtccccggcggtggcggtgccatag

SEQ ID NO: 345564 - DNA, 912 bp, Pseudomonas aeruginosa
atgaacaaatccaccccattcctcaaatgggcaggcggaaaaagatggctaactgaaagccacattgaaattttccccaagaaattcaatagatattacgagcctttccttggtagcggggccgttttcttttctatccagccagaacactccacgctatcggatctcaacgtcgagcttattgaaacatacgacaccataaagaatgactgggaaaaagttctagcgcgccttgaactacaccacaaaaaacattctaaagaatattactaccaaattagaaatacaaacccaagaactccccacacgagagcagcccgattcatatatcttaaccgaacctgctggaacggcttatacagagtaaatttgaaaggggaattcaacgttccaattggaacaaaacagaatgcaatactacccacagacgactttgagtcactctcgaaaaacctccagaactctacattaataagcggagattttgagacaacaatagatctggcagcagatggcgaccttttgtttgttgaccccccctacactgtaaaacacaacttaaatggttttattaaatacaacgaaaagatattcagttgggatgatcaaatcagactaagtgaatgtctaaaaagggcagcaaagcgtgggtgcaaaatagtcgccacaaatgcttaccatccagcagtcaaagagctgtatgaggaagccttcaacacctacgctcttgatcgacatagtgtgattgctgcttcgccaacgtttcgcggccgttacgaagagcttttaataaccaccactgccatagaaaatagtgactacatcacaggctcaatgtgtaatagcgaggttcaatctatagataccctctctaggagccccgaaatatggggctgcgagggcaagcgatga

SEQ ID NO: 345565 - DNA, 1314 bp, Pseudomonas aeruginosa
atgaatcttagtacagttcaaaaaaatatcatcgcaatggcggaccccaccgctgtcgagcgcgcaattagcttagcgtccaaaaatttcgcaaacgatgaaatcgttgcaaacagcaacccatataaaatcaataccagcgatcaagtaaaaaccttagtaacaacggcagatggtccttacaccaaacccgagcttaatgaagtaatagcaacgtcaaccattctccacctttatgatggatggtcatacttagctgaggcgctcaaagcaagttatagaagtgaggctggaattgctcgacacttggcgtactacgcagagcttcgtgccgcaatgtccatactggctgcaagcggaataggtatttttaacaaccatcatgtcatattagattcaaacgatcagctaattgcaatccccggaaagatagcgactcatcaaattgcttggctagcattgcaagaatggggaacatttcactcatctggggtactccttggcaacgagataaacgctttcggaaatactctttccgaatggacccgagaattccaaggaacttcaactttcagcctaaccggggctgagtgggtaaacaactggggactcgacctcaatcagttctcgcaagatcgaaactcgcgaaacgaagtaagctacagagtcaacttcaactatctatcgccaagcaaaaacccaagcgaacttgcctccttcatctctgacctttggacaaatacagagccaggttcatcctcgtttgtattgcttgatcaattcttggttcgcagtgcattagaaaaaatttaccaatccaaagtaagatcacatctaggagaggactaccgctgcagaatagaaaatacctgcaaaaaactaggtgcagagaactacattgacttcctttgccgaaggatttctcccgatgatccggagataatcaagtacgcagggaagacctctggagtctacgatacccaccagtatctagaggttatatctcgatcatatttactactacgtatagcaaccgcctcaacgcgatctttgcttagaaactcatcaattagcattgatgacatctcgttttggtggacacacgtaggcacagaaagcggtctttggccaagatcaacacctccagcagatccgctggagacttgggacaacataaacctttctctagaagactttaacgaatggattcaggtcggaaacagtaactgctggcacgatcttcataaagatattggaacgaccatcaatagcctagcgagaacagaacttgctgcgctgtggggaattgcttaa

SEQ ID NO: 345566 - DNA, 1503 bp, Pseudomonas aeruginosa
atggccattaaagttcccgcaattaaagttcatcaatggaatgaagaatgggataaagttcaatggaatgctgatcgtcatagaagcgagcctcctaagttctttatggtcatgtcaatgaaagcagttgacctacgccgtctatctgcaatctatcgaagagcatcccaatcaggaacttcacgcgcagaagatcttggcattcagagacgccatgacaagcaacgctctcaggacattaaagagtttgtccagtttggctatccttactgcgatcttaaagtaagcgcaagagagagtctggaacatgaatcactacgaaaaccaggctggctccccacagggattgtaattaacatattaaaacctgacgatcgaagaaatgatcgatctctctcctcgcaagatcaaattataattaatgagaacggcaatcttgcagaaatatccttacccgaatcatacgagggtaaggagtgggcgccgcactcaattgcgccaattgaagttattgatggccaacatcgactttgggctttcgaagaagaggaagctaaccctgactttgaaatgcctgtgattgctttttatgggctagatataagctggcaagcctatctattctggtccatcaatatcaaaccagtgaaaatcaatgccagcttagcattcgacatgtaccctctcttgcgagcagaggactggctcgagaaagaaggacataaagtatacaaagaagcacgtgctcaagaactcgtagagacactatgggtacatccaaccagcccatggaaagacaaaattgatatgctggccactcctaacaatccatatgttaggcaagcatcctggataagaacaataattagcgccttcataaaaccaattgatctacgtaagagtagtggcgggttgtttggcgaaatcacaaatgccaaagaaaatgtcgtcccatggactcgtgcacagcaagcagccttcttaatctcaattggtcgaggtctattcgacaacctccaaaataacggctactcatgggcggagcccctaagccgagaagttacaccagatcttgttgatccaaccaacaacccggcaatgtttggcaaaaaaaccctacttaacagtgaccagggtattcgagcactttggctctgcgtgaacgatctattctcatgtaaaatccatgagtggcggctcctagaatgggaaccatgtgaagatatcggcgatgtgaccgaaaacgctgtaactcaagaaataaacaatctacaaagtcagaatatcggcaccttgattcacagcctaactagtagccttgcatccttcgactggcgaagctccacagcagatggactcagcgaagaagagcgcatgattagaaaaggattccgtggaagcggcggatatgtggagcttaaacgaaagttgcttgaacatatagttacaagtagcaccaatggagaaatcgcagatgctgcgatgactgcgctcaagtactaa

SEQ ID NO: 345567 - DNA, 198 bp, Pseudomonas aeruginosa
atgagcctgaatcgctacgagcacgaaaccatcaggcacaagatcgacggctacatgattccgtcgcgtgatcaagcgctggagactcgcgaacaacagttcgagcgcgccaaggcggaattactttggcaactaaatctccagattgaacaggtcgaaggcttcaccttcgccgacatgagcaagaaggtcagctaa

SEQ ID NO: 345568 - DNA, 432 bp, Pseudomonas aeruginosa
atgagccgctttgtctatgcgacctactgtgatgatgtacgtcttgaaattaacgggaaaacaagcctcataggcgtgtatgcagacgctatgttcgtgcagggcttcccgactaacctaatgaagctttgcgtggtggttaatgctttaacccctcctgacaggcccttcaacgggttcaaaatcagcgccctcttcaacaacaaggccattgctgagatggaggttccgcttgctcagcttcaagaggaggcttcaaaaaaccccgcgacgtcgtcaaagaacgtgcaagcacaaatgatctttgcccctcttgccatagaccagcccggcgagatgaagatccttttcacctcggatggcgagaccatcgagtccaacgcccttcaaatcatggtcgcaccagaaggcgcccctatcatcttcacctag

SEQ ID NO: 345569 - DNA, 762 bp, Pseudomonas aeruginosa
atgctagccggtatcagagacattcttgttattacgacgccgaaggatcaggacgcttataagcaggtgcttcgcgacgggagccaatggggtttgaacttgtcttatgcagcacagccatctccagatgggttggctcaagcgttgctcatcggtgaaagtttcctcgccggacagccctgcgcgctcgtgttaggtgacaacatcttctatggtgatggcctcggggccgagctgaccgatgcagcaacagccggtcatggagcgtgcctgtttgcctatcatgtacgcgatccggagcgttatggggttgtcagcttcgaccgcgagggaaaagccgtcaccatagaggagaaacccgcaaaccccaggtcaaattgggccgttacagggctgtatttctatgatggcaatgcttcgcagatcgccaaatcgataaaaccttccgatagaggtgaactcgaaataacatcagtaaacaatatctacttagaaaatggtttgtgctcggttgtcaggttaggccgaggatatggctggtttgatacaggaacacacgcttccttgcttgaggcaagtgagtttgtccgagtagttcaagaccgacaaaatctccaagtcgcatgccccgaagaaattgcctatcggaaaggctgggtgacgccagaggtcatcgagaaagccggaaatctactagcaaagacgaattacggccaataccttttgagcttggttcacgatgacagctacgccttgatataa

SEQ ID NO: 345570 - DNA, 402 bp, Pseudomonas aeruginosa
atgaaccagggagcacgtcagccagcggcgctatcggtcgccgcgctgagcgattgcctgcgccccgcgaacggagcgccctattcggttgagcgctatgtcgaggttcttggcctcagcgctaccgcgtttgccagccaggtcgctgcctatcgtcgcagccaaccagatgcggccagtgcatccgacgccgaggtggcgcaacatttcatcgcggatgccctgcaggtgatcctggctgtagccgagagcggggtcaccgtcgagcgggcgatcgcctggtttcgccgcgagcccttaccgatcttcgaacagcggaccgcggagcaactggtcggtcagggccaggtcgcgcaggtattgcagtttctggcctcctggcaagccgggagccagggatga

SEQ ID NO: 345571 - DNA, 231 bp, Pseudomonas aeruginosa
atgtttgtcgggttctaccccgtcaccccggcgcacctcaacgggcactccacatggccgatggagccgttgaaggaagtctgcgtagtaaaagacaaggccggcgagcgaggcctgctgttcaaggtggaaaacgacattcgctattcgctgcatccggcacgcgacccggatgacctactggtgatcaaggtgttgttctcggccgagtcggatctgcagcgacgctaa

SEQ ID NO: 345572 - DNA, 891 bp, Pseudomonas aeruginosa
atgaacctcaaaatgcttcctctggccttgagctttgcatgtgcagcagccagcacccaagctttcgcgggctctgaagcctctaaaccgcctgtcacatctcataaagtgaatttggagcaagtgcgtaacgcaacggtgaaaattacctatggcgatacgaccttcctaatcgatccaatgctggctaagaagggggcttaccctggtttcgaaaatacctaccgtagcaacctgcgcaatccattggttgacctgaccgagtcgccctctaaggttatctcgggtgtcgacgctgtcatcgttactcatacgcatctggatcactgggacgatgcagcacagaaagcgctgcctaaagacatccctttattcgctcagcatgaagaagatgctcagttgattcgctcccagggtttcaagaatgtgcgcgtattgacaggtgaagctgaattcggcggcgtcaaaatcagcaagaccggcggccagcatggcacagatgaaatgtatgccgtgcccgctcttgcaaagcgccttggcgaagccatgggcgttgtctttcaagcaccaggctacaagaccctttaccttgctggcgatactatctggcgtaaagaagtagaccaggccattgaaaaatatcaccctgaaatcatcgtgctcaatgctggaaaagcgaaaatgaccgggtacgagggatctatcatcatgggtgaagaagacgtacttcgtgcctctcaggttgcgaaaaatgctaaaatcgtcgcagttcatatggatgcaatcaatcacatgtccctgacacgcgaagaactgcggacctatataaagaaacaaggtatcgaaagtcgcgtagacattccagaggacggggcctcactggagctctga

SEQ ID NO: 345573 - DNA, 762 bp, Pseudomonas aeruginosa
atggccgtggttgcaatatttagccgtcagtcgctcagtgtacccagagctcaatatcgagggttggtgatcgcggcctttttcaacgtcaccatttggatgggattttcgacgctgtccatgcaatggctcagtgcaggacaaggtgcacagctggtctataccatgcccatctgggccgtactccttgcttggccaatcactggccagcgcccgacaccggctagcgtgctgggccttggactatgcctagcgggggtgatgatgctgctcggtaatgacaatgcgtcgctgggaatgagcaaggcactcggcgtcttctttgccctggcagcggctgtcctgtttgcactcgcaacggtggcgttgaagcagcctacgctgctcccgctggccaatgcggtttggcaactcggtattggtagcttgccaatgctagcgtacggctggcttttcgaaagcccggatttggcaagagtcactgctgtgggctggtcagttttcatctacatggtactggtgcccatggggatctgttacgtcgcgtggttttacgcgctaaaaaagctcccccccaccaccgcatccattagcactttgctaacccctatcgtgggtgttctagccggggccgcgatgcttggcgaacccatcggcataaatgaattctccgcattggcactgaccctgacaggagtcgcgtgcgccttgataaatcgcaggtcgcccgtaccactgagcgcaccagtacaaaaaccttag

SEQ ID NO: 345574 - DNA, 1494 bp, Pseudomonas aeruginosa
atgtctaacctaactcgtgctaactgggaacaacgtgccaaggacctgaagatcgaaggttatgccttcatcaatggcgaatataccactgcggcctcaaatgccacgttcgagtgcatcagtccagtggacggacgtctcctggcgcatgttgctagttgtgattctgtcgacgcccagcacgccgtggaaaacgcccgagcaactttcaattccggtgtttggtcccgcttggcgccagccaaacggaaggccactatgatccgttttgccggcctactcatgcagcacgccgaagaactggctctcttagaaaccctcgacatgggtaagcctattagcgactcgttgcacatcgacattccgggcgcggcgcaagctctgagctggagcggtgaagcgatcgacaaggtctacgatgaagtcgccgccactccgcacgatcaacttggcctggtgactcgcgagccggtgggtgtggttggcgccatagtgccgtggaacttcccgttgatgatggcttgctggaagctcggcccggcgctatcgaccggtaattcggtgatcctcaagccttcagaaaagtctccactgaccgccattcgcatcgctgctctggccgttgaggccggcattccgaaaggcgtgctcaatgttctaccgggctacggtcacactgtcggtaaggcgctggccctgcacaatgatgtcgatactttagcgttcaccgggtcaactaaaatcgccaagcagttgctgatctactccggcgaatcgaacatgaaacgcgtctggctggaagccggtggcaagagcccgaacatcgtatttgccgatgcgccgaatctgcaagcggccgccgaatctgccgccagcgccatcgcttacaaccagggggaagtctgcaccgctggttcgcgtttgctggtcgagcgttcgatcaaggataaattcctgccgatggtaattgaggcgctaaaaacctggaaaccgggcaacccactggatccagccaccaacgtcggtgctctggtcgacatacagcagatgaataccgtattgtcgtatatcgaatccggtcatcgcgatggggccaaactgatcgtcggtggcaagcgcatcctgcaggaaattggtggtacctacgtcgaaccaacgattttcgacggcgtgagtaatgcgatgaaaatcgctcaggaagagatctttgggccagtactttcggttatcgctttcgatactgcagaagaagcgatccagattgccaacgacacaccgtacggcttggccgctgcggtatggacacaggatatctccaaggcgcatctgaccgctaaggcactacgcgctggcagcgtctgggtcaatcagtactccggcggcgacatgaccgctccattcggcggcttcaagcagtcgggtaacggtcgcgataaatcgctgcacgcgttcgacaagtacaccgagctcaaatctacctggataaagctttaa

SEQ ID NO: 345575 - DNA, 1236 bp, Pseudomonas aeruginosa
atggagttgccttatcgcctgcacctgggcgactgcctgcaggtgctcaaaacatttcccgacaacagcgtcgacagcatcgtcaccgatccgccgtatgggctgagcttcatgggcaaccgctgggactacgatgtgccagcggtcgaggtctgggcggaatgcctgcgcgtgttgaagcccggcggctacctgctgagcttcggcggcacgcggacctatcaccggctcgccatccggatcgaggatgcaggcttcacgctgcacccgatgatgggctggctgttcggctccggcttcccgaaggcgacgcgcgtcggcctggatggcatggaaggctggcgctacggcctgcaggcgctcaagcccgccatggagccgatcgctttcgcgcagaagccgttcagcgagaagaccggcacggccaacatcgagcgctggggcaccggcgccgtcaacatcgacgcgtgcaggatccagaccgccgagaacctgaacggcggcgcgtatgcgaaggacggttgccgtgccgccctggccggcgacgagcgcgccggcgcggcccaggggatgttccaggcaggaaagaccactggacgttacttcgagcagcctgcgggccgctggcctgcgaacctggcgcacgacggaagtgccgaagtgctggcgatcttcccagccgaggcaggccaagctgcgccgctgacgacccgcaacagcgacaagacccgcaacaccttcggcgccttcgcggacaccgaggacgcgaacttcgcgccgcatgatcgcctgggcagcgccgcccggttcttctactgcccgaaggcaacgcgcaaggaccgcaacgatggctgcgaggacatgccggcgaagccgctgcactggtcgagcggcgatgcgaaccccggaagtttccagaccgagggcacggacaagacgagcccgaacaatcatccgaccgtgaagccgacagcgctgatggcctactacgtgcgcctggtcacgcctccaggcggcaaggtgctcgacccattcacgggcagcggtagcaccggcaaggctgcggtacgcgaagggttcgagttcgtcggcatcgagcgcgaggctccctatctggctatcgccgaggctcgcatcgcccacgaactggagcgcgtcaccgccgctgcaatggaaacagcagaggcagaggcgcagctcgatatctttagagacgccaaggagcaaatcgcatga

SEQ ID NO: 345576 - DNA, 510 bp, Pseudomonas aeruginosa
atgagtgaggtatgcgcaaagcacgtcaagacgcctgctttcatctacggcgcttgcatcggatgtgaactcgaaggtctgagagccgaggcccaggcgctaagggaggaagtcgcagcactgcgcgcaagggtggctgttgtgccggagcgaaaactcctaaatgccggagtcccagggctgaatcgtaatagcggctggaacgcctgcctcgacgaactggcgcgcatcaacggtatgacggtcagcgaggggcttgtgcaggggatggccaagttcgcgcgcgagatcatctgcggagccctcgagggcggtagtttcgatggggcagaaatacaggaaagcgctgaacgccatgggctgatcgccaagcaggtgatgaacgagccgtgccgcggcccagaagagtactgcgcctgcgcctggtctacctcgttcccggctgaatgctgtcgggtaacgccggaactccgcgccctgctgagcgagcaggaaggagggaagcaatga

SEQ ID NO: 345577 - DNA, 498 bp, Pseudomonas aeruginosa
atggacttcaaagtattgctgggggcggtgatgctggcgggcctgtcggtggccggatgctccacgaaaaactatggccgacagccggaactgaccgatttcgaacggcagaccatgagctgtcgcgagatcgacttggagcaggccaaggttcagggcttcctgagccatgtacgcgaagagagcgagttcgacggacgctcggtgctgtctttcctgggcgacttcgggatcggcaacctgatggagaaggacgcagcggtcgacagtgccaatcagcgcctgacccagttggcaggtgccaagatgcagcgtggctgcacctatgcctatgaggagccggctcaacagccgtacgcagcgcctcgggcttatgccccaactgcacccgcgtcagtttcggctcgatctgtcgacacccaactcgacgagctgaaccagatgcaactcccttacgaggagtaccaacggcggtatcgggaaatcacggggcaatga

SEQ ID NO: 345578 - DNA, 231 bp, Pseudomonas aeruginosa; identical to SEQ ID NO: 326738

SEQ ID NO: 345579 - DNA, 231 bp, Pseudomonas aeruginosa; identical to SEQ ID NO: 330374

SEQ ID NO: 345580 - DNA, 1383 bp, Pseudomonas aeruginosa
atgcagacacagtgtaatccgaagcagtacacgttttcaggggtggggcggcgcgcggtggtagccggatttgatggcggtcgggtgagttcggatggcggcgcgttgctgctcaaacaaaccgatgaagcggtggggttgttcgatcgcctggccggctgtttccaggacgatcggatgcccgaggcggtggagtttccgctgcgcacgctggtggcgcagcgggtgatgggcatcgcgctgggctacgaggatctcaacgatcacgagcaactgcgccacgacccgctgctgggcgcggtgatcggcaagctgcagtccggacgtgcgcgctgtgcgcccttggccggcaagagcacgctcaaccggctggagcgcttccaggcgcagggcagttcgcgctatcacaagatccggccgcaggccggcatgatcgaggatctgttcgtcgatctgtttctggacgcccaccgcaggccgccagaggagatcatcctggatctggatgccaccgacgatccgctgcatgggcagcaggagggccggttctttcacggctactacgggggttactgttacctgccgctgtacatcttctgcggccgtcacctgctgtgcgccaagttgcgcccggccaacgtcgatggcgccgccggggcgctggaagaggtgcaacgcatcgtcaagcagattcgcgcccgctggccagacacgcgcatcgtgctgcgcgccgactcggggttctgccgggatgacctgatgacttggtgcgaagcacagtcggtcgattatgtcttcggactggcgcgcaacgcgcgcctgacccgggccatcggcccgagcctgcggcaggcccaggcgcagtgcgaagcgacgggagtcccggcacgggtgttccaggaactgcactaccgcacgaggaaaagctggagcgccgagcgccgggtggtggccaaggccgaggccttgccgggcaagaccaacccacgcttcgtggtgaccacgcttgcggtcggggactggccggacaaggcgctgtatgaggatctctactgcgcgcgcggcgagatggagaaccgcatcaaggagtgtcagctcgacctgttcgccgaccgcacctccaccgcgacgctgcgcagcaaccagctgcggctgtggctgtcctcgttcgcctacgtgctgctcgaaagcctgcgcaggctggcgctgtcggggaccgaactggcccaggccacggccggtagcatccgcctgaagctgctcaagatcggcgcggtcatcaccgtgagcgtgcgccgggtcaaagtggccatgagttcggccttcccgcagcaggaggtgttcgatcacgccttcgatgtcttgagcgccgcggcgcgctga

SEQ ID NO: 345581 - DNA, 675 bp, Pseudomonas aeruginosa
atgatttacgaaagcgtttcaagtgcagtcgtttcggcgctggcagcggtctgcatcgacaacacaagcaagcaggcttggcaaaagctctatcaggccggcgagtctggtcgtcgtggtggggtaatggtatccgctgatctcaggcagcaaatcgattgctgggtgcatgctcgcttgcatgatcagctcattccgcgtcactgggccgctctggtggcgaagtacagcacccatcaggcaaagaaagtccaggcgatctcgcttttgcggtcggtggtcgcaacgccggcgcctgctcttttcctctacaaagctataacgacctgggcgattccgaagctgaagggggttcagccggcgttgcggaaaaccgtatctgtcgaaatcccggtggatggatcaccagaaaagcaggcgcgggcagtacgcgccgcattggaggcggagcgggtcaagcggaagcgtcttatggctcgatcgtctggaatgatcgtcctgccggatgagttctacgacatgaacacctgggatctcgatggaaagccagaatcgactcggcgtgaatggcgcaggaagatccatcgtgttctcgacgaaatggtcgaagaggcgctggtggcggcggagcagattcttaacgcggagggcttgctggccaaggatgcggcatag

SEQ ID NO: 345582 - DNA, 630 bp, Pseudomonas aeruginosa
atgaagcgcctgctcaccctcggcctgctgggcctgctgagcgcctgccagccggccttcgcgacggatcgcatccccactgccgccgagcaataccggcgcaccctggtgcgcagcgcccatgccgaatggggcctgtcggcgccgatcgccacctttgccgcacaggttcaccaggaaagccgttggcgtgctgatgcccgctcgccggttggtgcccagggcctggcgcagttcatgcccggaaccgcggagtggatcgccggcctgtatccggccgccctcggcaccaatcagccgttcaatcctggctgggcactgcgcgcgctggtcacctacgaccgttggctctacgaccgaaaccaggcctccagcgagtgtgatcgctgggcattcgtactgtccgcttacaacggcggccaggggtgggtaaatcgcgaccgtaggctggcctcggcatccggcgccgaccagctggcctggttcgattccgtcgagcgcttcaattccgggcgctcggccgccaacttccgcgagaaccgcaactacccgcgcctcatcctgctgcgctacgagcggatctatctgcagtggggcgacggtgtgtgcggagagaggtacaccctgtga

SEQ ID NO: 345583 - DNA, 387 bp, Pseudomonas aeruginosa
atgcacgcaaccatcaactgcggcggatggatcggccgccagggcctcggcctggctccccgcgaactcgaagctaccgcctggagcgccagcgaactgacagcaaaggaagtcgcgcggcgcatgggtatcgccccagggaccgtcgagaaacgtctcgacgacgcgaaattcaagatgggtgtgcgcagcgtgcgcggactggtgcttgaggcgttccgacgcgggatcatctcgccggccgtcttcgtgctcgcattcctcgtcgccggccacccgctgatcgatgacgaccacatgaacaggacccgcaggccgagcaacgagcgacgaatcaccgaagcccgcaccgttcgccggatcgacgaaatcactatcaacgcgtag

SEQ ID NO: 345584 - DNA, 315 bp, Pseudomonas aeruginosa
atgagtgctgaaaagtaccgctccgagcaggtccagcgcgctctacgggtcatgttggccctgggggccaacgagtttcggggactgctcctgaaggaggtggcggtcgccgccgagtgcgatgcgagtaccgcgctgcgcgccctggagaacctgcgcatcgccggtatagccgaccgcagcccgcatgacgacaagcgctggctgctcggaccgcgcctgatccagttggcctttggcttcgacgaagccctgcgccgcagccaggacgaactcaacgagcgtcgccaacgctacacccgtctcccgaactaa

SEQ ID NO: 345585 - DNA, 123 bp, Pseudomonas aeruginosa
atgctctggctcaagtccaactaccccgacggagtgctggaggaccagctcgacagcatcgtcgagcagttgcaggcggcgcccagccggcccgcgctgcgcgttgtgggaggtaactcgtaa

SEQ ID NO: 345586 - DNA, 123 bp, Pseudomonas aeruginosa
atgctctggctcaagtccaactaccccgacggagtactggaggaccagctcgacagcatcgttgagcagttgcaggcggcgtccagccggcccgcgctgcgcgttgtgggaggtaactcgtaa

SEQ ID NO: 345587 - DNA, 519 bp, Pseudomonas aeruginosa; identical to SEQ ID NO: 291769

SEQ ID NO: 345588 - DNA, 831 bp, Pseudomonas aeruginosa
atgcaactcgcatcccgattcgcttcccgttccccctcgctgcgcagcgactacccgctgtccgatgaccagattcaccgcgtagcgccgtccatcttcgcggacgcgccgcatgaaagccgttcgcagcggtacgcctacatccccaccgctgccgtgctgaccgagcttcgcaaagaagggtttcaacccttcatggtgacgcaaacccgcgtgcgcgacgaaggcaagcgcgagcacaccaagcacatgattcgcctgcgccacgccagccagatcaacggcgcggaggccaatgaaatcgtgctgctgaactcgcacgatggcacgagcagctatcagatgctggccgggatgttccggttcgtgtgcagcaatggccttgtgtgcggcgacaccgtggccgatgtgcgcgtgccccacaagggcgacgtttccgggcacgtcatcgaaggcgcttacgaagttttgcgcggcttcgaccgggtgaaggattcccgcgatgccatgcgcgcaatcacgctggacgaaggcgaggccgaagtgttcgcccgcgccgcgctggccctcaagtacgaccccaccgacaacaagcccgcgcccatcaccgaatcgcaaatcctgatgccgcgccggttcgacgaccgccgcccggacttgtggagcgtgttcaaccgcacgcaagaaaacctgaccaaaggcggattgcatggccgcagcgccaacggacgccgccagcaaacccgcccggtgcagggcattgattccgatgtgcgcctgaaccgcgccctctggatgctggccgatggcctgcgccagttgaaagcctga

SEQ ID NO: 345589 - DNA, 174 bp, Pseudomonas aeruginosa
atggcgaagaccatcagtacgaagtattccgccggaccgaaggcgatcgcccacttggccagcagcggggcgaacaggaccatcccgcaggtagcgatgaaggcgccgatgaaggaactccaggccgacagcgacagggccacgccggccaggcccttgcgtgccatcgggtag

SEQ ID NO: 345590 - DNA, 3363 bp, Pseudomonas aeruginosa; identical to SEQ ID NO: 341661

SEQ ID NO: 345591 - DNA, 957 bp, Pseudomonas aeruginosa
atgcgcgcacgtgaactcaagcgttggctggcagaagcggaacggctgacaccggcccagcaggagcaggttctggcaaagctgcagggccagcggtctcaggggctggtggcgcgtttgctgtccgatcgcgtcccgacgaagtgcccgcattgctcggacactcgtatcgttcgtcatggtcaagccgctggcgttcagcgcttccgctgccggggctgcgggaagacgttcaacccgctgaccgggacggccatggcgggtttgcggtatcggaaccggtggctgcatcaggctgaggcgatggaggcgggcttgagcgtccgcaaagccgcagcccgcatgggcgtgcatcggacgacggctttccgctggcggcaccggtttctggtcgtggcccgggagaccaaggatcagcatctgggcggcgtggtcgaagccgacgaggcctacttcctgcgctccttcaaaggccaacgccagcagctggccgcgcacggtggtggtcggcgtccgcggcagcggggcggttgcggggccaagcgcggcttgtccgatgagcaggttccggttctggtggcacgcaatcgcagcggccagatgaccgaccacgtcctgagttcaggcaacaagcggggcttgctggccgtcctgccgaccgccatcgcgtcggatgcggtgctgtgcaccgacggcagcgccatgttggcaagtgcggcaagggatctgggaattgagcaccacgccctgaacaccttgcgcggcgagcgcaagcgaggtgcgtggcatgtccagaatgtcaatgcgcaccacagccgactgaagggctggatggcccgattccggggcgtggcgacgtcctatctgccgaactacctggggtggttccgggcactggagcggaatgcccaagtcggcgcaggacccgcgtcattgctcaggttggcgatgacatga

SEQ ID NO: 345592 - DNA, 1974 bp, Pseudomonas aeruginosa
atgaccgaccgccgcgacgacgatttccgcatccgccccagcgccccgaagaatcggggccagggcttcgtctccaaggtgctcaagcaggcagacaaggccagcgccggcaagtcctcggtgcgccgttcggcgtcggcgcatggcaccggccagcggcccggctcgcgcctggggcgcggccacacggcggcgcgcttcgcgggggcgaagctgatgcccatgtcgcggcgcgtgaccatcaaaacgctgctggtcaaccagcgccaggccagcccgcagtcgctcgccaagcacctgcgctacatcgaacgcgacggtgtgggccgcgatggcgagccgggccaagcctacgggccgcaaaccgatgccgccgacctcgacgccttcaaggaacgctgcgccgacgaccggcaccatttccgcttcatcctctcgcccgaggatggcgcggagctggaagacctgcgcacctacacgcggcacctcatgggccgcatggaggccgacctgggcacgggcctcgattgggtggcggtcaaccactggaacaccgacaacccgcacacgcacatcgtcgtgcgcgggcgcgacgacaccggcaaagacctcatcatcgcgggcgattacatcgccgatggcttccgccatcgcgccgccgagctggccaccgaatggctggggccgcgcaccgagctggagatccagcagaccttgcagcgcgaggtggagcaagagcggtggacgagcctggatcgcaccctgcaacgcgaggcaggcgagggcggccgagtgcagatcgaacgcttcaacgaaccgcggctgcaatgccagcgcctgctgctgatcggccggctgcaacgcttgcagcgcctgggcctggccgacgaaatgcagcccggcacctgggccgtccatgccgacgccgaaaagaccctgcgcgtcctgggcgagcgtggcgacatcatccgcaccatgcagcgggccatgcgcggcgagccgcgcgagctggcggtgttcgagccgggagacgacggccgaaccatcctcggccgcgtggccgcgaaggggctggccgacgagctgcgagaccggggctatctggtcatcgacggggtggatggcaaggcccactacgtcgcgctcaacgcccgcgacgagctggcgaactacccagccggtgccgtggtggaggtgaagggatcggccgacctgcgcgccgccgacaagaacatcgccgcactggcgagcggtggcctgtaccgcaccgatcatcacctcgccatcgcgcagggtcaggccgtaccgggccgcgatccgcaggaagtcgtcgcggtccacgtccgccggctcgaagccctgcgccgggccggcatcgtggagcgcgtggccgaagggctatggaaggtgccggacgacctggccgagcagggccgccgctacgacgcgcagcgcctgggcggcgtggccgttgaactgaaatcgcacctgcccatagagcggcaggcccgcgtgatcggggccacctggcttgaccagcagttgatcggcggcggctcgggcttgggcgacctgggctttggcggcgaggccaaacaggcgatgcagcagcgcgccgacttcctggccgaacaggggctggccgagcggcgcgggcagcgcgtaatcctagcccggaatctgttgggcacgctgcgcaatcgggaattggcgcaggccgccaaggacattgcggccgaaaccggcttggagcaccggcccgtgtccgacggccaacgcgtggctggcatctacaggcgttccgtcatgctcgctagcgggcgctacgcgatgcttgatgacggcatgggattcagcctggtgccgtggaagccggtgatcgagcagcggttgggacaacaactcgctgcgaccattcataaaggatcggcttcctgggaactcggaattcgtcgaggtatatctattggatag

SEQ ID NO: 345593 - DNA, 621 bp, Pseudomonas aeruginosa
atgcacctgcccttctggcgacggctccctcgtccatccgtgcccggcacatcctgcggtagatcaggcagacgtagctgccaagctgaccttcatcaacggaaggcccgccatgtgcgggtgccaagtggaatacagcgacggcggaggcgagtactccgacgtaatctacgtgacgctgtgcgccaagcactctggcagcgcgattctggatctggtggcgaccaaccgaatcgcactgacgccggagtacgaaggccagtggcacgccgacctctacctggatcgggagattcctcttgcgaaggtcgagggcgcgacgccggccgaggcggtccttgccctcatgtcggcagagcgcatcgaccccgaacaggaatcggtagagcaggcaggcggggaacggcgggatgcccttcagtcaattatggaatggacggcagcagagaacattccggacgaccgcaagctgtgcctgatccgcaacgcagcccgcgccgccctggcgcaaccctccccggcgcatgccgagcaggcagaggcggagcggccggaggttgtggcgtacttcgaccgaaactatccaagcaccggcgatgccttcatctggtcgaactatga

SEQ ID NO: 345594 - DNA, 360 bp, Pseudomonas aeruginosa
atgaacgaccgcacactactcgaactggcggcgcgggcggcggggatgcagatcaatgagcagcgtcaagccgaacgtgattccatagtcgatccagcaaaagccagcctttggattgtcgatgggtgtacggcctggaacccacttatcgaaagccaccacgcgtttattctggcggtgcagcttcgcctggacattacgttctacaacggatttcaggaggtggccgccgagccatcaaatggtgacgggatgaacccttgccaggaggtgttcacagaaaacccgtatgcggcaactcggcgagcaatagtccgcgccgccgccgagatcggcaagtctatgggaggtggggagtga

SEQ ID NO: 345595 - DNA, 756 bp, Pseudomonas aeruginosa
atgagcgccgcctgggtccggccgttccgcctgacgccgatgccgcgcctgcgcctggcctgcttcccccatgcaggcggcagcgccagcttcttccgtagctggagcgaacgcctgccgccagacatcgacctgcttgccctgcagtacccgggtcgcgaggaccgcttcaacgaggcgccgaccacccgcctggaggacctcgccgacggcgccgccctcgccctgcgcgatttcgccgacgcgcccctggcgctgttcggccacagtctcggcgcggcgctggcctacgaaaccgccctgcgcctggaaagcgccggcgcgccgctgcgccacctgttcgtctccgcccatccggcaccgcaccggcaacgcggcggcgcattgcaccgcggcgacgaggcggtgctgctggaggacgtccgccgccaggggggcgccagcgagctactcgaggacgccgacctgcgcgcgctgttcctgccgatcctgcgcgccgactaccaggcgatcgagacctaccgacgggcgcagcccatcgccctggcctgcgccctcgacgtcctcctcggcgagcacgacgaggaagtcagcgccgccgaggcgcaggcctggagcgacgccagccggactcccgccaggctgcggcgctttcctggcggccacttctacctgagcgagaggcgcgacgcggtgatcgagcacctgctgcgccgcctcgcacatcccgacgccctttcccgagaggttgcatga

SEQ ID NO: 345596 - DNA, 639 bp, Pseudomonas aeruginosa
atgatcgtcgctctgctcaaccagaaaggcggcgtgggcaagaccacgctcgccacgcacatcgccggcgaactggcgatgcgggggcaatcggtcatcctgctggacgccgacccgcagggttcatcgctggactggacgcagcgcagaagccagcaaggcttgccacggctgtttagcgccgtgggcctcgcacgcgaaacgctgcatcaggaggcgccagaactcgccaggcgggccgatcacatcgtcatcgacgggccgccgcgcatcgcggcgctggcgcgctccgcgctgctggcggccgagcgcgtgctgatccccgtgcagcccagcccttacgacctgtgggccagcgccgagatggtggcgctgatccgcgaggcgcaggtgtttcggccgctgctccgcgcagcctttgttatcaatcggcgcgtcagtaccaccgtgatcgggcgcgaagcgcgtcagacgctcgccgaccagccgcttcctgcgctgcgcgcggaagtgcatcagcgcatcgtgttcgccgacagcgtggccgctggtcggcttgcacgcgagacggcgccggacagcgccgccgcccgcgaaatcaccgcgctggtggacgaactgctgcggtggccgacatga

SEQ ID NO: 345597 - DNA, 570 bp, Pseudomonas aeruginosa
gtggccgcggaagcacacgagagccacaagctcgaaaagctgtgccgctacatcacgcgcccggcgatcagcgagaagcggctgtcgatagcgctccagggcagggtgcgttaccagctcaagaccccgtggcgcaatggcaccacgcatgtggaatgggatccggtggatttcatcgccaagctggcggcgctggtcccgccacctcgcgcccacctgacccgcttccacggggtgtttgccccgaacgccgccctgcgcgcacagttgacgccatcggggcgcggcaggcggcatgacgccgctgtggagccggcggacgcaagcgcgaacgacgcgccgcgcagccccgagcagaagcgccgtgcgatgagctgggcgcaacggctcaagcgggtcttttccatcgacatcaccacctgcgcccactgcggcggcgcggtacggatcgtcgccagcatcgaggaacccaccgccatccgcgccatcttcgcccacttcgagaagcacggcgcgctggagcaagcgcactaccggcccgcagcgcgcgcgccgccgccggccgcgtga

SEQ ID NO: 345598 - DNA, 813 bp, Pseudomonas aeruginosa
atggatgaatacagggaagtaaactgcgcagcgatgccagtgccggcgggtttatcggaagaagtgaagggatatgcgtgggcgcggaataatgtcggtgagtccgggggagtagtatatcggctctacggcaaggcgggtgcacccgatctcttcctgaagcatggtcgggataccgttgccagtgacctcctggatgagatggttagactgcgttggatggccaaccacatagaggttcccgccgtcacgcatttcgtcagcactaccgacgaagcctggctccttatgacggccttggcaggtgaaaccgcatatcaggccctggaagcgcgtccagatgagagaaagaccattgttgacgcgctggcagacttccttcggacgctacatgcaattccgatcagcgaatgtccatttaccagcgatcatagctatcgactccgactggcgcgcaaacggatcgacgccggcttggtcgaagaagacgatttcgatgaggaacgcgaaggctggacagcagaacaggtttggcaggaaatgcatcggcacctgcctttcatggccgatcaggttgtcacacatggggacttctcgctcgataaccttcttatggtggatggtgtggtaatcggctgtatcgacgtaggccgtgtcggtattgccgaccgctaccaagatttggcgatactctggaactgcctcggagagttcgatgaggctttacaggacaggtttctcgcccgttacggcgttccgaagccagatccaagcaagctgcgattccacctgatgttggacgagcttttttga

SEQ ID NO: 345599 - DNA, 258 bp, Pseudomonas aeruginosa
gtggatgacgaagcgccaaccggcgacacgataaccgtctatgacgaacggcattacgtgacctatctgcgccttctcgacgcgaaggccgagggcgcggactggaaggaagtcgcgcagatcgtgctgcaccgtgatccggtcgccgatgaatttcgcacccgccgttgctggcaaagccatctccaacgcgcgcaatggctgtcgcgtaagggctatcggaagattctggagcaggcggtagccaacaagctatga

SEQ ID NO: 345600 - DNA, 537 bp, Pseudomonas aeruginosa
atgcttcgtccgctccgcgccctgtccctcgccttcagccttgccttcatcgcgtttgcaaccggctgcagcaggaacgattccgcgcctgccgcaacggccagcctgccgccgctggtcaccgccggcacggtggaacaggtgtcatggcaggacgaaatccaggccctgggcacggcgcgcgcgaacgaatcggtgacgctgacggccaaggtcaccgagaccgtcacccggatcaacttcgacgatggcgatttcgtcgaagccggtgccgtgctggtggatctttccggccgcgccgaagtggcgcagcttgaagcggcacaggcgaccttcgtggaggcgcgccaacaatacgagcgcctggccgagctggtgaaacagggcacgatcccgcgcagtcagctcgatacccagctctcggtacgcgatgccgcgcgcgcgcgcgccgacgcgatccgcgcggcgctggccgaccgctcatcgcgatcctggccgacaagctgccgcccgagcagcgcgaccgtgcccgcgtga

SEQ ID NO: 345601 - DNA, 252 bp, Pseudomonas aeruginosa
gtgatcggtctggcgctggcgctgggcatgcgcctggtgctgctggccgcgctgtcgtggatcatgcggctcaccacgccgctgttcgaggtctggggccatccgttctcggggcgcgacctgatcctgctgggcggcggcctgttcctgctgttcaaggccacgatggagctgcacgagcgcctcgaaggcgtgcagcacgacgcccagggcagccgcgcctacgcgtgccgggcggcggcgtcgccctga

SEQ ID NO: 345602 - DNA, 411 bp, Pseudomonas aeruginosa
gtgccgggcggcggcgtcgccctgatccgcgccaagaccgcgatcgctggcctgaagggcatcaacgaggaccagaaccacggtatcgccatcgccctgcgcgcgatggaagcgccgctgcgcgaaatcgtccacaactgtggcgaggagcccagcgtggtgctgaaccgcgtcgccgaaggcaaggacaacttcggctacaacgcggccaccagcgagtttggtgacatgatcgagatgggcatcctggatccgaccaaggtgacccgttctgccctgcagaacgccgcctcgattgccggcctgatgatcaccaccgaagccatggtggccgagctgccgaagaaggaagccccggcccacgaccacggtggtggcggcatgggtggcatgggcggtatggacttctaa

SEQ ID NO: 345603 - DNA, 840 bp, Pseudomonas aeruginosa
atgcagcgagaagccgccgaccttgccggcatcgccctccagcgagcctgcgtcaccgggcaatgtttgcagcgtgacgaccttgcggccagcgtcgcgaccggtggcgatgcggtaggtcatcgaactcatccgcagcccatccatgccgtcgtcgctacccgcgctgtcggacaggaacacggattcgtcttcgccttcgagccagccgcggcgcgacaggtgccggcacacgcgatgcgcgatggtgttggccagttccgtcagttgcgccgatgtgggcgcacgggtgcggtgcaggcgcggcttgcgctgcggacgctcggtggtgtcctcgtacacgccgtcgagccacagcatgtggaagtgaacattcaggttcagcgcgctgccgaagcgctggatcagggtcaccgcaccgcattgcgccgtatcccgcggcacgccggcctgatcggcaagccaaccggcgatcacacgatgcacgatgcccagcaccgggctgatggcctccggcttgctggcgaacaggaagcgcaacgggtaggggaaactcagcacccattgccgcaccggccgcgggccgaacacctcgtccaccagatgccgcgccgactcggccatgcgccgtgcgccgcagctcgggcacagcccgcgcttcttgcaggaatacgccaccagcctctcggcacgacagtgctcgcagaccacgcgcaggaagccgtgctcgagcacgccgcagcgcaggtaggtctcgaactcctcgcgcacatactcgggcagcgggcggtcttcggcctcaagacgcgcgatgaagtccgggtagtgcgcctgcactag

SEQ ID NO: 345604 - DNA, 810 bp, Pseudomonas aeruginosa
atgagccacagcgcccctccgttgacccgcgccgacatggccgaggcgctgcgagccctgggcgtggcgcccggcgacgcggtcatggcccacgcagcgatgagccggtttgggccgatgctgaacgggcccgacgccttcatcggcgcgctgctggacgcggtggggcccgagggcacgctgctgtcctacgtcgattgggacggaaaccatcatgacctgctggatgcggacggccgcctgcccgacgaatggaagccgcacgtgccgccgttcgatccggcgacctcgcgggcggtgcgcgacaacggcgtgctggcggagttcgtgcgcaccacgccgggcgcgcggcgcagcggcaatccgggcgcctcgatggccgccctgggcgcgagagccgactggttcaccgccgatcacccgatggactacggctacggtcccggctcgccgctggcgaaactggtgcaggcgcgcggcaaggtgctgatggccggcgcgccgctggacacgatgaccctgctgcaccacgccgaacatctggcggacattccgggcaagcgcatcctccggcaggaaagccccatcctggtcaatggccggaccgagtggcggatgatcgaggagttcgacacctcggacccggtcgtggacggcctggacgaggactatttcggccagatcgtcaccgagttcctggcgacgggacagggcggaaccggccggatcggcggggcttcggcggtgctggtcccggcggcggaaatctgcgccttcgcggtctcgtggctggaacgccggttcggttga

SEQ ID NO: 345605 - DNA, 444 bp, Pseudomonas aeruginosa; identical to SEQ ID NO: 329285

SEQ ID NO: 345606 - DNA, 579 bp, Pseudomonas aeruginosa
gtggccgcggaagcacacgaaagccacaagctcgaaaagctgtgccgctacatcacgcgcccggcgatcagcgagcagcggctgtcgatctcaccgcagggtagggtgcggtatcagctcaagacgccgtggcgaaatgggaccacgcatgtcgaatgggatgcggtggacttcatcgccaagctggcggcactggtcccgccacctcgcgcgcatctcacccgcttccacggcgtattcgccccgaatgcaaacctgcgcgcgcagctgacgccctcggggcgcggcaggcggcctgcgggcgatgcggcgccggttgacgcaagcgcccacgacgagccgcgcagccccgagcagaagcgccgtgcgatgagctgggcgcaacggctcaagcgggtcttttccatcgacatcaccacctgcgcccactgcggcggcgcggtacggatcgtcgccagcatcgaggaacccaccgccatccgcgccatccgcgccatcctcgcccacttcgagaagcacggcgcgctggagcaagcgcactaccggcccgcagcgcgcgcgccgccgccggccgcgtga

SEQ ID NO: 345607 - DNA, 873 bp, Pseudomonas aeruginosa
ttgctcggcgaagccgaacacgacggcagcggccggaaactgcgagcccagtattacctgtggctggacagcctgccgctggccaccatcgacgccgactacgacgcccagggcaaggtcggcaacccgaccctgctctacctccatggcgaccacctcgacaccccgcgcctggccaccgacgccagcggccagatcgcctggcagtggcagtccgacgccttcggccgcggcgaagcgctgagccagggcagcacccaggtcaacctgcgcttccccgggcagtactacgatgcggagagcgggctgcattacaactacttccgcgactatgatccagagactgggcggtatgtggagagtgatccgattgggttggtaggaggattaaatacatatggatatgtagagggaaatccactcggactttcagatccactaggactggctccaggggatatgtttgcaacagaggctgcggcacgagcagatgctcttgcttatcaggagtctgtgaacagtagcattgatagatggctatgggggaatatggtctatggcttccgtgtgtttaaaacctccgattgcctttggacctacgaagtacagaccccagtcttgggaattgcgcctccacttggccccaaaggtccttggaaagtcaacaagccaggagtttcaggaaaggcaggagctaaagacgttccaagctgggcaaaaggggataggccatatcaaggcgaatcagggaaagactttgccaaacgcatcatggatcaaaaatatggcaaaggtaactggaaagacggaccaggctctgaatacaaccagatcaaaaagtggggtgacagatcgttcatagaccccaagtaa

SEQ ID NO: 345608 - DNA, 162 bp, Pseudomonas aeruginosa
atggggaatagattcctcattgcgaaatatgaaatctcctacgcccgtcccttccgcggcgccccaccgccccggggaatcggtatcatgggcgccgcccgcgccaccgcagcgcggaccgaagcctatggatcaaccgtggtgaggagaccgagccgttga

SEQ ID NO: 345609 - DNA, 1200 bp, Pseudomonas aeruginosa
atgtgcctggacgacccgacccattcccgacgtgacatcctcaagctcgccgcgctgctcagcgccgccggcgcgttgccgctgctgagcagcctgcaggcgcgcgccgccgccgaacccgacgcgccggtgcgcatcggctacctgccgatcaccgacgccacgcccttgctggtggcccatgccaacggcctgttcgaggccgagggcatccaggccgaacggccggtgctgttgcgtagctgggcgcaggtgatcgaggcgttcatctccggccaggtcaacgtcatccacctgctgtcgccgatgaccgtctgggcccgctacggcagcaaggtgccggccaaggtggtggcctggaaccacgtcggcggctcggggctcacggtggctccggagatcgccgacgtgcgccagctcggcggcaagagcgtggcgatcccgttctggtactcgatccacaacgtggtgttgcagcaactgctgcgcgacaacggcctgcgcgcggtgagccgtgcggtgggcgcggcgctggccgctgacgaggtcaacctggtggtgctgccgccttcggacatgccgccggcgctggccagcaagcgcatccacggctacatcgtcgccgagccgttcaatgccctggcggagaacctcaaggtcggccgggtacagcgcttcaccggcgatgtctggcgcaaccacgcctgctgcgtggtgttcatgcacgaacacgacctggagcggcggccgcagtggtcgcaaaaggtggtcaacgccatcgtcaaggcccagctatggactcgcgagcaccgcgccgaggccgcacagttgctgtccaaggccggagccaaccgctacacgccgcacgcgccggaggtcctcggccgggtgctggcgccgggcgccgaggagcagcaggcctatctcgccagcggcgcgatccgccacgccgactggcaggagcggcgcatcgacttccagccctatccctatccgagctacaccgaggaactggtgcggcggctgaaggacaccctgatcgaaggcaataatgccttcctcgccagcctcgatccgcgccaggtggccagtgacctggtggacgaccgcttcgtccgccaggccctggcagaggtcggcgggttgcaggcgttcggcctcgccgagggcttccagcgcagcgaggagatcagcccgtga

SEQ ID NO: 345610 - DNA, 765 bp, Pseudomonas aeruginosa; identical to SEQ ID NO: 341182

SEQ ID NO: 345611 - DNA, 1410 bp, Pseudomonas aeruginosa
atgccgcgcgaaatccgtctcaacgccttcgaaatgaactgtgtcggccaccagtcgcccggcctctgggcgcatccgcgcgaccgctcctcgcagtacaaggacctggagtactggaccgacctggcgcggttgctcgaacgcggccgtttcgacggactgttcatcgccgacgtgctgggcatctacgatgtgctcgacggcaatggcgacgcggcgatccgccaggccgcccaggtaccggtgaacgacccgctggcgctgatcacgccgatggccgcggtgactcgccacctgggcttcggcctgaccgcctcgctgtccttcgagcatccctatcccttcgcccgccgactctcgaccctggaccacctgaccaagggccggatcggctggaacgtagtgacctcctacctggaaagcggcgcgcgcaacctcggccagcaggcccagctcgaccacgaccgccgctacgactatgccgacgaatacctacaggtgctctacaagctcttcgaaggcagttgggaggacggcgcggtgctccgcgaccgtcgccgacggatcttcagcgacccgggcaagatccacgagatccgccatgtcggcgagcacttccaggtacccggcatccatctctgcgaaccgtcgccgcagcgcacgccggtgctctaccaggccggcgcgtcgagtcgtggcaagcgcttcgccgccgagcacgccgagtgcgtgttcgtcgccgcgccatcgaagaccgtgctcaagcaggcggtcgccgacatccgccagcgcgtcgccgaggccggccgcgatccgcgcaaggtactggtgttcaacctgcagacggtggtgctgggcgaaaccgacgccaaggccagggccaagttcgacgaataccgcgccttcgtcagctacgaaggggccctggcgctgatctccggctggaccgggatcgacttcggccagtatcggccggaccaggtactgcggcacatccacaccaatgcgatccaatcggcggtggaagcgttttccagcgccgatccgacgcgcacctggacggtccgcgagctggccgactgggtcggtatcggcggcttcggcccgctgttcgtcggcagcccggcgaccgtcgccgacctgttgcaggagtgggtggaggacaccgacgtggatggcttcaacctggcctatgcgctggcccacgaaaccttcagcgacgtggtcgaattgctggtgccggagttgcagaagcgcggggtgtacaagaccgaatatgcgccggggactctgcgcgagaagttgttcggcgacggcccgcggctgccggattcccatccggcggccggctatcgcgacctgcgggcgctctgggagaaggaggccgggcgcaacgcgctgccggcctga

SEQ ID NO: 345612 - DNA, 1236 bp, Pseudomonas aeruginosa
atgagcgaactggaaaagaacgccgccgatccctatcggcaaccgctgccacggaccccggcccggcgcatcgccgacgacgccgaggcgatccgcgtcgcccgcgaactggccgggctgttcgccgaggaagcctcgctgcgcgaccgccagcgccggctgccggtggccgaactggaagccttctcgcagagcggcctatggggcatcagcgtaccgcgcgcctacggcggcgccgaggtcggctaccggaccctggccgaagtactgaagaccatcgccgcggtagacccgtccctggcgcagttgccgcagaaccacctggcggtgctcgaccatttgcgcctggacggcagcgaggagcagaaacgcttcttctacggcctggtgctagacggcgtgcgcttcggcaacgccttctccgaacgccacagccgtaccgtcgccgaattccagacacgagtgctggcggatggcgacgggttccgcatcgacggccgcaagttctattcgagcggcgccctgctcgcccactgggtaccggccgtcggcctcgacgccgagcagcgcgcgcacctggcgttcatcccgcgcgacgcgccggggctgacggtgatcgacgactggtccggcttcggccagcgcaccaccgccagcggcaccgtcatcctggacaacgtgcgggtgccggccgagcacgtcatcccggtgcaccgcgccttcgaccgccccaccgccgccggcgccgtatcgcagttcatccaggccgccatcgacgccggcatcgcccgtggcatcctcgccgagaccgtgcagcaggtgcgccgccacgcgcggccatggatagacgccaaccagcagcatgcctgggaagacccctacaccatccagcaggtcggcgacctgcgcatccgcgtgcgcgccgcggaagccgtgctcgacctggcggccgacgccatcgaagcggcgctcgccgcccccgacgaggagagcgtggccgccgcctcgatcgccgtggccgaggccaaggtgctcaccaccgaagccgccctgctcgccgccaaccggctgttcgaactggccggcacgcgctcgaccctggaggaactcaatctcgaccgccactggcgcaacgcccgcacccacaccctgcatgacccggtgcgctggaaataccatgccatcggcaactaccagttgaatggggtgaagccaccgcggcacgcctggctctag

SEQ ID NO: 345613 - DNA, 1260 bp, Pseudomonas aeruginosa
atgaacgcccgcgtccatcccgaagccaccgccgccagtctctccgaaggcaccgactacgaactgctcgcccagcgtttccgaccgatcttcgcgcgcatcgccgaaggcgccgtcgagcgcgaacggcaacgcgaactgccccacgaggcgatcgcctggctcaagcaggccggcttcggtgccgtgcgcgtgccgcgcgagcacggcggcgccggcgcctcgctgccgcagttggttcagttgctgatcgaactggccgaggccgactccaacatcacccaggccctgcgcggccacttcgccttcgtcgaggaccgtctcaatgccgagcccggccctggccgcgaccgttggctgcggcgcttcgtcgagggcgacctggtcggctgcgcctggaccgaggtcggttcggtacggctgggcgaagtgctcacccgcgtctcgcgcaaggacgacggtcgctgggtggtgaacggcagcaagtactacagcaccggcagcctcttctccgactggatcgatctgtatgcccagcgcgacgacaccggcgccgacgtgatcgcggcgatccgcaccgaccagcccggcgtgcgccagagcgacgactgggacggcttcggccagcgcaccaccggcagcggcacatcgctgttcgaggacgccgaggtggaggaagagaacctcatcgacttcgccagccgcttcaagtaccagaccgcgttctaccagttggtcctgctcgcggtgctggccggcaccggccgcgccgccttgcgcgacgtcgccgccgaggtgcgcgggcggacccgtatctacagccacggcaatgccccgcgagtcagccaggatccccaggtgcagcaggtggtcgggcgcatcgccgcgcgcgtctacgccgccgaggcggccaccctgcgcgccgccgaagcggcccagcgcgcctacctggcgcgtttcgtaggcgacccgcaggcggagaaggaggccaatgtcgccgccgagatcgaatcggccaaggcccaggcgatcgtcgccgaactggtgttgcaggccaccagcgagctgttcgacgccagcggcgcttccgccgtcggccgcggcaagcagctcgaccgccactggcgcaatgcgcgcaccgccgcctcgcacaatcccctgatctacaagcaacggatcgtcggcgactgggagatcaacggcagcgagccgccctacgtctggcagatcggcagcggcccggccacggcgtcccgctga

SEQ ID NO: 345614 - DNA, 1626 bp, Pseudomonas aeruginosa
atgaccgccccgctccacctcgattcgctgtttcccagcctcgacgccattcccgagcagtaccgccccgacgcccccatcgagcagcgcgactacctggtcgacggccaactgcgacattgggacggcccgctggcgccggtacgcagcccggtattcctcgccgaggccgacggcgagcgccaggtgatcctcggcagcaccccgctgctcgacgccgacgcggcgctcgccgcgctcgacgccgcggtgcgggcctacgaccacggccagggcctgtggccgaacctgcgggtggccgagcgcatccagcacgtcgaacgcttcctggcgcggatgcgcgagcaacgcgaggcggtggtcaagctgctgatgtgggaaatcggcaagaacctcaaggactccgagaaagagttcgaccgcacctgcgactacatcgtcgataccatcgaagcgctgaaggaactcgaccgccgctccagccgtttcgaactggaacagggcaccctcggccagatccgccgggtgccgctgggcgtggcgctgtgcatggggccgtacaactacccgctgaacgaaaccttcaccaccctgatcccggcgctgatcatgggcaacaccgtggtgttcaagccggccaagttcggcgtgctgctgatccgcccgctgctggaagccttccgcgacagcttcccgccgggagtgatcaacgtcatctacggacgcggccgggaaaccgtgtcggcgctgatggccagcggcaaggtcgacgtgttcgccttcatcggcacccattccggcgccagcgacctgaaaaagctgcacccccgcccgcaccgcctgcgcgccgccctcggcctggacgcgaagaacccgggcatcgtcctgccgcaggtcgacctggacaacgcggtgaacgaggcggtcaccggcgcgctgtccttcaacggccagcgctgcaccgcgctgaagatcctgttcgtccacgaaagcgtgctgcgaccgttcctcgacaagttcagcgcgcgcctggccagcctcaagccgggcatgccctgggaaccgggagtggcgctgacgccgctgccggagccgggcaaggtcgactatctcgaaggcctgctgaacgacgccctggccaagggcgcacgagtggtcaatgcgggcggcggcgagcatcggcaaagtttcttctaccccgctctgctgagtccggtgagcccggatatgcgcctctaccacgaggagcagttcggtccgctggtgccggtggtgccctatcgcgagctggacgaggtgatcgactacgtcctgcgctccgactacggccagcagttgagcctgttcggcaacgacccggcgcagatcggccggctggtcgacgccttcgccaaccaggtcggccggatcaacgtcaacgcccagtgccagcgcggcccggacagctacccgttcaacggccggaagaattcggcggaaggcaccctgtcggtccatgacgcgctgcgggtgttctccatccgcaccctggtggcgacccgcgacaccgaggcgaacaagaccctggtcagcgagatcatccgcaaccgcgcgtcgaacttcctcaccaccgactacatcttctga

SEQ ID NO: 345615 - DNA, 1353 bp, Pseudomonas aeruginosa
atgttcggcatgtcacacgatgcctacctgctcctcgacgccctggtgaccatcatcggcctgatcgtgctgatcacccgcttcaaggtgcatcccttcatcgccctgatcatcgccgccggcttcctcggcctgacctcggggatgccggtggagaagatcgtcaaatccttccaggacggcttcggcggcgtgctcggcttcgtcggcgtgatcctcgccctgggcaccatgctcggcaagctgatggccgattccggcggcgccgaccagatcgcccgcaccctgatccgcgccttcggcaaggagcgggtgcactggtcgatgatgctcgccgcgttcctggtgggcatcccgctgttcttcgagatcggcttcatcctgctgatcccgctggtgttcatcgtcgcccggcgcagcggcgtgtccctgatcaagatcggcatcccgttgctcgccggcctttccgcggtgcacggtctggtgccgccgcaccccggcccgctgctggcgatcggcgtgttcggcgccgacatcggcaagaccatcctctacggcctgatcgtcgccctgcccaccgccgccatcgccggcccactgttcggcgcgctggtctcgcgctacatccccggcacgccatcggcggaactggtcgagcagatcgcccacgagcccgagacccaggacctgcccagcttcggcgtgaccctggcgaccgtgctgctgccggtgttcctgatgctgctgaagaccttcgccgacgtcgccttccccgatggccacgcgttccgcgcctggatggacatgatcggccacccgatcagcgccctgctcctggccctgctggtggcgctctataccttcggctacgcccgcggcttcgactcgaagaagatcctcagactgctcgaccagagcctggcaccgaccgccgccatcgtgatgatcatcggcgccggcggcggcttcaagcagatgctggtggccagcggggtcggcgacgtcatcggccatctcgcggtgaacgcgcagatctcgccgatcctgctggcctggctggtggccgcggtgatccgcatcgccaccggctcggccaccgtcgccaccatcaccggggccggcatcgtggtgccggtgatcgacctgattcccggcgtcaaccgcgagttgctggtgctcgccaccggtgccggttcgctgatcctctcccatgtcaacgacgccgggttctggctggtcaagcagtacttcaacatgagcgtcagcgagaccttcaagacctggaccgcgatggagaccatcctctccgtggtcggcctggtcttcatcctgttgctgtcgctggtgctctga

SEQ ID NO: 345616 - DNA, 522 bp, Pseudomonas aeruginosa; identical to SEQ ID NO: 321527

SEQ ID NO: 345617 - DNA, 1032 bp, Pseudomonas aeruginosa
atgagcatcaccaagaacgacaagaacacgcgaaccaccggacgtcccaccctcaacgaagtcgcgcgccgcgccggggtcagcccgatcaccgcgtcgcgcgcgctgcgcggcgtcgccagcgtcgccgaagaactggcgcagaaggtccgcgacgccgcccgcgaactcggctacgtggccaaccccgcggcgcgcgcgctggcctcggcgcaaagccacagcgtggcggtgctggtgccgtcgctggccaacctgctgtttatcgagaccctcgaggcgatccacgcggtactgcggccacagggcctggaggtgctgatcggcaacttccactactcgcgcaacgaggaagaggacctgatccgcaactacctggcctaccagccgcgcggcctgctgctgaccggcttcgagcgcaccgagagcgcccggcggatgatcgaggccagcggcattccctgcgtgtacatgatggacctggactccggcgccgggctcaattgcgtcggcttctcccagttgcgcgccggcgaggccgccgccgagcacctgctggcacgcggccgcaggcgcctggcctacatcggcgcccaactcgaccagcgcaccctgctgcgcggcgaggggttccgccgcgccttgcaaaaagccggctgctacgacccggggctggaaatccttacgccgcggccgtcctcggtggccctcggcggcgaactcttcgtgcagttgctggccagccagccgcaggtcgacggggtgttcttctgcaacgacgacctggcccagggcgcgctgttggaggccctgcgccgtggggtcaaggtgccggagcagatcgccgtgctcggtttcaacgacctgccgggttcggactgcacggtcccgcgcctgagcagcatccgcaccccgcgcgaagccatcggccggcgcgcggcggagcagttgctggcgctgatcgccggcaaggaggtgcgcgatagcgcgctggacatggggttcgagctgatggcgcgggagagcacctga

SEQ ID NO: 345618 - DNA, 486 bp, Pseudomonas aeruginosa
atgctcaccgcacagcgattgcaagaggtagttatctacgaacccgaaactggcctttttacctggaggcaaacgctctccaatcgagccatagccggtcgtcaggcgggcaccattgatgcgcgtggatacttggtgatcaagatcgacggaaagcgccatcaggcaaatcgtcttgcctggatttacgtccacgggaggctgccgaatggggtggtggatcacttcgatggagttctcaccaacaaccggatatccaaccttcgtgaagtgcctcaatccaccaacaccaagaacaataaagtctcgaagaacaacacttctgggcaccctggtgtctacctgaacaagcgaaccggtcgctggtacgcgcagatatgggacagcatgaaatgcatccacctgggcaatttcatagataaagctgacgcagtggcagcaagaaaattagctgaggagagacttggttacgtggttcgaatctaa

SEQ ID NO: 345619 - DNA, 192 bp, Pseudomonas aeruginosa
gtgcgctacgaagtgacccgcgcctggcatggcgtaagcgtgggcgacgtggtggaactggagcaccttcacccgtcgctgaaacccaacgtgcgccccctcggcggcgagtccgtcctcgaagcagctactccggctgcaagttcggaagtcgagcagaaacgccgcgggcgaccgccgaaaaccgagtga

SEQ ID NO: 345620 - DNA, 678 bp, Pseudomonas aeruginosa
atgacagacagccttgcggcccgcattcgtgagtgcgcaaacatagtcggaaacggtgatagcctcgcccggaaaacggctatcccccgaagcaccttggaggcttacctcacaggtgatagcgagccaaaggcatcccgctgtgcggctatagcggaggcggcaggcgtatccttggattggttgatcgccggcaaacagagtgcatcggggagtacggggggcgagtcgccagaggccgctagcccagcgggagcccccgactatgcctacatcccgttgtatgacacgaaagtaagcgcgggacatggctcctggacagagggagcccgagaactgacgaagctggcgtttaccaggtacagcctgagaaagaaggggctcgacaccgctaacctctcagctgtccgcgttggcggcgactcaatggagccgttgttgtccgatggggataccgtcctggttgaccactcgtatcgagaggtacgggacgaggctgtttacgtcatccggctccaggatcacctgtatgccaagcgcctacagcgtaggtttgacggatcgattgcgatcataagcgagaatcgggcgtacacagaaatgactgtgcccaaagagcagttgcaagacctggatattgtcgggcgcgtggtttgggccagctattggatggtttga

SEQ ID NO: 345621 - DNA, 174 bp, Pseudomonas aeruginosa; identical to SEQ ID NO: 337221

SEQ ID NO: 345622 - DNA, 552 bp, Pseudomonas aeruginosa
atgagtgaggtgaagcggtacataaactgcgttatcggtatgactggtgttgagatggttcgcgccactgactacgccaagctctccgccgaggcccaggcgctcagggaggagcgtgatcgcatcgagcgtaaccgtgatatgtggaaggggcaatgcgagcgccaagccgaaaagctggaagccctgcgcgcaaggtttgtggtgccggatgggtatgcgcttgtgccggttgagccaacgcgcgagatgttcattgccgtcaataaggaagacgacaaggcatacgcgggcggctgcgatcatggcgcccagtttgattggctgtgggatgcagcgctagaagccgctccgcgcctcaacggcagggcggtgagcgaggggctgttgcgctctgcatgtagcagcatcaccaggctgattctttcagcgcagaccagaccatcttgccagaaaggcatggtggacccatgccgctgtcaccgctgcaatgttgatcgcgcgctgaaagtcgacgcagaacttcgcgccctgctgagcaagcaggcatag

SEQ ID NO: 345623 - DNA, 291 bp, Pseudomonas aeruginosa
atgcgcacgaaacccttccgcccgcctcagcggcatgagatcgccggccttcgctactaccgcaccgcgtcagcttacaactggctcgggatcacgatggcgcacccgacccgagcaatccagttgctgctcgaacagtgcgagccagacgtgctctcgccgatgttcgagattgagatcgacgcgatcctgcgccaagccgacgagtatgcgcggtctcgcgaagtgctggaccgagaggtgctgcgcgaaatgctcatgcacctgatttccaaagcagctggcgactga

SEQ ID NO: 345624 - DNA, 339 bp, Pseudomonas aeruginosa
atggagcaagcaatgagacaggaatttgaagaccgcttcccgattcctgaagggatcgagtggcgtgacaccgattacttcccggtgcagaccgataacgtccacgtatacgtggctcttgccggagtcgcagcgcgctacacgtcgatgtggcaagcctggcaagccagccgcgcgtctctgagggtggagctgccttccgagaaagaagagtcgaatgccaactaccgctttagcgagtattcgcacagtcgagcccagggtttcaatgattgcttggaactggtgagagaagccctccagcaagccggaatcgaggtgaagcatggaactgcatga

SEQ ID NO: 345625 - DNA, 381 bp, Pseudomonas aeruginosa
atgaccgaccacgcagagctgcggaggctggctgaagaagtgatccgaattgagcggagcgaggatgagccgatctcctctgcttgggaattattcgattccgccgccaaccccaaagccatcctcgccctgctggaccagatagacgggctgagcgacgagttatccgcatgcaccgagcatcctggcggatgtgggtattggcgcgaggccgccaagcgtagagccgaagaacgcgaccggctgagggcgcagaacgaggcgctgcggggagcgctacaggcagtagtggatgatccaacctggcgcagcaacgacaacaccctgtggccgaagatcatcaaagcaatgaaccagccaggcgccactagctctccctga

SEQ ID NO: 345626 - DNA, 627 bp, Pseudomonas aeruginosa
atgtcgctcatccgtccgccccgctgcgtctctcttccggctacagctagggggcacccgaaagcgccttccctggggcgttgctgtggccgatctattcccagggctattgcaggggataatatgaacgtgctttctggtgatcggcttcaagggctaaacgaaattgcgaggatggcaattgagaggccagtcgaagctatgtgcttgttggctggcgaagagttccagcacgaggatttgatgtggatacgggcgtgcatcatgtttgaggcggcccgcaatatggcgaccgagaatcgctctagcatagcgccaccttttacagaatttgatgtccatcgcgagttttgggaaaggctgtctgaactggttccaggtgccaagcgtgttcaggggccatcggatggaatcaacgttcctgatggatgggtagaaataggtggcgatctgatccccgttgaagtgaaaagagacgttttcaacggaagagccagaaaccaattgcagcgctacatgaccgcgtacagagctacacgaggcattgcggtatgcccaaagttcagctgcgaaacagatacttcaattattcgtgttgtgtgcagacctgcctgccttgcacattga

SEQ ID NO: 345627 - DNA, 258 bp, Pseudomonas aeruginosa
atgaacatcgcagcgatcgagcaagtagccgcggcgtgcggagtaaccgccgacgacgtcgaggcattcgctcagcttaccgctacgcagtaccgaaagggcctgcatggtgaggatgcaatcaacgctgcacacgccgtcggcattgatcttgccaaccgcgcattccgctccatccaggaattcgattcaaccaacccttacgccaccaacgacagcttcgctcacacccttcacatcctgcttggacaggcatga

SEQ ID NO: 345628 - DNA, 132 bp, Pseudomonas aeruginosa
atgatcaaggagatagtcgaggcccatcgtatttccgcaatcagcctgttctggcgaaagctttgttttcttgggtgcagtcgaaacaacgccagcaaccgcatcagcttctgttacctggtaacccattga

SEQ ID NO: 345629 - DNA, 174 bp, Pseudomonas aeruginosa
atgaaaactgtaaccctctatgaaatccgcgaataccaatacgaaggcgccggatactccaaggtcatgagcagcaagctgcgcgaccgtaaagccgcaaccaagctggtcaagcgccttaagaaaatgggtcacaaacgcgtctttgctagcccgatgaaggttgccgcatga

SEQ ID NO: 345630 - DNA, 207 bp, Pseudomonas aeruginosa
atgtcgacgagcaagttaacccccgagcaagagtcaagatcacgcgatttcgaggcgctgttcttgagccagcttctgtcggtgggccagaaggtcgtaggcaacgagatgaagtgcttcaacgagaaggagatcgccgcgatcttgcacctggcgaagtcgaagctttccgaggtcgagagcgtcgagcagttggagtgggattga

SEQ ID NO: 345631 - DNA, 624 bp, Pseudomonas aeruginosa
atggacatcggatctatcatcagaaaagcgcggaaggcacgaggcctgacgctcgaagctctcgcccaccaggtggactcggacactggaaacctctcgcgcatcgagcgtggcaagcagggagccagtcaggaattgctttccaagattctctcgattcttgacctctcactcacgggtctagcggaagagcccgcgggcaatgtacgccccacagagcagccggggcgcctctaccgctacccggtggtcagttgggtcgccgcaggcgcttggcgcgaagcgatagagccggccggcttcgatacattcgaactcagtgactacaagggtaagggaaggtcattctggctggaggtgaagggggattcgatgacggccccggccggcgagagcattccggaaggcatgctgattctcgtcgacaccgggctcgagccgaggcctggcgatctggtggttgcgaagctggccgacagcaacgaggcaaccttcaagcagttcgtgtccgacgcaggccagaagtacctgaaacccctgaaccccgcatatcgcatgctatccatcgacgacaactgcgagatggtcggcgttgtcacccgagctatccgcaagttcaggtga

SEQ ID NO: 345632 - DNA, 330 bp, Pseudomonas aeruginosa
atgagcatcgttaaatggatggtaagttatttgggtgacaacccgcggctctgcgaattcgtgaaagagacaaatcacttctatataaagtccaataaaagtcgcgagtcaaagatcagtcgttatcacgacttctttgatacagagcaggaagctctagatttcatccagtctagaaaacagagagaggaagagaataaaaggctgaaaaggatccaagacgcagcgcctgaacttctggatgctctagtagctctggttgagtgcaagcaaaccacaccagagctttgggaagcagcaagaaccgcaatcgccaaggccaccgcctaa

SEQ ID NO: 345633 - DNA, 309 bp, Pseudomonas aeruginosa
atgacaacccctatcgtgcaatcgatcagtgatgaaaggttggcggaagtagagagtcagtacataggggaccgctcccggcttgattcaactgtaatcctgtgtggaacgctagctgacattatcgcccgcctgcgcgctgctgaggctgatgctaagcggtatcggtggctgtgcgcatccgcatggtatgtcggaccggagccatgcggcgacacagaagccgttagctggcatgaccacaacgaaaccaaggatggcgtaaccgaagccatagacaaggcaatcgccatggagcgcacgccatga

SEQ ID NO: 345634 - DNA, 1383 bp, Pseudomonas aeruginosa
atgcgaatgaacatcacctcggtcgcgctgacgtggctgctcgcagcgcaacttgcccaggccgacgacccgatcaacgtatccaagaccggcacggtgctcagcgacgaggtgctctacagcattggcggcggcagtgcggtgagcatgggcagcgccggccagatggactcgatcggcgtcggcttcggctggaacaacgacatgatgtgcggaaacatgaacctgagcaccaccctggagaaccagctcaacggtgccacacagggtttccagaacatcatgggctcagtcatccagaacgcgaccggcgcggtcatgtcgctgccggcgttgatcatccagcgcgcgaaccctcagctctacaacctgatcaccaatggcatcctgcaggcgcggatcgactacgatcgctcgaaagggacttgcagagcgatcgccgagaagatggccgacatcgctggcgagcagaccggctgggggaaaatcgccgaaggccaggccctgggagccacgctggcctctggcgggaaagacgccgtatccgccctcgaagcggtggagaagaagggcggcaacgatggcgtaacctgggtcggtggagacaaggccggcggctccggccagaagcccattcgcatcgtcaacgacgtgacccgggcgggctacaacctgttgaccagccgctcggtgaatgattcgtcgagcgtgccttccgccacttgcaacaacggcctggtctgcaacacttggtcctccccccaggaggccgccgcattcgccacccgggtactgggggagcaacagcaacagacctgcgaaggctgccagaagacggtgacggctgctggcgtcggcctcaccccgctgatccaggagacctacgacaagaagctccagtcgctgcaggagctgctgtcgaagagcaaaccactgactgcagagaacctggctgcggccggcaccgatgctctgccaattacccgcggcgtcatcgaggcgctgcgcgacgagcgtgaccaggacgtcctggcgcgccgcctggcgtccgatgtctccctgatggacgtgctcagcaaggcactgctactgcagcgcctgatgttcgccggcgccaaggagcccaacgtcgccgccaacggcctggccacccaagccgtcgatcagcagaccagcctcctgcagcaggagatctccaatctcaagaccgaactggaactccgtcgcgagttggccagcaattcccccatgcgggtcatcgagcgcgggcaacaacgcgcctcagggtccagtggcgtgttcgagtcggcgcccgatgccgatcgcctcgatcgcctgcaggccccctctgccgccggcggtaagtcgggagggagaccgtga

SEQ ID NO: 345635 - DNA, 159 bp, Pseudomonas aeruginosa
atgtacatcaaaaaagatgtcatcgaggtcatcaagtacgcggcgatgatggcggcctgctctcgccagtcctggggaatctaccccatgaaccagggctacaaggccatgcccttccgtggcgactatcaccgcgtcgtcgaagtctgccacccctga

SEQ ID NO: 345636 - DNA, 192 bp, Pseudomonas aeruginosa
atgctcctcggcatggtcaaggacgaggtcagtgcgcgcatccgccggaccttctggattcagctcctgccatccatcttctacgtctatgccctgatcttcagcgggcatccaatgctaggcgcctccgccttcatggcgcagttcctgatcgtcgccaccgccttccgcaaggaggcaaagccggcatga

SEQ ID NO: 345637 - DNA, 4122 bp, Pseudomonas aeruginosa
atggacaccgcgccggatgccgccgggcgcgagtcggcgagttggctgtactaccagaccgccgccaactgcggcttcagcccggaaggcctgctggtagacccctacgagatgttcgtcgcggacgtcaacggcgacggtttccaggatgtgctggtcggcggcagcctggtcgtcgagccgctcaggcgcagcatccgttggcgggcgttcctgcacaaccgacgctcgccggaactgctcagtcggatcgacgccgccagcggcaacagcctcggcatcgaatacgcccggctcaacgatcccgccgtgcatacgccgcaggtcagcgccttcccccaggtttcgctgaatattcccagaccggtggtcagccgcctgcgggtcgccgacggtatcggcggcacgcgcgactaccagtatctctatcagggggcgcggctggacctgctcggccgcggcttcctcggtttccgccagatggaggttcgcgatctggcacgcgggcgcacccaggtgaggatgttgcgccaggacttccccttcgtcggacgcctggacagcgaggaaaccagcctcgccggaaaactcctggcgcgtcagcagaaccagtggaagtccgccgcgaccatcgccggcaagtctttcttcgtctacccggcccagttcaacgaggaacgcttcgaccagggcgcgccggtcagcgccacgcggcgcaaggtggtgatggacgagagttacggcaatcccacccaggtgaccgaggaaattgccgccagcctgaccggcggaaccttgcacagccgggtggtggagcgccagtacagcaacgacggcgcctcctggctggttggtttcgtcacccgcgaaaccgaaagtaccagtggcgacagcgacagcaagtcgcgggtgcaattgcgcagcgcgcagccggggactctagcgccggccagcgaaacatctttcagtggctcgcccggtgcggagatcacccgtcaatacagctacgatggcaacggccggatcgtccggattaccaccagcggcgccggactggcggcgcgcagcgaacagttcggcgcctaccaggggccctggccgggcactcggtccaatgccctcggccatgtcgagcgcttcgcctacgaggcggcccgcggccaaccgaccagcaaggtcgacgccaacggcctggccgagagttatctctacgacgctttcggccgggaaaccctgcgccgcttcgccgacggtagcctgctcgccaccgactatctggtttgcggcagccgggcgatctgtgccagcggcgccaaggtagccgtgcgcacgcgtaccgtcaggggcagccagcagggcgcggcggaacgctggcagtacctggatggcttcggtcgggtcctgcgcgaccgtcgccaggccttcgacggtcgttggatcaatgtcgacaacagttacgacgcgctgggccggcagcgttcgactaccgagccttacatcgaggcggcgaccgtcctacagaccacctgggacgcccaggaccggccgttggcccggcagttgcccagtggggcgcaactgagctacagctacggcgcgcgcgctgctggtggcagttggaagcaatatagcctcggctacgacggaaggagcctgaccgagcgccgcgaatacgatgcgcgtggcaagctggtgctcagtaccaatgccctgggcagcgccggcgaggtgtccgttcgctaccgctacgacgccgacggcaacctggcctggacccaggtcgctggcgacagccgcagcgagatccgcatgagctacgacgcggcgggccgtcgcaccggccttttcgacccgaacagcggccaggaaagcgtgcagtacgatgccctgggccaggccctggtgcgtaccgccagcgacggcagtcgcaccgagcgcaagtacgacctgctcggccgggtgctcgagcagaccgaccgcctgggcggccaggccagcatttcgcgctggcagtacgacacgggaacgaaaagcctgggcaagctggtcggcgtggccgggccgggctatcgccaggcgctgctctacgacgatctcgcgcggttgaaggcgagaggctgggatatcgaagtcgacggtgtcacccgcagctaccaggagtcgtatggctacgacggcttcagccgcctggcgagcaccaccctggccaacggccaggtgctgcgccatctctacaatggatacggcttcgccgctggggagcaggacggcgccgggacgacgctgcggcagatccaggctcgcgacgcccgcgaccagatcgttcgcgaaagctacggcaacggtgtgctaagccagcgcgactaccagcccgccaccggctggttgacgcgcatccaggcgagcaagggcggcagtgtcctgcagagcctgagctaccgctacgatggcctcggcaacctgctggagcgcagcgacgcccgcggctacagcgaagtgctgagctacgatgacctcaatcgactgttgcgcagcgcgcggaccctggatggcacacaggtggtccaggactttacctacgacgccctgggcaacctgaccggcaagagcggtgtcggcgcctatcgctacggcagctattcgagcgccgagcagcagctctgtgctggtcgcggcggggtggcccagcccggaccgcacgccgtgcgcggcaccagcgccgggacgtattgctatgacgctcgcggcaaccagctcagcgggccggggcgacaagtcaagtacgcatcgttcgataaacccgtggaaatttccgcaggttccagcctcagccgcttctcctacgatcccgagcgcaagcgctacctgcagacggtggagggccgaacctccgtctacctggacgaggggcgtttcgaggaggtcaacgacggcgggcgcagttggcaggacgcctacgtcggcgactacctgatcctgcgcaaggaagggggcgccgtcaaaaagctctacctgctgcgcgatgcgctcggctcggtggaaatcctgctcgacgccaacggtgccgtcagcgaacgccagtctttcgccgcgttcggcgaacaccgtggcgctgactggaaggacaacggcaaccaacccaccgccacctccacccggcgtggcttcaccggccacgagcacctggaggagtccgggctcgtccatatgaacgggcgggtctatgacccggtgatcgggcggttcctcagcgccgatatcgtctatcaggatacggccaatgcgcaggcctacaaccgttactcctatggctggaataatccgatcgccagtgtggatccgacggggtatgcgttggaggaaatttcgtctggcaatagttggtactcaccgtttataagtaatagttggctggttttggggaatgcctttaaaggtaatcttccagatagttactgggacttaggggtgggggcgttcaagcagaatcttaactttgcggcgactacccttgctggaaatccattttctatttatgggttttcgcgggtaagtgaaagttttgataatttactttcccctaaaggtgtagatcagagggcaggagctggagtgtatgagcttggcagtctatttttcccaactgcaggagataaagtatctggatgggttgcaggttttgcgagtcgcctcagatttgctccagccttaagaggagggataggagtttctagtcctgcttggaaaggttctgggccgactcctggggttttaggggtagagccaggttcactatcctctaaatcgttgaggaattattatccgagcactgatagtggttctatagagtatgtgtttgatccgataagtaaaagctttgcggtgggaagacctaaagattttcgtccaatgttgagtcagcatcagcaattggctgattcaattggggctgctgatgctacagttgtcggtggaaaattttggcgtggcccaaatggtgaattctttaccaatgaatatagtgggcactactggaggaattggtcggaagaaaatcgcaaagtgtttgttgatgtgatgaataaatatggtgtgaaggttgagcaccggagagggatgtga

SEQ ID NO: 345638 - DNA, 1269 bp, Pseudomonas aeruginosa
atgagcaaacgtatcgtcgtcaccggcatgggcgcggtcagcccgctgggctgcggagtcgaacccatatggcaacgcctgctggccgggcaatcgggcatcgccacgctcccggcggagctgatcggcgacctgcccatcagcatcggcggccaggttcccgaccgcgcccaggacccgcaggccggcttcgatcccgacctgctgctggccgccaaggaacaacgcaagatggaccgcttcatcctcttcgccctggccgccgcgcaagaggccctggcccaggccggctgggcgccgcagagcgccgaggcgcaggagcgcacggcgaccgtcatcgcctccggggtgggcggcttccatgccatcgccgaagcggtgcggaccaccgacggcaagggaccgcgacgcctgtcgcccttcaccatcccgtcctttctctgcaacatggcggccgcccatgtgtcgatccgccatggcttcaagggaccgctgggcgccccggtgaccgcctgcgcggcgggcgtgcaagccatcggcgacgcggcgcggatgatccgcgcgggagaggtcgacgtggcgctctgcggcggcgcggaagcgaccatccaccgggtcagcctggccggcttcgccgccgcgcgcgccctgtccagcgatttcaacgacagccccgagcgcgcctcgcgccccttcgaccaggcccgcgacggcttcgtcatgggcgaaggcgccggcctactggtcatcgaggaactggagcacgccctggcgcgcggcgccagggccatcgccgagctggtgggctacggcaccagcgccgacgcctaccacatgaccgccgggccggaagatggcagcggcgcccgccgggccatgcagcaggcgctgcgccaggccggcgtggaagcggccgcggtgcagcacctgaatgcccacgccacctccacccaggtaggcgacaagggcgaactggccgccatcaaggccgtgttcggcgccggcagcgggctcgccatcagcgcgaccaaatccgccaccggccacctcctgggcgccgccggcggcatcgaggcgatcttcacggtcctggcactgcgcgaccagctcgcccccgccacgctcaacctggaaacgcccgacaccgacgccgagggcctcgacctggttcgcggcgaagcccggcgctggccgatggaacacgcgctgtccaatggcttcggcttcggcggggtgaatgccagcctgttgttccggcgctgggtgtag

SEQ ID NO: 345639 - DNA, 1404 bp, Pseudomonas aeruginosa
atgttctcatctgttgagaacaaactgatcggggctgccgagttacaaaacctttataaagagacattaaacagaatcactaagcctttgatgtttcaacgccatgttgcattacctaagctatccttggccactgcagcatatctaggcgtctccaagtgtaaagactacgtagagttcattaaaaatcaaagtggaaatattaacaagggtgtattttacgacaacgttcgcgactacctcggcagcacaaaccaagtgaatgcggatattgccgacacaataaaaagcgacgcccaaagaaatttgttttccgttcttaataatggcgtaacagttgtcgcaaaaaaggtagtgccttctggagatgtttttaagatatcgggtttccaagtcgtcaatggatgtcagacgagccacgttctctttgaaaacagagagcatataacggatgacatgtacgtcactatcaagcttattgagactgacgacattgaactatctagcagtgtcattaaagccactaatagtcagtcggtcgtgatgaaggaagcattcgcaaccatcaagccataccacaaacgacttgaagacttcttcgccgctatgaatacacaagggcaccgatttttttatgcgcggcgacctcatcaatatgatgaagatgatacgatactacagagcgaaacagtttcagcacctctactaatcaaatcattcatatccatagcgcttgaggaacctcataaagtccacttttattatggtcaactgctaaaagactacaataatgaagcaagcaaccttctttttagtgaaagtcatcacccggccctatactttgtatcccatttgattttctcaaaatccaaggaatactgcgcaaggcgtcggatatccaaatggagctaccacattgcgcttctagttaagaaactacttcatatcgatctgagtccagaaaaaaagacaactgacgaccatgttaaggatatgattactaaaatcaataacggctttgatcgagagatacaaacggcggaagcgatcattacttcatttggtttcggttcaaatgatcatatggatccacgtcacaccagcgccattcttgagaaatacaaaatcgtcattgcgaactcacatcgtcaaaaagctggggcagcgcaagaaagaaaaaacgttggcccgagcgacacctcgaacctaatgcaatcccaagctcaactcctaaaaggaatctatagagttcgtcgttataaggcattaaatggtactgcgacattcagctacaactccaaagagcatagttaccaatacgaaaatccgaaattcgactccattgaagaggttagctgcactatagtattcgaaggtggagcaattcacgacgtcgtattctaa

SEQ ID NO: 345640 - DNA, 675 bp, Pseudomonas aeruginosa
gtgctgctcaagcgcctggtcaagaacatcgcctacgaccacgagatggacaccaccttcatggccaagccctatccgggccaggccgggaacggactgcacgtgcatatctcgctgctcgacaagcatggcaacaacatcttcaccagcgaggatcccgagcagaacgccgcattgcgccatgcgatcggcggtgtgctcgagaccctgccggcctccatggccttcctctgcccgaacgtcaactcctaccgccgcttcggttcgcagttctacgtgccgaacgcgccgagctggggcctggacaaccgcaccgtggccctgcgcgtgcccaccggcagcccggacgcggtacgcctggaacaccgcgtggccggcgccgacgccaacccctacctgctactggcagcggtgctggcaggcgttcatcacgggctgaccaacaaggtcgagccgggcgcgccgatcgaaggcaactcctacgagcagatggagccgagcctgccgaacaacctgcgcgacgccctgcgcgagctggacgaaagcgagatcatggcgaagtacatcgacccgaagtacatcgacatcttcgtcgcctgcaaggaaagcgagctggaggagttcgagcactcgatctccgacctcgagtacaactggtacctgcataccgtctga

SEQ ID NO: 345641 - DNA, 2472 bp, Pseudomonas aeruginosa; identical to SEQ ID NO: 339307

SEQ ID NO: 345642 - DNA, 465 bp, Pseudomonas aeruginosa
atgggcaccacggtgatggccttcctcggcgcgggagtgtggggcttcatgcataccctggcgccggtcaactactacacccacggcacccagctcaccgccgcccacggccacatggccttctatggcgcctacgcgatgatcgtgatgaccatcatctcctacgccatgccgcgcctgcgcgggatcggcgaggcgatggacaaccgctcgcaggtcctggagatgtggggcttctggctgatgaccgtggcgatggtgttcatcaccctgttcctctccgcggccggggtgctgcaggtctggctgcaacggatgccggcggacggcgcggcgatgaccttcatggccacccaggaccagctggcgatcttctactggctgcgcgaaggcgccggggtggtgttcctcatcggcctggtcgcctacctgctgagcttccggcgcggcaaggcggccgcctga

SEQ ID NO: 345643 - DNA, 552 bp, Pseudomonas aeruginosa; identical to SEQ ID NO: 169992

SEQ ID NO: 345644 - DNA, 450 bp, Pseudomonas aeruginosa; identical to SEQ ID NO: 169993

SEQ ID NO: 345645 - DNA, 252 bp, Pseudomonas aeruginosa; identical to SEQ ID NO: 169996

SEQ ID NO: 345646 - DNA, 393 bp, Pseudomonas aeruginosa; identical to SEQ ID NO: 169997

SEQ ID NO: 345647 - DNA, 465 bp, Pseudomonas aeruginosa; identical to SEQ ID NO: 169998

SEQ ID NO: 345648 - DNA, 717 bp, Pseudomonas aeruginosa; identical to SEQ ID NO: 169999

SEQ ID NO: 345649 - DNA, 798 bp, Pseudomonas aeruginosa; identical to SEQ ID NO: 170000

SEQ ID NO: 345650 - DNA, 366 bp, Pseudomonas aeruginosa; identical to SEQ ID NO: 170001

SEQ ID NO: 345651 - DNA, 345 bp, Pseudomonas aeruginosa; identical to SEQ ID NO: 170002

SEQ ID NO: 345652 - DNA, 630 bp, Pseudomonas aeruginosa; identical to SEQ ID NO: 170004

SEQ ID NO: 345653 - DNA, 393 bp, Pseudomonas aeruginosa; identical to SEQ ID NO: 170005

SEQ ID NO: 345654 - DNA, 270 bp, Pseudomonas aeruginosa; identical to SEQ ID NO: 170006

SEQ ID NO: 345655 - DNA, 657 bp, Pseudomonas aeruginosa; identical to SEQ ID NO: 170008

SEQ ID NO: 345656 - DNA, 576 bp, Pseudomonas aeruginosa
atgcaaccactcacctgcgtcgctcaccgcttggctgtgcctgccttgctggccggctgcgtgctcatcaccggctgcgccgccacgggcacgacgagccctcccactgtccatgactcgctccccgagcctgcggtgttggtcagaaccatcgccccggagcccgagccgggcctgatcccggtggcccgctacgggcgctacacgctggtcgagatggtgccggaaccggcacagcgcgacctgctgcgacaggtgatcgagatttcgattccgccgatcttggacgcgagcgtcggcgatgcccttcggcacgtgctgctgcgcaccggctaccggctctgcgacgcgacggaggcgaccgcgctgtacgcgttgccgctgccggcggcgcacctgcggctcgccggcccggcctgggagttgtccgtcgatgacgcttcgcgcgcggtgtgcttcacgcgcgtgacgactgcgcgtgcgccgagcgcaagcccgattcccgcggctccggcaccgagcgcgccggccgccgaacccgccgattcccacgtgccccaggaggcccagccatga

SEQ ID NO: 345657 - DNA, 645 bp, Pseudomonas aeruginosa; identical to SEQ ID NO: 170012

SEQ ID NO: 345658 - DNA, 732 bp, Pseudomonas aeruginosa; identical to SEQ ID NO: 170013

SEQ ID NO: 345659 - DNA, 585 bp, Pseudomonas aeruginosa; identical to SEQ ID NO: 170014

SEQ ID NO: 345660 - DNA, 555 bp, Pseudomonas aeruginosa; identical to SEQ ID NO: 170015

SEQ ID NO: 345661 - DNA, 387 bp, Pseudomonas aeruginosa; identical to SEQ ID NO: 170019

SEQ ID NO: 345662 - DNA, 1629 bp, Pseudomonas aeruginosa; identical to SEQ ID NO: 170021

SEQ ID NO: 345663 - DNA, 408 bp, Pseudomonas aeruginosa; identical to SEQ ID NO: 170023

SEQ ID NO: 345664 - DNA, 240 bp, Pseudomonas aeruginosa; identical to SEQ ID NO: 170024

SEQ ID NO: 345665 - DNA, 378 bp, Pseudomonas aeruginosa; identical to SEQ ID NO: 170025

SEQ ID NO: 345666 - DNA, 429 bp, Pseudomonas aeruginosa; identical to SEQ ID NO: 170026

SEQ ID NO: 345667 - DNA, 693 bp, Pseudomonas aeruginosa; identical to SEQ ID NO: 170027

SEQ ID NO: 345668 - DNA, 921 bp, Pseudomonas aeruginosa; identical to SEQ ID NO: 170028

SEQ ID NO: 345669 - DNA, 1470 bp, Pseudomonas aeruginosa; identical to SEQ ID NO: 170029

SEQ ID NO: 345670 - DNA, 435 bp, Pseudomonas aeruginosa; identical to SEQ ID NO: 170030

SEQ ID NO: 345671 - DNA, 747 bp, Pseudomonas aeruginosa; identical to SEQ ID NO: 170032

SEQ ID NO: 345672 - DNA, 495 bp, Pseudomonas aeruginosa; identical to SEQ ID NO: 170033

SEQ ID NO: 345673 - DNA, 447 bp, Pseudomonas aeruginosa; identical to SEQ ID NO: 170034

SEQ ID NO: 345674 - DNA, 951 bp, Pseudomonas aeruginosa
atgaaccgcctgctgtcggcgtcgtcgcgccgggcccgccttgccatcgcttcggtgctgctcggcggcgccgcttcgagcttcgcgctgaacacggctaccatcgtgtcctcggccctgtcgcccgactgcctggaatatcgcgtcgtcggcatctgctactggctgttctgcacctggacgggctgcacggtgcgcacctcggtgaaggtgcgccactacattcccgacgcggtggtgtcgagctacagcaacaccggcgagaacccgtggatcgaggtgcgcgccatgagcatgcccaatcccacggcgcaggccggcggcgacgggacgacgaaccacgacaacgagaacaacctggcgaagttcaagaacgccgacgtgatcgggcatcccggcggttcggtgttcagccagttcgccagcgcgtccggctacgcctgccagggcgcaggcacggccttcatgccgtacctgctgagcaccctcgacacgctggcctggcgctacaacgtcccggagatggtgtaccccgaggcggtgatccccggcatgcgcgagatcggcggccgcacgacgctcaacctgtggggcaacgtctatccgcgcggcggcttcctgcatcagaccgacgactacaagagcggcgccgtcgtcgcgcagcgcgcgggcgatgtcgtcacgcggcgcatgcagccgcacgtctaccagccgctgctcgcgagttcgagcgacggctattggccggccggcgccctggtggagagcgatgcctccaccggcaagtggcaggagctgacgccgaccctctccaactcctgcgccgtgttcccccactccaacacgcgcgtgcaggcccagcaaggcgactacgcctgggcgctgtggcggccctatgcatgctgccagcgccgcgggcaggtcttcctcggcagcgtcgatttcctctga

SEQ ID NO: 345675 - DNA, 1404 bp, Pseudomonas aeruginosa
atgaaagcgtctctctcccgtttcgcacagcgcgccaggccctacgcgctcagcatcgcgctcgcctgcgccgtcacggccgcagccggcgtcgcgtgggcgcagacccgcatcagccccaccggcgtcggcgtgagcggcagcgtcatcggcgacgacgtgctctacagcatcggcggcggccgggccgtgtccatgggcggcgccgggaacatgcagagcattggcgtgggcatcggctggaacagcaacctgatctgcggaaacatgagcatcacgacgacgctgcagaaccagttgaacggcctcaccaatggctttcagcagatcatgtcctcggtgatccagagcgccaccagcgccgtggcgtcgctgccggccctgatcatccagcgcgccgatccgggcctctacaacctgctgaccaacggcgtgctgcaggctcggctcgatttcgaccgcagcaagttgacgtgcaaggcgatggccaaccggatggcggacatggccggcggccaggccgggtgggatcagctcgccgaaggtttcgcgctgcgcgatgcggtgagcagcaccgatgcggtgtccgccgtcgagcaggccgaatcgaacaagggcaacaacggcgtgccctgggtgggcggcggcaacgcgggcggctcgggccagggttccatcaaggtggtcggcgacgtgacccgtgccggctacaacctgctcaacagccgcggcgtcagcgacacctcatccatcccgcgcgcgtcctgcggcaaccggctgacctgccaaacttggtcctcgccgcaggccgcagcggacttcgcaacccgcgtgctcggcgagcgcgagcaacgcacctgcgagacctgcaccaagacgcagaccacgcctggcgtcggcctgacgccggtgatccaggaagagtacgagaccaagctgcaggcactgcagggcctcgtgacgggctcgacgccgatgacggtggcaaacctcgaagccgccggcagcaactcgctgccgatcacgcgcggcgtgatcgaggcgctgcgcgacgagcccgatcaagacctgctcggcaagcgcctggcgtccgaagccgcgctgtcgagcgtgctggagaaggccctgctgttgcagcgcacgctgctgaccggcaagaaggagccgaacgtcgccgccaacgagctggccgtgaaggcggtcgatcaggagaacaacgcgctggagcaggagatcaacaacctcaagaccgagctggagctgcggcgcacgctggccggcaattcggcgatggcgatcgtgcagcgccacggcacccgcgccgcgggctcgcgcggcatcttcgagggcgacacgacgcgcgaccggctcaaggaagtgcagaagccgcggagcgggccatga

SEQ ID NO: 345676 - DNA, 354 bp, Pseudomonas aeruginosa; identical to SEQ ID NO: 170037

SEQ ID NO: 345677 - DNA, 1518 bp, Pseudomonas aeruginosa; identical to SEQ ID NO: 170038

SEQ ID NO: 345678 - DNA, 372 bp, Pseudomonas aeruginosa; identical to SEQ ID NO: 170039

SEQ ID NO: 345679 - DNA, 318 bp, Pseudomonas aeruginosa; identical to SEQ ID NO: 170041

SEQ ID NO: 345680 - DNA, 1923 bp, Pseudomonas aeruginosa; identical to SEQ ID NO: 170042

SEQ ID NO: 345681 - DNA, 627 bp, Pseudomonas aeruginosa; identical to SEQ ID NO: 170044

SEQ ID NO: 345682 - DNA, 1857 bp, Pseudomonas aeruginosa; identical to SEQ ID NO: 170045

SEQ ID NO: 345683 - DNA, 1176 bp, Pseudomonas aeruginosa
atgaaaatcaaatccgtccgtacccgcgtcttcgaatggaagggcaaggtcgtcccgccgcaggcgcacttctgcaccaatgccagcgacatcctgttcgagaagggagacgccatgggttcgttccgcttccacggctggctggtggtggagatcgagaccgacgacggcctcgtcggcatcggcaactgcgccctggcgccgcgcgtggcgaaggaaatcgtcgacctctacctggcgccgatctgcatcggcgaagacccgttcgacaacgagtacatctggcagaagatgtatcgccgcacccacgcctggggccgcaagggcatcggcatggcagccatctcggcggtggacctggcgatctgggacatcatgggcaaggcggtgaacaagccggtgttcaagctgctcggcggccgcaccaaggagaagatctggacctacgcctcgaagctctacgccaacgacaacctcgacgccttcctcgaagaggcccagggctacctgaaccagggcttcaccgcgctgaagatgcgcttcggctatggccccaaggacggcccgacgggcatgcgcaggaacatcgagcaggtccgcgcgctacgcgaactggccgggccggacatcgacatcatgctcgaatgctacatgggctggaccctggaatacgcccggcggatgctgccgaagctcgccgagttcgaaccgcgctggctggaggagccggtgatcgccgatgacatcgagggctacgtcgagctgaagaagatggggatcatgccgatctccggcggcgagcacgaattcaccggccacggcttcaaggacctgctggagcgccgcgcggtggacgtcatccagtacgacaccaaccgcgtaggcgggatcaccgccgcgcgcaagatcaatgccatggccgaggcctggtcggtgccggtgatcccgcacgccggacagttgcacaactatcacctgaccatggccagcaccgcctcgccgatggccgagttcttcccggtgttcgacgtcgaggtcggcaacgagctgttctactacgtgttcaagggcgagccgcagccggtcgacggctatatccagctggacgaccacaagcccggcctgggcctggagatatccgaagagcacctcaaggatttcatcatcatcgagtga

SEQ ID NO: 345684 - DNA, 2523 bp, Pseudomonas aeruginosa; identical to SEQ ID NO: 339356

SEQ ID NO: 345685 - DNA, 2052 bp, Pseudomonas aeruginosa
atgaacgccgtactcaaaaccgaagccgtcgccatcgaagccgcctcaccgctggaagtggccgacccggccaagaacctgatcttggttccgttgtcgcagctgttgccgcgccgctccaagcgcaacgtccgaacgaccccgcgccagtccatccccgaactggccgcgagcattgcccgcatcggcctgctgcaaaacctgatcgtcatcctttccgccgatggcgaggcttacgaggtggtggcaggcgaccgccgtctgaccgccttgaagctgctggcgaagaagaagcgcatccccgccgactacgaagtgccgtgcctgctggtggccgatgcctccgcccgtaccgtcagcctcgcggagaacgtgcagcgcgagaacatgcaccccgcagaccagttcgcggccttcgccgcgctggtcaaggaaggccggcccatcgaggacattgccgccgacttcggcgtgtccccgctggtggtgcagcggcgcttgaagcttgcgaacgtctcgccacgcctgatggccgattaccgggccggtggcgtgacgctggaacagttgatggccttgaccatcaccgacgaccacgccgcgcaggaagccgcgttctatggtgcggcggaatggcagcgcagcccgtccaagctgcgcgagcgcctaaccgagcgcgaaatcgacgccacgcacgcgctggtgcgcttcgtcgggctggacgcctaccagcaggcaggcggcggcatccgccgcgacctgttcgcggaaggcgatgccggaacctacctcaccgataccgcagtgctggaaacgctggtgcgcgacaagctggcaacgctggccgaggacgtgcgcgccgagggctgggcatgggtggaggccgtaccgcatctggcctacgaggaacggcaggcgttccagaacgccccgcgccaccgccgcgagccgaccacccgcgaggcccgccgcatcgcctcgctggaaacccgcctcgaaaagatcgacgccgaactggaagaagcttgcgacgccgaggacgaggccaaggccgagaagctggaacagcgtcgcgatcaggtggtcgacgaactgcaagacgcggaggacgccttgcacggctatgcccccgatgtgcgcgaggtggccggtgccatcgtcaccatcgaccgcaacggcgaagccgtcattcatcgcggcctgctgcgcgaagccgaggcgaaggcgctgcgcacgctggaaaagctgcggcgcggtttcggcagcaccgaaggcgaagccgccaacgacgagcacgaggacgccgacgacgcgcccaaggccgcgagcctgtccgaccggctggcgcagtggttgagcgcccatcgcacggcggcgctgcaaatcgaagtcgcacggcatccgcacgtcgcgctggccgcgctggtgcatggcatggtgcagaccgtcttgcaggaaagccactacggccacgacctgccgctcggcgtgagcctgaaagtgcaagaccgactggaaggcatggccccggactggccggaatcgcccgccgccgtggcgctgcgcgaactgcaacaggtcgccggtgaagccttgccggaggacaacgccgaactattcgccgcgctgctggcgaagccgcaagacgaactggtgcggctgctggccgtgtgcgtggcttccacggtggacgtggtgacgcctcgcgccacgccgcaccagcccggcgcggaactggcgcaggccgtgggcctcgacatggctgcatggtggaagccgaccgcagaaggctacttcaagcacgtttccaaggccgcgatcctgcaagccgtgggcgagtacgcgccggagcaggtttcccggctggcgaagttgaagaaggccgacattgccagcgaagccgagcggctggccgatggtacgggctggatgcccgccatcttcaagggcgctggcccgcaggatgccgtgcaggaggcaggcccggagcaggacgccccggaggatgccgaagtaatggcggatgagtccgccgaggcgctggccgcttga

SEQ ID NO: 345686 - DNA, 465 bp, Pseudomonas aeruginosa
atgctgatcggtgcgctgctggttctcacctgggtcatcctcctcgtccgatacccggccaaggccctgccggtctccctggcggctctcgccgggctgggcctggtggcggcctgggtgatctggcaggacaacgacgaaagccgccacctgcaacgccaggaactgcgcctgagctatgcgccggaacgctgtccggtggaccggccgctggcggtcgaactgaagaacggcagcgaccgaccgttgctggagctacgctggaggatcgccgcctaccgccccggcgacagcgtcaacctggccgacaccagcttcgacagcccgcgctaccgggcgccgaacgccctgctcggcggcgacagctggcacgattgcctgccgctgccgccgctgcgtccgggctatcgcgccagcaccctggaattccgcgccgaacgcctggacgggcgtttcggcaactga

SEQ ID NO: 345687 - DNA, 267 bp, Pseudomonas aeruginosa
atgccctgcgggtacttggcgttgaagcgcgcggcaccctcgctgttcagcgactccagcgagcccagtgaattctgcgtaccggtgctgccgctggaaaggaagctgatcagcgcgccgaggctgttgaccagcccggagaggactgcctcgccggccgaacccggtgggatctggcgcaggaagtcggcggtgtccgaacccttgtgcggggcgccgacgctggtggcggaagcgatcaggtcgggacgtacggcggcgacgtag

SEQ ID NO: 345688 - DNA, 1185 bp, Pseudomonas aeruginosa
atgctgacaaggtcgttgctgtccgcggtcttttgcctgttgctgatcgctctgcagccgctgcccgtcgaagccgaatccatcctgccggatgggcgtacgacgacaacgatgcgtccctggctcgataaacgagccaggcagtggctggatgcacgggagccgctgacggtaggcgtggtttcccccgactatccgccgttgtccatcttctacgcaggctcctacaagggcttcacggccgattacctggccctggtgttcgagcggccgttgcgcgtcagggactttccgtcgcggcaggcggcaatcgacgcgttgtcgcaaggggagatcgacctgcttggcgtcggtagcgaggtcgaggcccgacaacacggcttgctggcatccgctgcgtatctttccgaccggccggtactggtgtcttccagcggtgccccgttcgattcgcaggcggagtcctggctggccacggtcaagggctatcttcccgccgaacgtatcaaggctgcctatccgcacagcaggatcatctggttcgactcgccgcagcttgccctggaagcgctgagcatgggggatgtcgatggcgtgctgggggacgcagtttccacgcactacctcatccagacccattacctgctgaacttgcgcatcgagaacttcgcacccatcgacagccagggtttccgtttcctgctccggccaggtgacgaacctctgctcgcgctcatcgatcgcgccctgccgcatattagcgggcgctacggcgacgaactgttgcgcagctggagcgccgggcggcgcctgcgcttcgacgagccccgggtgacgctgtcgccggcggagcagcgttggctctccgcgcacccggtcgtgccggtggtgatcaaccattcccttggcgcgctcgggcaactggataacgaggggaggctgagtggtatcgggcgtgactatctggacctgatcggcaagcgcagtggcctgcggttttccttcactggagcacgcaacttcgtcgagacgaaaagccgactggatgcgggggaggcattggttacgccgaccatgccttcgtcggagcgcttcgattccggcctcgaagtgctgacgccctatctacgcagcaccacggtgctgatgggcgcccgccagggtctgtctcttatacacatctga

SEQ ID NO: 345689 - DNA, 378 bp, Pseudomonas aeruginosa
atgaaatctggcatcgcggcccgtcgcctgttcatcaacgacaccaaggctttggtgcataccgtcgacgggaccgccatgctggtcacgccaggaatcttcaagcgctatgtccaagagcatccggagcttgaaaaactggcccaggccaaggaaacgaccggctggaagctggtgcagcgcgcgttcgagaaacagggtcttcaccgaaagaccagtaagaacctgaacatctggaccatcaaggtttcaggtcctcgcaagacaaaagagctcaaggcttacctgcttcaggatcccaaactgctgttccctgtacagcctctggacaacccaagcctcacggtcatcaccgatgccgaaggaggtgtggaatga

SEQ ID NO: 345690 - DNA, 1005 bp, Pseudomonas aeruginosa
atggttgatcaccaccggcacgaccgggtgcgcggagagccaacgctgctccgccggcgacagcgtcacccggggctcgtcgaagcgcaggcgccgcccggcgctccagctgcgcaacagttcgtcgccgtagcgcccgctaatatgcggcagggcgcgatcgatgagcgcgagcagaggttcgtcacctggccggagcaggaaacggaaaccctggctgtcgatgggtgcgaagttctcgatgcgcaagttcagcaggtaatgggtctggatgaggtagtgcgtggaaactgcgtcccccagcacgccatcgacatcccccatgctcagcgcttccagggcaagctgcggcgagtcgaaccagatgatcctgctgtgcggataggcagccttgatacgttcggcgggaagatagcccttgaccgtggccagccaggactccgcctgcgaatcgaacggggcaccgctggaagacaccagtaccggccggtcggaaagatacgcagcggatgccagcaagccgtgttgtcgggcctcgacctcgctaccgacgccaagcaggtcgatctccccttgcgacaacgcgtcgattgccgcctgccgcgacggaaagtccctgacgcgcaacggccgctcgaacaccagggccaggtaatcggccgtgaagcccttgtaggagcctgcgtagaagatggacaacggcggatagtcgggggaaaccacgcctaccgtcagcggctcccgtgcatccagccactgcctggctcgtttatcgagccagggacgcatcgttgtcgtcgtacgcccatccggcaggatggattcggcttcgacgggcagcggctgcagagcgatcagcaacaggcaaaagaccgcggacagcaacgaccttgtcagcatgtcgagtctacgatggcaaagttctccggccggacagaaagcagcgcatccgcgacccggagcctgcggatacatcggcaacgatgccgccatgttagcaggtag

SEQ ID NO: 345691 - DNA, 438 bp, Pseudomonas aeruginosa
atgggcagcccggtgggaaaggcctggatgccgatgtcggttacgcgcccaaacgttgaccaggccgcgttcaccttgctcgaactgctggtggtgctggtgatcgtcggggccattgctgcggtggcgttgcccggcctggtgaggatgcaggagacctgggcgcgcaggaccgcgctggacgatctgttcaatcaattgcagaccttgggctatcgcgtgcgcagcgatgggcgggagctgctcattggtgagagcggggcggttcccgagcagttgctgcgactgcccgatggctggacggttactgctcggccgccgatacgttacatggcaaacggagtttgcctgggcggaaagttgcaggtccatcatgggcgcgcgacacatacgctgctgcttcagccccccctctgcgcgcccgggacgatccgctga

SEQ ID NO: 345692 - DNA, 402 bp, Pseudomonas aeruginosa
atgaacgactcccccagcaccgccgtacgcacctggctgaaaggcttccgccccctgaccctgaacgctcgaccgcgcgactgcctgcgcgccggactcggtgcctgcatcggcgcgctcgccgcggtattcgcctgccaggcgttgttcggcagcgaactggcgctgcgcctggcagcgccgctcggcgcatccgccgtactactgttcgccctcgcctccagccccctggcgcaaccctggtcgatgctcggcggcaacctggtcgccgccctggccggcggcctcagcgcctattggttcggacacgatctggccccggccctggtcggcatggccctcggcatgctgctgatgttcccctgcgctgcctgcatccgccgagctgcgcgctggccctga

SEQ ID NO: 345693 - DNA, 1005 bp, Pseudomonas aeruginosa
atgcccgaaccgcgcctgattgcctgcctgatctatcccgacgtgatgagcctggacgtgaccggaccgctgcaggtattcgcctcggccaacgtcgaacgccagcgccagggcctgccgcctttctaccggatacaggtgctcggcgagcgtagcgaagcggtgcccagttccgcgggcatccgcatctgcgccgacctcgcctggcgcgactgtccgccggaaagcctggacaccctgttggtgcccggcggcctcggtgtcgaggcgcagacccgcaacgccgacctgctcgcctggctgaaagccgccgaaccgtgcatacggcggctcggctcggtgtgttcgggagcgctgatcctggccgccgccggggttctcgacgggcgcccggcgaccacccactgggccgacgtggcgacgctgcgccaggggtttcccggcgtccatgtgcaaggcgaccgcctgcacacctacgacccgcggtgccgcgacggcgacgcccacatcttcacctcggccggcgtcacggcgggaatcgacctggccctggcgctggtcgaggccgacctcggccgcagcctggcgctcagcgtcgcgcgacgcctggtgatgttcctcaagcgtcctggcggccaggcccagttcagcgcctggctgaccccggaaccgagccgcaccccgcgcctggccgcgctgctggagtggattcccgccaacctcgccggcgacctgtccctggaagccctcgccgaccaggcctgcatgagcccgcgtacgttgtcccgggtatttctccaggaactgggcgtggcgcccggtcgctacgtcgagcgggttcgcctggaggccgcgcgcgccctgctgcaggacgcccaggcgtcgatcgccacggtgtcccggctgtgcggcttcggccatccggaaaacctccggcggacgttccacaagcatctttcggtcagcccccaggaatacgccgaacgcttcggcatgctggcctga

SEQ ID NO: 345694 - DNA, 1206 bp, Pseudomonas aeruginosa
atgaacttcccctggcgcgacggcaaccgcgtagaactgctgatcaacggcgaagagtactttccgcgcctgttccagtgcatcgccgaggcgcgccgggagatcctcctggaaaccttcatcatcttcgaggacgaggtcggccggcagttgcaggaagccctcagcgccgccgccgagcgcggtgtcgaggtgcaggtcacggtggacggctacggcaccgcctcgctcagcccggactacctggccaggctggccgcctccggggttcgcgtgcacctgttcgacccgcgcccgcgcctgctcggcatgcgcaccaacctgtttcgccggttgcaccgcaagctggtggtgatcgatcgccggcaggccttcgtcggcggcattaattacggcgaggaccacctggtacgtcgcggcaacatggccaagcaggactacgcggtgcgcgtcgagggcccggtggtgcgcgatatccgccaggcctgcctggcgctgctcgaaccggacgccgactacccgccgttgcggccgtcgggcgccgggcagccggcgcgggtgcgcctggtgatccgcgacaacgaccagtccagcgacgacatcgagcgcgagtacctgcaggcgatccgccaggcgcggcgacgcctgctgatcgccaacgcctatttcttccccggctaccgcctgcttcgcgagctgcgcgatgcggcgcgccgcggcgtgcgcgtcgacctggtactacagggcatgccggacatgccgctggtgcgcctgtgcagccggctgctctacgactacctgctgcgcgagggcgtgcgtatccacgaatactgccagcgtccgctgcacggcaaggtcgcggtgatcgacgacgactggtcgaccatcggctcgagcaatctcgatcccctcagcctgtcgctgaacctggaggccaacctggtgatccgcgacgtcgccttcaacggccagctctaccagcacctgcgcgagctggcgcgccgccactgccggcgcatcagccgccgccacgcgaggcgcggctactggtggcgagcgccgctgatcttcctcggcttccacttttccaggcactttccggctatcgccggttgggtacccgcccatctgccgcgcctgaaatcgctggagccgcgtccgtcgcggcgctggcaggaacgccagggccagcggggcaacccatga

SEQ ID NO: 345695 - DNA, 456 bp, Pseudomonas aeruginosa; identical to SEQ ID NO: 339352

SEQ ID NO: 345696 - DNA, 1215 bp, Pseudomonas aeruginosa
atgagtgagaataaaaaacagcagttggtgccacggctgcggttccccgagttttgtgatgaccagtcctggagctttcagtcactcgggagacttgcaagacgctcaaccaaaaaaaataccgagggcgatattacccgtgttttgaccaattctgctgaatatggcgtgattgaccagcgcgacttcttcgacaaggatattgccaaccaaggaaacctagagggttactacatcgttgaggaaggagattacgtttataacccccgtatctccgcaacagcccccgttggacccgtctcgaagaacagaataggtctcggcgtgatgtcgccgttgtatacggtattcaggttcaataacacgcagaacgatatatacgcccactacttcaaatcgacgcattggcatcagtatatgcgccaagcatcgagcacgggtgctcgccatgaccgcatgagcatcacaaatgatgatttcatggggttgccacttcctgtttccaaaccagaagaacaacaaaaaatcgctgactgcctgtcttcgctagatgatctcatcgcagcggaaagccaaaagctcgacaccctcaagacccacaaaaagggcctgatgcagcagcttttcccccgcgaaggcgaaaccgtgccacggctgcggtttccagagtttcgggaagctccagcatggggcaaggagaaattggaaaaacttattactacggttagcccaccgtcgaaactgcagtcatccaactatgggacgcaaggtaagtttcccatcatcgaccaatctcaagagtttatttgtggctggactgatgatgaacgcgctgtaattactgaatcgctgccactcatcatatttggcgaccacacctgcgccctcaagtttgttgacaaaccgtttgcgcaaggcgccgatggcatcaaaattctcaaggtaaggcccgccatctctgctgaatatttgtttcattccctcagccaccgtccgttggcgatggaggactacaagcgtcatttttcgatgctgaaggagcgtgcagttgtttttcctgatatcgaatcaggcgagcaacaaaaaatcgctgactccctgtcttcgctggacgatctgatcaccgcccaaacccagaaaatcgatgccctaaagacccacaaaaagggcctgatgcagcagttatttccgacgctggatgaggtggacgcatga

SEQ ID NO: 345697 - DNA, 1587 bp, Pseudomonas aeruginosa
atgcgtttgacgtttcctgtcttgtctctcgttgggattctgttgagctgctctgtcgggcaagcagccgagccgcaattgtcctcgatgcgctgcttcgccagtccggcggcgcccgttaccgcctacgccccggccaaggaggccgccatgtccgctgatgcttatcacgctccgaaaacgtcgccgcgcctggaaaccctggatgtactcagcgtaggcatgagtctggatgtgtttcgccaggggcaggtgtggaaggccttgcaggagcaaaatgccatgcaggccgaggccttacatgtcggcagcatcctgccgatggacccgaggaagtatccggttacagccgatgacaaggatattgcttctgaaaagcgagaggctgatgctctggagctaggactgaagaactttctggagaaatggcctattcctaccgtaacggtggtacgtggttggaacccgaatacaccgaatttgcgcttcactcctgaagagactcagggaagcctatcagcaatggttaatgacatgcgcattccagcaggactgcactggcatcgtattgtcaatctgcaggatggcattatctgcaacgatacgcctgaaggagtattggaggcgttgttcagattgttcgaacgcaatcctgacttgccggcagtactgatatatgccaatgaaggcttcaacatggccctgtccctgatggcaaaaggagagaagcccatcggtgtgggaactggcccaagacagccgggcgagttgactgacaccatggtcgccctgatcgtcggccgccccgagcgggtcgactggctacgccagttcgccccctacaccaaggtcaacgaaaaccggatcgaccccgagttccgtggctggggctggcgcaagccgccggtggagttccgccccacgccgttcattccccagccctggaccgagcgggctctggagcagtgggatgcgttgccggtgctggccaggctgcatcggccggtgagtgtgccgctgacccgcccggataccggcgaacggctcaagcgcgaagctctcaccgcacaactggccgctgcctggaagacggccagtgccgggctcaggccggcgcccgcccggctgttctacgacggcggtttgaacgccacgccgctggccgaactcaccccggcgctgggcgccgcgcagagttcgctggacttgctggactcgcgggaaagctacgacctgacccagcgcctgggcgacaccggcgcggcctcgcccttcgttggcatcgccctggcgaccatggccagctacctcaacggcgacagcagcatggtgatgccgttgcggcgcaaggaccaggcgaccctgatcggcatcagctcgccgacgccggggaagaagcccgctcacgacccgttcggcgtcgacctgctgccgcagaccgccagcggcgacggtccgccgccatcggccgacccggtggcgcccgccagtcggctcacgacccggttgccgcccggcgaagactatgccctggaagagttcctgagcagcctcaaacccagcaccgactggcaggacgatttgtag

SEQ ID NO: 345698 - DNA, 636 bp, Pseudomonas aeruginosa
  misc_feature (623)..(632): n is a, c, g, or t
atggctagctattatatagaaaactctttgaaattcttgttttttgtcctgttgaccttgatgctttcttttcccaagtcatttgcagttataaagatagtaattcttgcttttatgttttcaatggtttttttacatatcgttcttggtggggttagaagattttctctggatattatttttttctatctggtgttcattttgctggctgtaatttggttgatcgtcgggcttctgaatgatggctatgcgatcgcattaggtgatgctttcaggttgtatgtggtcttttcgttgatatttttggttctttatctctggttggagaatttcgattatctacccttgattttttcttcgatcatggtttccacgataatcatatttgctttctgtttcttgtctattttcgaggcgctgtattcggtcagtctcttccccgaatttcttcgcgttgaattaaatgtcatggctggtgtgcatgaggggcattttcagctcggaaataatagtgtaaattcgctattctttactgttccttttcttttgtctgcgcttgtgtgctctagcgagctttccaagagatataggtttcttttctttgtctccttggttcttggagnnnnnnnnnngtga

SEQ ID NO: 345699 - DNA, 279 bp, Pseudomonas aeruginosa
atgtggagcgatctctcgaaattctttgtgatccacaagaagaaccacgacatccgcctcctgcatagccgagtcagtagaagcaagagtcaagtttcccgagaattttcccgggagctcctcgatattgggctccactacaagtactcggcccggatgagacgcaacgacctgctgcgcgattgcaattgccgggctctcacgaaggtcgtcgatatttgccttgaatgccaagccgaaacatgcaacggacacatccctagggatggtctgaagtag

SEQ ID NO: 345700 - DNA, 360 bp, Pseudomonas aeruginosa
atggggccggcttgcgatttcaagtcccagcaacggcggacaaccactcgcggttcgttgcgtgatgccgaactcccctccataaaccgccttgtagcccggatacaggtgcgcggcatgagagtccccccacaacaagagattaccctgcttacctacgctgactggcgggcacttctggaagctctggtacgcctgttccggcttgaggaagcaactcccctctcgatagctgacagcataaggaaatctgtatttcgccagatcctggacgagtctggggaaacgctccgcaacgccttccagcaagtgaatcttgtaaccacagacaccagctatcgccatgaccgccaacggtag

SEQ ID NO: 345701 - DNA, 1506 bp, Pseudomonas aeruginosa
gtggcggcgcgtcctctcctgctctcgctgcacggtggcgccggcgcgctgttcggcgtgttgctgttcgtggtgctgttcagtggcgcctggagtcttggccacgacgacctgcgcgagtggctgcgggccccggcgcaggcgggaggagaagcccttgcgctggagcgcctgctcgaacgggcgggcgaggaaggcgtcgacatccgcgatgcgaccctgctgctgcccgctcccggccatgccgccttcagcgtctgcgatgcgcgcctggactgccggctggacctcgacccggccagcggccgggtgctgccaccgatgccggcgctggacctcctgctgaacctgcacaagagcctgttcgtcggcttccccgggcgggtgctggtcagcctgttcggcgtatcgctgttgctgctgtgcctggccggcgtgctgctgcacagccgccgctggcgcgacctgcggcgttggcggcgggatcgcgggctgcgcctggcgctgttcgacctgcatggcctgatcggcatctggggactgccctggctgctgttgttcggtttcaccggcgcgctcagcgggctgggcgctctcgggaccctgctgctggcgccggtggcctacccgcaggaaccgaaccgggtattcgtcgagttgatgggaccgccgccgcccgccgccgaggggcggccattggcgtcccgcatcgatctcgaccgcctgcttgccggcgatgccgtgcgggcgcccggcttcgtcgcccagcgtttgagcctcagtcatgccggggatgtcgccggcagcgtggagatcgccggtatccggcgtggcctgccgagcaccgcgaacttcgagcggcaccgctatcggctggccgacggcaccctgctcggcgagcgcagctcggcgcagcgcggtttctggctgcgcgccttcatcgccgtgcagccgttgcatttcgcccagtaccagtggctcgggccgggctggtccgccgcgttgcgcggcctgcacctggcgatgggcctcggcgcctgcctgctctgcgccagcggcctgtacctgtggctgcaacgacgcgcctcggcgccggacgcccgcgtacggctcttgcagcgcctgagccagggtttctgtgccggcctggtggcggcggccgcgttgctcctgctggggctgcaactcgcgccctcggagctactcgccggaccctggccggggcggctgttccttgtcctgtgggccgccgctggcctggcggcgttgctgctgccgggcgactggccgctggcgcgcgggttgctcggcgtcgccgggctggcctgcctggcggccgccgtcgcgcacctggcgccctggctcatgcgcggccggctgccggccctgggccccgacctctccctgatcctctgcggcgcgctgctcatccggcacgcctggatgcaggcgcgcgccgccgcgccacccgcccacccccgtgtcaccggagaccaccatgcttga

SEQ ID NO: 345702 - DNA, 1953 bp, Pseudomonas aeruginosa
atgagtcgacacaaattaccggtcggagtcattgatttttttgatcgaacaactagaaaaataaatcatatatacagacctgcatggcttcttaatgagctggaaagttctacatgggtcgtagactcaggggtggttgttcggaatgtagacggcaccattaaaggtggtgttcgtctaaattggaacaggcttttgccaagcggaagcttcacaagccctgtttatgcggttcctttggaacaggcaaaaatgatagtggtgtgcgcctatgatggagctcttaaagtcgctagatcgttaagaggcattcttcactttcatttatatctgttgtggctagctgagtttcttgctgttcgatatggaaacaagttttctgaagaggggttttctatttttggggtggatgacgtagttgagtttcttggagtggcagaggtaggaggtgttagtggaacaggggctttcatacagcgctgggaagattatctagcaaattccaaggatggaattgagccaatatcactttccgagcatttgggaaaactaggagcactggatggtaacggtaatctaaatttgcgcttcgctgcggctgctttgggggttgactacaaacggttatctcaatctaccgagttcagaagatacttgacgcatgggtttgattgtgaggctggaggtaagtccagcgagaacggggcatcaagagccacaactgctctatcaaactggatggttaatttctgtgaactgctatcttctctgcctattcaatcgcatgtagaaataggtaatccttatttaatatcggatattgtgcggcctttccgcatcggaggaaacggtagaacaagaaccttgcctctttctacgggaagaagtcttatgttcggttgcggcaaatggatgattgatacgtatccggcactcaactattactgcaatgaagttgttcctctttcacggtcgataatggatgagtcgaatgtttcagtgtttacggcgttatccatatcagaagaaattgttccgattccagatggactggtctctgcttttgatgcttacagacgaatgcaggtggatcctcttatctctgaggcaaaaattagaactcagtttccattctcgattttcttgttgaggcttcatacggccgtctgcttctgcttgatcggtgtcctgactagttgtcgcagaaatgaactggttgatctggataaaagcgctagttatgaggttgacggtagattctatctttctgttttactgaggaaaactgggtttgataatatgcgtgagccgatggaaaagccggttccgcgccttgtttatgagtgtttattatctttaaatgcgctaaaaaaactttggcaaatcatagtgccttcaagtgatattttatttaagtcgcaggcgttttttaaagttaacgtcagaggtgcctctccattcaatgtggctgatgcttatgtttttctaaaggagcttagtgagtacctaaaacttgttgataactcgggagaacgatgggtggtgctcccacatcaacttcgccgctattttgctatgacattttttcacttcggaggattggagaattccttgccggcgctttcttggtttatggggcatgaagatattggggaaacctggcgctacattaaagaaagcttaacaggaaaagagctcagtgcatccgaagctgcgttggctacttctgcagtttgctctgatgatcaatctcatggcgttcagcaactcaggaatatccttattaagcattttggcactgaaaaaatcaacgtcatgcatgaggatgagttaagagattacctagaattattgtcggaaaaaggtgtatacaccgctaccccaattcaaattaatgctggaaaaagaaagaggtatacggtggcagtttcagttagggatggtctgaagtag

SEQ ID NO: 345703 - DNA, 330 bp, Pseudomonas aeruginosa
atgtcgaacggttatccatatcccaaatatcgcgcggatatcgatggattacgtgcggtggcggtactttccgtcgtcgctttccatgcctttcccgaatggtttcaggggggcttcatcggtgtagacgtatttttcgtcatttccggcttcctgatttccagcatcattttcaaaggactggaaagggggacgttccgcttcgtcgatttctatgtgcgtcgaatcagaaggatcttccccgccttattgctggtgctggctgccagcggtgtgatgggatgggcagtgctacttcctgatgagtacgcacaactagggaaactctga

SEQ ID NO: 345704 - DNA, 159 bp, Pseudomonas aeruginosa; identical to SEQ ID NO: 324252

SEQ ID NO: 345705 - DNA, 375 bp, Pseudomonas aeruginosa
atggcacgcaagtcccgcgagctggacgaaaccgtccacgaactggaaaagaccaagcggcgcatccaaaccatgaaggcggatgaggccgagaaagagcttcgccaggaggcaacggcgatcgctttcgaagccgaggccgacatcagcggcaagctgcgcgaagccttctccgtcatgctcgaccacgccgaaaagaccggtaccgatccccgcaccttccaggccggtctggtgcgccacctcgaaaaactgctcctgcagattcgcgaagagttccagttgcccgacggcgaagcccccgatgacatcagcgaattcggctggatcgagcaaatgggcaagtcccagcctgcaggcgtggctgaggactga

SEQ ID NO: 345706 - DNA, 126 bp, Pseudomonas aeruginosa
atgggcgtgatgcagatctacagcctcgacaccgccgccgatgccggagccaccgagaaagtcggccagttgggcgtggccgacaacctcaccagcctgctgaccgtactgaaatccttcacctga

SEQ ID NO: 345707 - DNA, 390 bp, Pseudomonas aeruginosa
atgaaacgcccgctgatcctcgccatcgcccttgctaccctgaccgccaatgccgccttcgccgcaccgcgggtcgaatccatcgccctgcgcggtgcccaacaactgatcgcctccgacggttccgaccgtaccctcgagcgcctgcgcaagacccaggcgccgcgcgtccaggaagaacgccgggtcgccgaaagcggcagcgagcagaccatcgatcgcttgcaccgcgacatgaccagccgcgaggcgcgcctggccgagaacggcagcgaacagaccgtcgaccgtctgcacaaggacatggggcgcgtcgatctgcgcctggccgacaacggtagcgagcgcaccgtcgaccgcctgcatcgggagatgcggcgccccgcctga

SEQ ID NO: 345708 - DNA, 1212 bp, Pseudomonas aeruginosa
atgtccagccaacccagctccctgctccgccatcgtcccttcctcgccttctggctggcccgcgtctgcaccgccagcggcttccagatgctcaccgtggccatcggctggcacatctacgaactgaccggcaatgtcctcgacctgggcctggtaggcctggtcgaattcctcccgcgggtactgttcatgctccacaccgggcacgttgccgaccgctacgaccgacgcaggatcgccgccctctgccagaccggccaggccctggtggcggtggcgctggtgctcggcgcggcttcgggagagatcacccgcaacatgatcttcgtcctcgccttcgccctcggtaccgcccgcgccttcgaaatgccgaccacccaggcgctgctgccgaacctggtaccggccgggctgttcccgcgcgcggtggccgcttcggcttcggcgatgcaggcggcgaccattgccgccccggccctcggcggcctgctctatgcgttcggtgcctcctgggtctacgtgccgaccgcgactctctacgtcctcgcctgcgtcctgacgctcagcctgccggtacgcaaccagccgctcacccagggcaaggccaccctcgactcgctgctcgccggcatccgtttcatccgcagccgaccggacatcttcggcgcaatctccctcgacctgttcgccgtgctcctcggcggcgccaccgccctgctcccggtgttcgccaaggacatcctgctcaccgggccctggggcctcggcctgctgcgctcggctccagcggtgggcgccctggcgatgtcgttctggctggcgcacttcagcatcgaacgcaacgtcgggcggatcatgttcctctccgtgggcatcttcggcctggcaaccatcgccttcggcctgtcgaaatcgttctggctgtccctcggcgtgctggtggtactcggcgccgcggacatggtcagcatggtcatccgcggcgccttcgtgcagctcgagacccccgacgagatgcgcggccgggtcagcgcggtgaacggcctgttcatcggcgcctcgaaccagctcggcgagttcgagtccgggctcaccgcacactggttcggcacggtaccggcagtggtcctcggcgggatcggcaccctggtggtcaccggagcatggatgaagctgttccctagcctggcgcaacgcgaccgcctgcactga

SEQ ID NO: 345709 - DNA, 3111 bp, Pseudomonas aeruginosa
atggttttcagtgaagattcgcgcgtcaagatcccctgcatcttgcacctggttcgccttggctacagctacctctccctgaagagtgcctcctgggatgagcaaaccaatatcttcccggcgcttttttgttcttcgctggccaggataaaccctggcgtggaagccgatgacatcgatcgcctgctggctgaagtcaagctcttgctagacaacgaagacctcggtcacgccttctacgatcggctcactgagcgctcgggcatccgcctgatcgacttcgataacttcgataacaacagcttccacgttgtgaccgagctgccatgccgaaatggtgatgatgagttccggcccgacatcaccctgcttatcaatggcatgccactggccttcattgaggtcaagaagcctaacaaccgcgaaggcgtgctggctgagcgcaaccgcattgtcacgcgctgccgcaatccgcgcttccgtcgcttcatcaacatcacccagttgatggtcttctccaacaacatggagtacgaagacggctcgccgcagccaatcgaaggcgccttctacgcgagcccttcgtatgacatgccgatcttcaactactttcgcgaagaggaggctttggatctggccgagctgctggccgccgaggatgacgctgtcgaaaacgcggtgctacgcgacaacaatctcagtgtcatcaagcacagcccggagttccttactaacaaggatcccgacgcaccaacgaaccgcatttgcacgtcattgttcagccgccagcgcttggcctttctattgcgttttgcgcttgtctatgtcaatgaggtggatggcctgcaaaagcacgttatgcgttacccgcagcttttcgccaccaaggcgattgagaagaggctcgatgctggtgtacgcaagggtattatctggcacactcagggcagcggcaaaactgcattggcctattacaatacccggtttctcaccgattattttcagcgtcagggcattatcccgaagttctatttcatcgttgaccggctagatctgctcatccaagcccagcgcgaatttaacgggcgcgggctgatcgtacacagcatcgacagtcgagaggccttcgctcgcgacatcaaggccacccaggtgctgcacaaccatagcggcaggccggaaattaccgtcgtcaacatccagaaatttcaggatgacccggacgtgatgcgtaccgaggactacgacgtcagtattcagcgcgtctacttccttgatgaggtgcaccgcagctacgacccgcagggcagtttcctcgccaacctcagccagtcggatcgcagcgccatcaagattggtcttaccggcacccccctactaggcgacgactacaattcccgcgccttgttcggcgactacatccacaagtactactacaacgcatccatcgccgacggctatacgctgcggttgatccgcgaagaaatcgccactaactacaaacttgtcctgcaggaagcgctagccgccgtagaactgcaacagggcgacatcgaccgcaagctcgtctacgcccatccgaagttcgttgagcccatgctcgaatacatcgtgcgtgatttcgaaaagagccgcggtgcgctggccgacgccagcatcggcggcatggtgatctgcgacagcgccgagcaggcccgacagatgttcgagatgttcagcgcccttcatgccaagcagggctcgcccagccccaacctgcaagacttctcgcaagcattaaatgctgctgcgcagcccggcagctacgcagcccgcagcttgctggagaaccgcgtcaaaagcgccgcactgatcctgcacgatgtgggcagcaaggaagagcgcaagcaatgggtggaggacttcaaggcgggcaagatcgacctgcttttcgtctacaacatgctgctcactggttttgatgccaagcgcctgaaaaaactctacctcggccgggtgatccgttcgcacaacctgctgcaggcgctcacccgcgtcaatcgcacctacaaggattttcgctacggctatgtggtcgatttcgccgacatccgcaaggagttcgacgccaccaacaaggcctatttcgacgagctgcaggctgagctgggcgacgagatcgagcactactccaatctgttcaagtccgctgaagaaatcgccgaagaaatcgaagcgatcaaggacattctgtttagcttcaacatcgaaaacgccgaagagttttcgcggcagatcagccaaatccaggatcgcgccacggtgctggcgctcaaaaaggcgctggccgatgcccgcagcctctacaacctgattcgcctgcagggtgactacgcgcttctgcagcagcttgattttcagaagctcaatcagctctatcgtgaaacctgcaaccaccttgacctgcttaacctgaaggagagcattgaatccagcaccgacgccggtaacttgctcaatgtggcgctggaggacgtgctgtttatgttcaccaaggtccgggaagaagagctggtactggctgacaagctcaagaacactctgcgccagacccgcgaggccctggccgagaattttgatcagcaagaccccaagttcatcacgctaagggaagagctggagcggttgttcaagaaaaagaaactcaacgaagtcacccaagacgaaatgaccgccaacataggcgcgctcaacgcgattcatgaccaagtcaaagagctcaatcggcagaacaaccagctgcgcgccaagtaccagggcgacgccaaatacacccgcatccacaagcgcctgcacgagcggggcggcctcacccaaaccgaacgtcgcctgtttgaagcgctctccggcgtcaagcagcaggctgacgagcatgtgctgcagaacactcagcttgtgaacaacgaaagctacttcgaagggatgatgatgccgctggtgattggtgagttccaagttcgccagaaaatccagctcaccccagacgcttcccgcgccatcaaccagttggtggtggccgaatacatcaatgaatttgcctcaggcactcgaacaggaacacgtacgtggtaa

SEQ ID NO: 345710 - DNA, 1635 bp, Pseudomonas aeruginosa
gtggtaacgcaggaatttgagaaacgcactcgtaagctcatcgacagtctcaagggcatttgcgctgcctatggcctgggcaacgatggcaacgaattcaagatcatcacccaggtctttctctataagtttctcaacgacaaattcaccttcgaagccaagaagatccgtcccgagctaagccaagcgctcacttgggagcaggccatggccagtcttagcgcggatgaactagaaatgctgcaattgcagctagggccggacactccacgcctgaagcctgagcacttcctcgcccatctgttcggacggcagaatgagcctgaattcgcgaaattgtttgacgacaccctgcgcgatatcgccattaccaacaacaacatcttcgcggtaaaaaccgatggcggagctaaggtcacgctgtttgatcgggtcagcgaatacatatccgacccgtccaagcgcgacaatttttgccgcgccctgatcaacaagttggtggaattcagcttcgagcgtatcttcacccaaaagtacgacttctacgcagcgctcttcgaatacctgatcaaggactacaacaaggacagcggcggtaaatacgccgagtactataccccgcacgccgtagccaagatcatggccgcgatcctagtgccggagaatgtacgcggaaaaatcaggaacgtgagctgctacgacccttccgcaggttccggcaccctattgatgaacatcgcccatgccatcggcgaacagcgttgcagtatctattcgcaggatatctcgcaaaagtcatccagcctgctgcgcctgaacctgatcctcaacaatcttgtgcactccatccccaacatcatccagggtaacaccatgctccacccctaccaccgggagggcaaggcgcttaaaaaattcgattacatcgtcagcaatccgccgttcaagatggatttcagcgatttccgtaacgagctggacagcaacgagcatcaggagcgcttcttcgctggggtgccgaatattccaaacaagaaaaaagaagggatggcgatctatcagcttttccttcagcacatcatcttttcactgaagcctggcggcagggcagcggtggttgtacccactggttttatcacggtgcaaaacggtatcgaaaagaagattcgccagcatctggtagacaagaaaatgctcgctggtgtggtctccatgcctagcaatatcttcgccactaccggcaccaatgtttccatcttgtttatcgatgcggccaacaaaggagatgtcgtgctacttgacgcatccggcctgggtacgaaagttaaagacggtaagaaccagaagaccttactttctgaggccgaggaagaccacatcattgctacctttaatggtaagtcagcagtagatgatttttctgtggtggttagctacgatgagattgccgccaagaattattccttgagcgcagggcagtattttgaggtgaagattgagtatgccgatctatctcccgagcagtttgcttcgaagatgaaagtttttagctccagtttggagcggctttttggcgagtccgcaagtctggaacaggatattcggaagcaattggcggagttgcggtatgagtga

SEQ ID NO: 345711 - DNA, 1278 bp, Pseudomonas aeruginosa
atgagtgagttaactcgccataaattttctgacttgtaccatatggcttcaggtatttcatcaaagccagagcaggcaggtcacggtgcgccattcttgtcgttttcggctgtctttaataactactttttgccgaatgaactttctgaccggatggatacgtccgaggatgagcaaaaaaaatattcgataaatgaaggggatatttttttaaccaggacaagtgaggttgttgatgagctcggtatgagttcggttgcattgaagagctatccgcaatcgacttatagtggttttctgaaaagacttcgtccgagaaaggaaaaattaacatacccgaagtttatggctttttatctgaggagttatctgttcaggaaggccatgacaaataatgctgtgttaacacttagagcaagtctgaatgaggagatattctcgtatgttgatttgctccttcctaactacggcgagcaggttaaaataggggactttctttatttgttgagtaagaaggtagactgcaacaaccgcatcaatgccgagcttgaggcaatgactagggctctatacgactattggtttgttcagttcgactttcccgatgccaacggcaggccctataagtcttccggtggcaaaatggtttataacgctactctgaaacgggagattcctgcggggtggagggtcgagccgctcttagaaagttgcgaggttgtcgattgtctacattcaaaaaagcctagctcttcatttgaaagcgaggccttctatctgctgcaactggaaaacatccttaataacgggcagatagatttgtcgagcaagtatttcgtttcaagggatgattacaagaaatggacgtcacgaattcaaataaaagaacacgacatagtaatgactaatgctggtcgggttgcagctttcgctcaagtaccagcgggcgttgtttgtggtataggcagaaacattacggcgattcgtccaaatagtattcaaaaaaattttttctttttatctctatccggtagggatgttcaagcgcagattatttccaatcttgaccaaggtgcgttctttaagagtttcaatgtgaaagggatcaaggtattaaatttattgcggccggatactgatttagagtgtgcgtttgaacaaatagttacaccatttatcaggaaaaggcatggagttgcttcggaaaaccagcagctcacccagctccgcgactggctgctgcccatgttgatgaacggccaggtcacagtgccgtaa

SEQ ID NO: 345712 - DNA, 1905 bp, Pseudomonas aeruginosa
atgaagttgcagacgctgcgcctatcgagttttcaatcatacggtcctgtgcctactgacgtcggcctcgaagccatcacctatttgatcggtcctaatggttccggcaagacagctgcactccaagcactctgccgcctgttcgctttcgacccgtcgcagcgtcgtatccagcggtctgacttccatgtcccagccgacgagaaggattttccgggagagcggcagctttggatagaagtagatttccttttccctgaattggcgagtgacggagacaacagtacggttgctcctcattttggacatatgcgcctagatgagccggacggcattccacgagtgcgtttccgtctgagcgccgccatgggccccgaaggcgacatcgaagaaacctttgtttatgtactggacgtcaatccagatggttcgccccttaccacggcgcaggtgccgcgagccgagcgcaatcatattcatgtccactacctgcccgcacgacgtgatcccgctgctcacatcgcttacggagccaacgctttgcttgggcggatactccgagctgtgcagtgggaagaagagcgagacgtcattaggggactcactgatggcataagcaatagcctggcagccaacccatcggtcaatgcgttcagtgtgcatctgcaaaagtcatggacgtcgctgcacaaaggcagtttctttgctgatcctaagatcactttcgtggcatctgagatcgaggccttactgcggcatatgtccgtctcgttcacaccaggtcatgatgaaaacttggtcgacttctcgcgactgagcgatggccagaaatcaatgctgtatctgtccctcgtgctgtcgtcacaggccatagggcgcgccgttttagcagagcaagataagtccttcgaccctgacaaactgcgccccccggtttttaccctgattgctgttgaagagcctgagaacagcctttcccctcattatttgggacggattgtcagtgcattgaatgcgatgacaagccaaggcgatgctcaagccctcatcgctacgcatgcaccttcaatgctccggcgcgtcgagcctgagcacatccgctacttgcgcctgaccgaggaacgacaaacgcgagtaacgtgcattcagttgcctgaaaaaacagacgaagcacacaagttcgtgcgcgaggcagtacaggcatttcccgaagtctatttctctcgattgattgtcctcggggaaggagacagcgaagaaatcgtgttgccgcgcttgttgcgagccaaaggcgcgccgattgatgagtcggctatcgcgatagcgccattggggggcaggcacgtcaaccatttctggcgtctgctggaagccctgcagattccatatctaacgctgctagatttggatgtggcccgccatcaagcaggctgggggcgcttcaagtatgtaaacgaccagttgcgcgcgtttcgagcagataaggttctcccggaaggtcatggcattcctaagtggaactccgatgagcataaggtgcgtgactatcccagttacttaggggcttttgaggagagaggcatctacttctcggatccgttggatctcgatttcgcgatgcttctcgcttacccagatgcttatggcgttgagctggaagcaccagatgctggtgctatcaaagctgttctagggaaaagccatcacggttcatcccaatacagcgaagacgaactcaagctgtttggcacctatcatcagcacttcaagcttggcagcaagcccgcagcgcatatcagtgcacttgctcaactgagtgaccaagagttgcttaaggatatgccggcatccttgagtcgtctggcagacgcggtcatcgccaaactcgcggagttgccggagtga

SEQ ID NO: 345713 - DNA, 1674 bp, Pseudomonas aeruginosa
gtgattgcagtcgacgcctggcagcccgctgacgggctgacgctggaaccaaatgccaaactcgcagccaaggaacaggaacattgtcttgcgttgactgctggaccaggggcaggcaagaccgagatgctggcacagcgagctgattttcttttgcgcactggcacttgtcggtatccaaagcggattctcgccatctcgttcaaagttgatgccagcaagaacctgaaagaacgggttcagcgtcgctgtggctcagatctgggctcacgtttcgatagcttcacttttcatgcttttgccaagcgcgtcatcgatcgatttcgaccggttttgaccgggaatgatgccctggacgcgggttacacaatcatcgataggaaggtgggtttctcccgaacacaaattgcgttcggcgatctggtgccgttggctattaagatattgcagacgtctaaagtagcccgtaacgccattcgccaaacctatagcgatgttttcttggatgagttccaagactgcaccaatctgcagtacgaccttataaagctagcttttcaggacaccagcatacgtctcaccgccgtcggtgataccaaacaaaaaattatgggctgggcgggagcgcttgacggaatatttgaagccttcgctgctgacttcgcagcggtaccgctcaacatgtaccgcaatttccgttctcagcctcgcttactcagagtgcaaaacgagatcatccgtgtcctggacccagcgtcagccatgcccgacgagcagctggcgggggatggaggtgaggtatttgcgtggcaatttgaggacagccgaaaagaggcagagtgcttggccgacttgattgccaactggataagagttgaacagcttccaccgtccgaaatcgcggtgctggtttccaagcagttggagctgtacgccgaccatctcatggcagctttagaggtgcggggcattccgttccgtaatgagcagcagatgcaagacatcactgtcgagcctgcagcgcgcctgatcgtggattatttgtcctgtctatatggccagcgcgaacctaaagcctgggttcggttgatgaaccagttgattcctttcgcggatgatgaaattcaatccagtactcgcaaggatttagatcggctgattaagcagcagcgaaaagccgctgtcgtggctgagcttctcgatgtgccgttctcaggttggtgggaatcggtacgggcgtttttgaagcaagtcagtatcgaaaccctggtcgcgctttcgcctgactatgaatccctcaacaggctcaaggaagttgtccgggacaccagaatgcgcatagaagagttgctcaagattgagcctgatctgctcaaggcccttgagcgctttgcggatgaccaggcggtacgcatcatgacgatgcacaagagtaagggcctggagttcgattcagtgatcctcttgggtatcgaaaaccaaaccttttggggaaaggcagacgaagagcgttgtgcgttctttgttggggtttcacgcgcaaagcgtcggttagtcatgactgtatgtgagcgacgtgagacgccccctgccaagccttacaagtggcgagagcagagagtgcctcatgctgagtttctcagttacaccaccccgtttttaagtaacgcatga

SEQ ID NO: 345714 - DNA, 1431 bp, Pseudomonas aeruginosa
atgcgttatttatttttgtcgcttttgttcttgtccgggttcgcggtgtcggcggatgaacattattattggatgatccagactttgccggatcatttttcttcgccaagtgaagcgtgttctgcctgggcttctaaaacgggcaatccaggtcaatttacgtttactggtgggcttaaggctcgggacgcgacttctttttggtgtgagttccgaaataatgaaaatggcaatacttcggcgggatatggtcccgctgctcgttatggaaaaacgtgtccgcctgagactgtatatgacactgccacgggtgaatgtaagggggaggatgatccttgcaaggatagtttcggtcacgagctgttccatgaacatagggttggtgccgttaaagatggacacttttctgacccgtctgcgccgccgtcatctttgtgtaaaaattcgtgccgctatggttctccagcgactacgggttcgggtaatggttataggattggcaaggattttgatgtttatgtggtgtattcgtatctaggcgagggcgtttcttgtgagtccggtagtgctccagactctacgcctccttctgataagtcgcccagtggttctaatagtagcgattgcacaaacaaggtgactgatgctgaagggcgtgttcactatagctgcacgaagactgatagttatcaggatcctggaaatttgaactgtggtacggcaaatgggcagattgtttgtacggttgccaagccttcgccaaataagactgaaaccactagcaagacggatgttactgaatcgaaaaatccggatggttcaagcgacaagacttcaactactgaaactaccgtgactacgtgcaagggcatgaacgcttgtagctcttcgacgacaacaaatgtcactaatggaaagacgaactctgatggcacggatggcggaagctctacggaatgcaagggtccaggctgtaagccgtcaggggagggcgctggtggcgactctgagggcgaagagaaagaggaggagaaagagtcgtctgtatcgggtgatgaatcgtgcgatgcggtgattgcgtgcgagggcgatgcgatacagtgcgcgatgcttaagcaggaaaagaaacagacgtgcgcctgggactatgaaaaggctaagggaacaatcgagtctgagattgccaaacctgagtatcagttaactgagacaaccattaatacgggcgagctattcaatgccggtattagtgcgagccgctggttgccgtccgcgtgtcctgcgccgaaagttatctcgctgagttccggtcctagtcagacgtttagttgggagcctgagtgtcaaatggcctcgtctttagcgccgattattgttggtctggcgtcgttgttcttcgcggtttatgtcggtcgttccataggaggttga

SEQ ID NO: 345715 - DNA, 207 bp, Pseudomonas aeruginosa
atgcaaaagatgaaacaactgatggttcgtggcggtgttgttctcggctcgctgggtctgctggctggtcaggcgatggctgaagttccggctgaagctacttcggcgttgaccgaggccaaggccgatggtgttgccattggcggcgtcgtcctgggcgtgatcatcgcgattgcggcgttcaagtacattcgccgcgcgctttaa

SEQ ID NO: 345716 - DNA, 1431 bp, Pseudomonas aeruginosa; identical to SEQ ID NO: 345714

SEQ ID NO: 345717 - DNA, 792 bp, Pseudomonas aeruginosa
atgaaccgcacccttaaaaaaatgacccttgccagttgccttgcgctggcccagggctgcactgccttgggcaagtccaacagttttaccgttacggcggacctgccacctgagtttacttacgaagccacggcggcctatgtcccggccaaaggtgagacttgcacagtgccgggtaggcgggataccaaaattggctacaactcgggccgggaaaagtacaaacgtgattcgaagattttgttacgtcgcacggtcagcggctgccctctggtactgcagagcatcgatttctatatctatggctggtacggcaaggctaggggggacttcgggcgtgactcggccctgatcgtcgtacgagacaagctggtcgaggtgaaaaagggcgctttcaatgcggccggggaaagcgagtttgccgggcaatgccagtggctgtttcgtacagccgggaagacccgtgttctgagaaagctcctcgattgcaaaaggatggatgagacgggtgtacggcgcaaagcgaaacctttcgtggcttacaccctggaccaactgcccggcaagacggtgaggttgaggatcaagctggttgacgaagagaggccggggtggggcgacacttgggtcaaagtgcccggtggttggaagcgctgcatgggcaagagttttgacgatcaaagagcctattgcaacggcaactacaaggatttcagcaccttcagaatgccggatgggcgcaactgcaccatctaccccggctgtacggaaaacaaggcggtgaccccatga

SEQ ID NO: 345718 - DNA, 987 bp, Pseudomonas aeruginosa
atgaatacccgcaatttttccctgccgcagttgcagaacctgcccatcgatgaagcacgcatcgttgccgatgcgctggccgtccacgctacttcccgccagatcgatagcgccgcgagcaagctggccgcgctggccgaggcagggctcaagggcgaccgccaggcctatgccgcgtaccagcagttgctctacgtcctttcgttgagcgacgacgtggcgaccgcccagacccggcgttggctggcccgggcgatctatcgcgtcgaagagcgtttcatgcccgccgccgatctttccagggcgctgtccgaggaggatttccagaagcgtctcgaacaggaaatcgccgcgcagtcccgcgagcggcacccgatgtcgcagtacgtgttctccggctcggcctcccgcgcgcagctccaggtgttcctccgtcaccagtggttccgcaccttccgcctgtaccgcgatgcggccgacctgttggtcaacctgaccgatgtggacgaggccgcggcgctcgcgcgctacctctatggcgagttgggcgaggaagacgaaaagggttcgcatccgcgcctgctggccaagctgctcgaagccatcggcctggaggcggacttccaggccgtctcgacgatgcccgaggaaatcgcctacctgaacaatcgcgcccgtgccttccggcatgccgaggtcggttgggggctggcggtgttctacatcaccgaactggtcgtgccggggaaccacgaaaagctctatcgggccctgctccaggccggcctgagcgaggaccaggcggagtactacaaggtccacatcagcctcgtaccgccgcgggccaagcgcgaatggcaactcatcgcgcggcggattccggacgtgcagttccagaatgcgttcctgacctcgctatcgcagcacttccgtgtggaaagggcctattacgacgcgatctgggaagagatgcagagcgtcaagtga

SEQ ID NO: 345719 - DNA, 1890 bp, Pseudomonas aeruginosa
atgagcgacagccccctgacggcgctaccctggcccctccttgccgcccaaccgagcgatgtgcgtgggctccccgcatccgaacgcgacgccctgatcatcagtgctattcaggtcgatggacagtgggtcatcctcagccgctacggcgacgagacctggcaactcgatggcttcgctagcaacgtgccggccaaccagaaacggctggacttcagcaccgtgccaccagcgtttcgggcggtcatgaaggagatgctgtaccgctatagacggcgtgggcgtcgcggagcgggccggcctaaaggcggcatggtgcggaaatttttctctgatgtaatgccattcctgcgtcacctggaagcgctgaagctcgaccacctgggcgcggtgacacccctcgtctgcgcgacctatgtggccaactgcaaggcgcaccggcagacaaggcgctccaagggcaagccactgtcgcagcgtgggctgcaaagccgcttctgggccgtcgaagctctccatgaactcagccagtacactgacaaccggatgccacagcatccctggcctgagacttccgcgaaggcgatggcagggcttaccggcaacagcgcccactaccagcagggaggcaagacgccgctgatccctgatgatgtgttctgcatcctgttcgagcgggcctaccagcaggttgaacgcggccagtacctgcttgacattcgcgatgcgctggatgccctcgcggcacagcgaaagggggcgcgtcgcactgtcattgcggccaagaaccgccaactgagcgcccttgggtgggcggacggtctgaaactattcaacaaggcgttgctcgacctgcgtaccgcctcttatatcatcttggccagcacctgcggctgccgcaaccacgaactggccaatgtgcagtcgggcgcgcaccaccgcacccaagacgatgaaggcaccttctaccactggattcgctcacggtcagacaagaccgacgccggtatccatgactggatgatccccgaggccgccgtacgcgccttgcgcctgatggagcgctgggccgccccctatcaggccatgatcgccgccgaaatcgtgcaacggcgccacaccaacccgcatgacccgcagatcgctgaggcacacaagaaccgtcatgcgctctttctcggcgtgaaagatggcgtcctggtgcgtacgctttccagaatcagttggaacccacacctcaaggcattcgccaaggattgcgggctgagctgggacctcgccagccaccaattccgtcgcaagttcgctaactacgccgcgcacagccgcttcggtgacctacgctatctcaaggaacatttcgcccactggtcgctggacatgaccttgggctacgccatggacgacagttgggggcaacactttgaccttgagctgtacgaccatattaagggagagttggacgacatcaagctcggcgtcgtcgatagctggctgggtgacgagccccttgctggcggctatggccaggcgctcaagcagtggcagcgagagccgcagaacctactgatcttcaaggatcacgcctcaatgctgaaatccattgccgagagcactgcgattcgcagcaacggtcatgcctggtgcactgcagataatgatggctgcatcggcaatacccttgagcgcacccgctgcggcaactgcaacaacgctgtgatcggacgcgatcatgctcccatttaccaacgactttacgatgatctaaaaggtctactgcattgcccagacattggcaatggcggccgtcaacgcgttgagcgcgacctgaatcgctgccgtgacgtattgatccagttagggatggcgccggagaagctgttcgcatga

SEQ ID NO: 345720 - DNA, 1680 bp, Pseudomonas aeruginosa
atgggcaaacgcaaggtatttaccaagaccgatctcggcatcccgcaagtcgagcacagccacgacacgacaggcaatgtagtcattctccccgaggccatccctccgatgaataccacggtcgagttcgggcggaacgccagtaactaccgtcgcttcgactttgcccgctggtacggagccggtatcgaccccatcgcctacgcctgccagcgccagatcgaacgtttcctcgacggccaggagggggctgttgcgggcagcaccgtggctggctactgctcaaatgggctgcgtaatttcctcgactgttgcgtgctgcgagccacggcttttggccatgacttggccctggccgatgtgaaccgggacctgattgacggctatctcgtccatctggctgggctgggcgtggcaactatcgctcagaggaccctttacgcgcataccaagcccgtgctgctcgccttggggcgtcgggggctgatccccctcgtcacctccggtgatgcggccaccttcccgcgcaatcccttcccgaacagcaaccgcaaggccaaaggcgagacggcgctgtccaagcgagagcgacaggcgttcacggcggcgctgcagcaggcaatcaagccgatctggaccgacgacgtgcctgtgaccagcgaactcctaagtatggccctgctggtcgtggcgctgcacaccggacgtaacaccacaccattactggaaatgggccgcgactgctttcgcccgcaccccaaggacagcactgtgttcctagtgctatggaagcggcgtggctacaacaccagcaaggtggcgctacgcgcggagtcggacaccgagcgcctcctggaatccacgccgagcgtgagaaccaatgtggagcgcttgatccaccgcgtgatggccctgaccgcctccctggatgcagaggccccggacgacctcaagggccgcgtgtggctgtatcgcagtcgcaatggcaagggtttcgggcaaatcacggcgttaaacgcagaaatgttggcttgggcgacaaaccgcttcgtagccgagcatggcctaaccgacagcgatggggcgccactgcgcattaacatctcgcgcctgcgcaagaccttcgccaaccgcatctttgagctgaccgacggcgatttggcgaccaccgccgctgccctcggcaatacccttcaggtggccgagcaaaactacctggctcccggtgatgacgcccgtcgcaactggcagttcatgggcgaggtactggtgcaggagttgctgacccagaccatcggtgcgacccataaagacacccctatgggccgctgcgccgacccggaatacggccagtacgccccgaagcgcgagggtgcaacttgcatgaacttcatgaactgcctgcgctgcaagcactatgcggtgaccaccgaagacttgtacaaagtgttcagcttctacttccgcgtgctggccgagcgctcgcgcatggacaagcgacgctgggcgcgggagtacgcccacattccccgcttgatcgaccactacatcgttgccgaggggctacggcgtggcaccttccaggctgcagccgtggaggcagcccgtgagcgcgcccgcacccagccgcacccattctggtctgttgatctgatcgacagcctggaggtctttgcatga

SEQ ID NO: 345721 - DNA, 1182 bp, Pseudomonas aeruginosa
ttggtcgagcccaagcagcggcgcctgttcttcgtcgcggcgctggtattcgctggcgatgcgcaccaggcggcaagccttgccctgcaaggcgctctcgacctgctggcgcaggtctggttgcggctgatccagcatgacgcggacctccagccagggccgctgttcgttcagcaggtcggcctcggccagttcgccgattcgatcgagcacctcgccaagaggcgcggggccgatgcgcaacagttccaccgcgcgtggcaccgggagactctgtacatccttcaggcgctcaccttccagggtgacgaggaggacctggtggcgatagttcacttcggcgaaggacagcggcagcggcgagccgctatagcgaatgcgctcctgtccggcgactttctgtggcttgtgcagatgaccgagggctacgtaggcgatctgctccggaaacaggctggcgggcagcgcttcgacgttgccgatgatcaggtttcgctcggagtcttcggaaaccgagccgccggccatgtgtgcgtggctgacggcgaccagtgcctgtcccggcgtgcgacgggcttgcgcggcggcaaccaggcgttcgtgcacctggcggataccggccaggtaatcgtcgccgagcccgcctccggtgacttcggcgggacgcaggaagggcagggccaggcaccaggcggcgacctggccatccgcgtcgtgcaggggcagcagcaggcgatcgctatcgaggctttcgtctatccagccgatccggccaatggcatgggcgttcagtcgtttcatcagcggagcgggcagttcgatgcgcgcgccggagtcgtggttgcctgcgatcatcacgatctccagccgcggcagccgccgatgggcgctgacgatgaagtcgtagaggcgctcctgggctttgagcggtggattgatcgtgtcgaagatatcgcccgcgatcagcaggacatcggcgcgctgctcttccagctggcgcagcagccagtcgaggaagcgcgcgtgttcatgatcgcggtcctggccgtgcagggtctgacccaggtgccagtcggaggtatgtatgaggcgcatggaacactcgtcgaaagcggcggagccgtggctcgcattccttatatgaggcaacagaaggagagggcggggcaagccagcctataa

SEQ ID NO: 345722 - DNA, 618 bp, Pseudomonas aeruginosa
atgaaggcgaatcctatccggttgaccacgccgctgggccaggccatcggcaagctgttcgcgcgggcgctgccgctgctggcgggcaatcctcccggctcgctcaaggtctacatcttcggcggctgcgcggtgcatctgctcacccatgcgcgtggcagtgcggatatcgatgccgagatcgacgcagcccgcgtgctgcgcaaagacgagatcatgaccgtctacacaccaccagaagactatgaggacagcgatgggcgtgacctccaagtttacctggatcagaactacaccaatgccctggggccgttgcatgaggactaccgcgagcgcgccatccctattgagggtttcgagggcgagcaaccgctgcacatcttcgtcgcggccggcgtggatctggccatctccaagctcggccgctttacggaaaacgatcaatctgatatcgaacagcttatcgaatgcggccgtgtcgaggttggccagtttgttacactggcaacagaagccatcgattatgccgtaggcaaccaacgcgccatgcggggctgtctgcacatggtcaccgcgaaatacttggaggatgggcgagatgccaccccggcaccgtaa

SEQ ID NO: 345723 - DNA, 432 bp, Pseudomonas aeruginosa
gtgctggatctgcatacccggcgggtgatcggctgggcgttctcggccaagccggatgccgaactggtgatcaaggccctggacatggcctacgaacagcgcggcaggccacagcaggtgctgttccattcagaccagggcagccagtacgccagccgcctgtttcggcaacggctctggcgctatcggatgcagcagagcatgagtcgccgagggaattgctgggataactcgccgatggagcgcctgttccgcagtctgaagtcggagtgggtcccgtcaacgggttacctgacggcgcaggaggcccaacgggacatcagtcattacttgatgcaccgctacaactggatcaggccgcatcaattcaacgacgggttaccacctgcggtggccgaagaaaaactcaacccactgtccgggatgggttga

SEQ ID NO: 345724 - DNA, 3141 bp, Pseudomonas aeruginosa
gtgaaggacgcgacgcccatatcacttgagaaggctcacgccatcctcggttggccagagccgacaaatgtcacgcaccctagcggggctggggctgcgatctttgcagacctcgcacgcgaaaaaatcggtcgagcgttggttcattttactgacggccagcaggcgtatgtcggtgtgttatctcccgacgtatattcctctacaactgaaccacccattgcgatcgttgttgagtttgcaagcgtggccagtgaaagaactctcagggaactccatcgacttagttggaatttttcgcatagcccgattcttataacgctggagccgaatcttctgcgtgtatggagctgttgcgaggctccggatccaggtaagtcaatttcagagtttcttgttcatcagttgctgcccgaggacctacaagaagatggcgaggcgctagaaaataacgcggctcgtgctctgcactggatcaacttggtttctggagagtttttctcgcaataccctgatcgctttgatcgcgatggtagagcagatcagatgcttcttggcaatcttcgctatattcgtggcgagttagctaaatcgggacttgtagatgatgatgtctgccacgatttgttggctagaataatttttgtacaatttctttttgacagaaaagactctgatggcgcagccgcgctaaccccagcaaagttaggacgattacataccgatggagtcctggcgaagtctcatgcaagttttgacagtgttctttcggattatgacgatacctatagtctttttgattggctgaatgtcaggtttaatggtgacctatttccagggaagggtgatactgcgcagcagcgcgctcaaggatgggcgaaagaaaagaacgttgtaagtaatgagcatcttgcgattcttgctgagtttattcgtggcgatgtagatatgccttctggtcagggatgtctatggccgcagtactcctttgatgtgattcctttagagttcatcagtagtatctacgaaacatttgttacggaacgtgctgctgctgatgggatattctataccccacctcacctcgtggactttgttcttgatagggttctaccatggggagggaaagagtgggatttaaaggtaattgaccccgcgtgcgggtccggtatctttctagtaaaggcatttcaacggctagttcaccgctggaaactttccaatccgaaccaaatcgttcgggccgaagttttgcgcagaattctagatcgtaacctatttggtgtagataaggatccacatgccgttcgtgtggcatgttttagtctatatcttgcaatgtgcgatgagattgagccaaggcattattggacgcaagttgtgtttccaagtatgcgaggcaagcgattaatttgctcggattttttcgaagagacgctgcctggtttcagtagcgagcacgaccttgggtcatatgatctagtcgttggtaatgctccgtggggagaaaacttagtaaccgagtctgctgttgattgggcgaaaaatgcgcgtcccgcttggactgtcgctaacagggatataggcggcttgttcttggctaaagctgcaatgttgctgagggaaggcagcggtgtggttgcgatgattcaatcagcaagtgcattgcttttcaacggttctagagctgcgggattccgaaaggaacttttcttaaggcaccgcgttgaggctatttataacctttccgctttgcgatttaaggttttcaagagaaagtcacacacgacaaagacgtctgtttcgccgtcttgtgtagtaattatgcgagctcgacaacctgagccggatgagcggatttcttatgttagccctaagcacttaaagcctctggttgatgagtttactatagttatagagccgcaagattgccgatgggttacggttcgagaggctatatcggacgatctcgtctggatatcgttaatgtggggtggaagtagagatagggttcttctgaagaaactacagaggcaggcaagtcttcgttctgagtctttgactcgtgatgtaaaggttaggcagggtgtgatctacggtgatagatctaggccggagcctggcttgaacggacttcccctgtttgaggggcgctcgttcccggaagagtcgctgctcactattgatgtagactctctgcctaaaatatctgatatctcggttcattctaaagactcttctgattttagtgcgttttcctggccgcagcttattattaagaaagggtggcagaaggcagtagcaagatttcaggccaggttggcctcttcagctatgaagaacgctgcaatattcaatgatagttatgtaagtattcatgccgactcagatgttctggagcgggccttgattgcattgaatagtatggttgcggtctactttcttcagttaaccagcggtcgaattgcagcctaccgtcctgctgctttggttaatgagctgcttcgggttccgctacctccttcttcgagcgcgcttggagatgtctcttcttttgaggaaattgataatatagcgttcaaagcttatcgcttaaaagatgcggagagggtattggttgaagatatgttcaactacacccttgcagactttaggggcgatgagcgctcggcgggtagacaggccaccagtgggaagcatggtgagcagatgttgcgtgagtactgtcagtatttttctcgcgttataagggcaggctttggtgatgataaggcggtcaaagcaactatctttaggtgtgaagattcacggccgttaccatatcgtctggtggcattccagcttggcgtcgagtcggactcagcgataaatgtcgtagacatcggaactgttgccttgctcaaggagttggagcggatagatctttctcactcggaaggtaacaccaaaaggcggggcatttatcatgaaagagttgtgaaggtatatgactccagtagtggtgcgccgacagtgctaattttgaagccggatatagctcgatactggacgcggagtgcagggctgaacgatgcggatgaagtggctcttgatctttttcgctgggggcaatcagctgtaaacatggaggtgagtaagtga

SEQ ID NO: 345725 - DNA, 666 bp, Pseudomonas aeruginosa
gtgacatcggtgtggccaacttctagcaatgcccctgatcctgctttctctgcattggcctgcagttggatgccggatccttcggagaagcttctagggttcatttgggaagcttatgacgacatggcttccaatcgtccagtgattgaaactaaagaccttgagcgaagcattacgcaactgttggagcaaagagtggatgatgccatgagtggagatgagccattctatgtgcagcatggctcttttgagcatgagacaatggcagctccccctgcgcagccgccggcatatgaccttgcttttgttctacgtgctgatgagcgcgttatgtggccgattgaggcaaaggtgcttgagacacctggtcgattggccgattatgctaaagatgtaaagaatgaattcttgacttgccgctatgctccattttctggttctggcgctatgttgggatatttgttaagcggaagcactgcagatgcccttactggtattgagaagaagcttggttgtacattgcagtcagtgaacggatattctgcaaggccacatcgaaaatcgacccatactcggactgtgcctgctggtaagagctaccctattaactttgactgtcatcatcttattcttgagtatttgggcttaaaacgttctacgtcctag

SEQ ID NO: 345726 - DNA, 1044 bp, Pseudomonas aeruginosa
atgaaaacccaggaagaaatatttgagatcgtgaaggccagccgccaacggataaaagaactgccagccagaaaactatctaagtcgactgccgaaggttatgcccgcgaatacaacagacttgttggcgatgaaggggctgagccagagaaactatggtcagcgatttgcaaaaccaacagtaagtcgacctaccgaagaagagttgctgcagtaatgcactgttgtagatccttgctgcgagagtcattacaaaagcaagatgcagctcaacaggcagaggatataagtagcctgagtagccatgtgtcagaaattgaaggattgatagggattatgagaatcgttgaaagacataagggggcatgtcctctcgaatctacagcaagacggaagtcaaaacgatctgatctaaggaagctttcgagtgattggcgagaacagctgcacaaacaattcatacatagtaagtatgagctggcctacctggttgaggcggtatctggatgtcgaccaggtgagctggagaagggcgtgaaagtgatttgtactctggagggcactctaactatccgaatcgataacggggtcaaggttagtgaccagaaaggccagccctggcgtgagatcacctatcgagtcgatcagcacccgttggttagagctctcttcgaggcttgcagaaagccagaaaaaagcatagatgagagcgagacagtcgtctacatcgagaaaactactaactggcgagcagcgctgtcgtcggctggacaaaagctctggccaaagctcaacttcaggatctgcccctaccaccttcgaaatgctacagctagtgactggaagtgtaccggcatgggggacgaagatatctcggccgcgctaggtcactgcgtaaataaaaccgccagcatctatggacagttccagacagggcaaggaagtgggggactgcgtcccgataaggtgaaggctgcacgttctattttgaacacacgaacttctatcccagggatagaccaaatacccttcaacgtcacgtga

SEQ ID NO: 345727 - DNA, 246 bp, Pseudomonas aeruginosa
atggcttccagtatcctatcacctcagcatttttcccaaaacctcacactcgatttactaacagaagtcgcgcccgagcttgacacacttgatggtgagaggctgttagagaaattatcgggcatgttgcagccggcgttagataccgtcgtagcggcttacaagttagcttcggaaaatgaggtcacggaacaggcgtttcagttgtttctaaaaaacctcgttggtgccaacgagggtaactga

SEQ ID NO: 345728 - DNA, 1737 bp, Pseudomonas aeruginosa
atgcttaatatcgctgggaagccgctatttgtcccatttctagacgctcccctacctgaagttaaaattaaaaacaataaagagcttgcaggctttttaggcatctcgctcggccgcctaacttattatgcctattaccttcctgagaacaaaaaatacgcttcttttaaaataaaaaagagaggtggcggcgaacgccttatcgaagctccggtcaagggcctcaaggacatccaacgagaagttgttagaaaatttgaagacgactttaaacctagagcatgtgtttactcctacgtcaaaggtcggggtatcgttgaaaatgccgatatccatgaccttcagcgctggatacttcgtatagacctaaaagattttttccattccataacacaaaaaagagttgccggaatattttccagcccaccattcatgctttctcctgatgcagcaaggacacttagcttcatttgcacgaaggatgggcgactaacccagggcgcgcctagcagtccatttctcagcaacttagtctgtagaggcttagactaccgtcttaaggaacttgccgcgaaaaacaagtgctattatacgcgctatgctgatgatatatttttctccaacagtggcgccatatttcctcgatcattagccgaaaggctagaagacaacagcctaaagcttggcgaagaactaacgaatataatccaaggagctggattttctataaatgaaaacaaggcctttctgaggagtcgagcggagcgccaaatagtaacagggctagttgtcaataaaaaggtcaacgtccctaaagaattcattcgttctgtacgcgcatcactttactcttgggaaaaatttggcctagaactcgcggaaaagcactggagggaaaaagtcgacaaaagaagccggcatgagagagaaagccccaggtttaaatgggtggtaagaggacagattaaccacatcggacatgtaaaaggctactcggatccggtcttcctgtctcttgctcgaaggcttcaagccctagactctcagtacaagctggacgaaattaagatcatcaattcgatcgcagaagaaattcacatatactcagaaggcataacagacattaagcatttaaaaaatgcttacattgagcttcagcgcagcggcgagattaacgacctgaatattgtttttaaagagacaaagaaatcaggaagcccggcgctcaaagcactttgcgaaaacttgagcgaagcgctccaacgtcatttgacaatttgtatttttgatcgagacgagcgagacatcattactagcatgggtggctcacctggtagctacaaagaccatgggaacaatgtattcagcctagtaatacccgttccagagttccgagaaaccgagtttgtatgtatcgaacacctatatcgagatgagcaccttttcctcgaagatcaagatggtcgccgactattcgcaagagatgaatttgactctgttagctgcttcaaaaaagagcgaccactattttgcagataccctaataagcaatcattgatttatgactccgacgtaatcgatcttgcagaaagaaaaaatgtcgccctccccaagaataaatttgcagaatacgtaacttccaagacacctccatttgacaatatggacatatcaggctttagatgcgtcttcgagcaaattagggatatagccaaatcgtaccgctctaagcgataa

SEQ ID NO: 345729 - DNA, 225 bp, Pseudomonas aeruginosa
atgaccaggcgccggtcatccgtggcatcgcccgcagcgccgtcggcgctgctgggcgacattcgggtactgattgaggcggcgcggcaacgcgccgcctcgacggtgaatagcgagctgacgatgctctactggcgcatcggccagcgcatccacacgcaggtgcgtattccacgcgatggcggacacgattccatgctgatggcggacagtgttccagcgtga

SEQ ID NO: 345730 - DNA, 1524 bp, Pseudomonas aeruginosa
atgagcaaactacgacacacactgcaactgctgcaccgcggggccttgagcacccgtcaaatcggtgccgccctcggcatctccaaatccactgtcagcgagatagccagctacgcgcgcgtggccggcgtggactgggcactggcccagagcctgaacgacgacgaactccaggcccggctctacaagccacccgtggcgcgcgagtcccggcaccttgaacccgaccacgcccacatccaccgcgaactgcgccgacctggcgtgacgctgcagttgctttgggaggaataccagcaacagcacagcgggcaggcgtacaagtacagcgccttctgcgagaagtacaaggcctgggcccggcgcctgcagcgctccatgcgccagacccacacgggcggtgacaagctctttgtggactacgccggccagaccgttcccgtggtggatgccgacactggcgagatacgccaggcccaggtcttcgtggccgtgctgggcgcatcgaactacacctacgcctgcgccaccgccagccagaaggccaccgactgggtggccagcatcattagcgcgctggagttcatcggcggcgtgccccgcctgctggtgcctgaccagccgcgcgccctcatggcccgacccgaccgttacgagcccaccgcgcaccgcctgctcgaagagctctgtgcgcactacagcctggccgtgatgcccgcgcgcccggccaagccacgcgacaaacccaaggtggaggtcgctgtgcaggtggtcgagcgctggattctggccaggctgcgccaccagaccttcttcagcctggccgagctcaaccgggcgattgccgccttgctggtggacttgaaccagcgcgcgttcaagaagctgccgggcaaccgcactagcgccttcgccgaactcgaccggccagccctgcgccccctgccgccggtgcgcatgcccatcgcgcgcttcaaacccgcccgcgtcaacatcgattaccacgttgagctcgatggccactactactcggtgccccacgccctggtgggtgagccggtggagttgcgcatcacggccggcacgctcgaagtcctgcacggcagcaaacgcgtggccgcccacgccctcaatccccgacggggtgcacacaccaccacgcccgagcacatgccggcctcgcaccgggcgcacctgcagtggacgccggccaagctcatcgcctggggtgagcgcgtgggcgcggccaccgccgccgtggtgcgctggcagatggagcaccgccagcatcccgagcagggttaccgctcctgtctgggcctcatgcgcctgggccgtgagtacggggctgaccggctggaggccgcctgtgcgcgggcgcagtcgattcgctcaccgtcctacaagagcatcgcctccatcctgggctgcggcctggaccagcggccgctggatgcgccgatggccgcacaggcgaacctgccgctgcacgagaacgtgcgcgggccgggctactaccactga

SEQ ID NO: 345731 - DNA, 738 bp, Pseudomonas aeruginosa
atgctcaacgaacagaccttgaaccaactgcgcgccctgcgcctggacggcatggtggccgccctcagcgacgcggccacccacatcacggccagcgagctgccctttgaacaacgcctggcgctgctggtgcagcgcgaggtggactggcgtgacagcaagcgcctggagcgcctgttgaaggcggcccgcctgaaggtctccagtgcctgcctggaggacatcgactggcgcgccagccggggcctgagccgagaggtcatcaccagcctggccggcggggactggctgcgccatggccacaacgtgctgctcaccggcgccaccgggtgcggcaagacgtggctcgcctgcgcactggggcagcaggccgcgcgcctgggcttctcggtgctctacacccgcgcgccacggctgctgcaggagctgcacgtggcccacggcgatggcagcctgggcaaacggctggcgcaactggcgcggctggacctgctcatcctggacgacttcggcatcgcgccgattgccgcgcacgagcgaaacgacctgctggaattgctggacgaccgggtgggcacgcgctcgacgctcatcaccagccagttgccggtgacggcctggcacgcctggctggacgagcccacgctggccgacgccatcctggaccgcatcgtgcacggctcgcacaagatagccctcaagggcgagtcgatgcgcaagctcaccaaggccgtctga

SEQ ID NO: 345732 - DNA, 1914 bp, Pseudomonas aeruginosa
atgatcatcaagcgcaccctctaccacttccacttctgctgcggcctgggcggcggcgccgcaggcttcaaccgggcgcgcccgcgggtcggcaacgtcgaggccgaatgggtctgcctcggcgggatcgacgtggacccggccggattgcgcgacttcgagcgcctggccggtgtcccgggcaccctgctggacctcctcacccgcgaccagtacgtgcggttccacggcaaggagccgccgacaggctggcgggaggcaaccccggaggacatccgccgcgccgccggcgggcgccgaccggatgccgtgttcatcagctcgccctgcaagggtgccagcggcctgctgtcggagaaaatgagcctgacccctaaatatcaggccttgaacgaactgactttgcgttgcatctggctcatgggcgaagcctgggccgacgacccggtgcccctgatcgtcttcgagaacgtcccgcgcctggccagccgcggtcggcacctgctggaccagatcaacagcctgctcggtggcttcggctacgccgtggcggaaaccactcacgactgcggcgaactcggcggcctggcacaaagccgcaagcgcttcctactggtcgcgcggcacgtcgagaaagtgccccccttcctgtacgagccagagaagaagagcctgcgcgccgtcggcgacatcctcggccgcatgccgctgcccggcgacatcgatgctgcaggcccgatgcaccgcgtaccgtccttgcagtggaagacctgggtgcgcctcgctctggtgcgagccggcagcgactggcgcagcctgaacgacctcgccgtcgaggacggctacctgcgcgatctgatcatcgtgccggagtatcaggccggctacatgggcgtccacggctggaacgacagcatgggcaccatcgccggccgtagcggccccacgaacggggcgttctcggtagcggacccgcgcgcaccggcaaacgctctgcaataccagcagtacggcgtccgccgctggaccgacacctccggcgccatcatcggcgtcaagtcgcccggccagggcacgtactccgtcgccgatccccgcggccagagtttcggcaagtacccggtcaccgactgggacggtccgtccggcaccgtaatcgcggccagcaccaccggtcagggcgcattcgccgtagcagacccacgcccggacgtggcctggtacaagaacgttttccgcgtcgtcagcatggaccagcacgccggaaccgtcaccggcgggcactcacccagttccggcggccaggctgttgccgatcccaggtaccacaactggcacccaggggcgagcagccgcaaattgcacgtcggcgagtggggaagcgctaccggcacggtcaccggctcccagcaggtggccagcggcgcgctgtcgatcgctgatccgcgcgtgctcgatcgcaccaagggcgacgcctacctgaccggcgggcactacggtgtcgtcgggttcgaccagtccgccggcgcagtatccgccagcgcgcggcacgacaatggccggtggagcgtcgccgacccgcgcatgccggcggcgaacgaccggctcacctgcatcatccagtcgctggacggcacctggcaccggcccttcaccaccctggagctggccgcgctgcagagcctggtggacccggaagaacagttgatcctcgacggcctgagcgacagcgactggcgcgagcgcatcggcaacgccgtaccgccggccgcggccgaggccatcgccggcgtgatgggtacaacgctgctgctggccgaggccggcgaaaccttcatgctcagcaatacgcctatctgggtgcgcccggttgcggtggcgctgagcgtcgcgcaacaggaggtgaacccgtga

SEQ ID NO: 345733 - DNA, 702 bp, Pseudomonas aeruginosa
atgaggagggactgggtggtatgggttggctgctttttgctatttgccgctggggcggttttttctaaacttagcttgggctcaaatttctttttagttcctagtgttcatgatctatttgatattgcttcgtcgatggcaactgttatcgccgtgatctttgcagggcttggattgagctcatggagaaagcaattaagagcaacctccgattacgagcttgcgagaaaaatgcttgttgcagtacagaaatacgctgacgctgcagaagagtcttggcgctggtgctacattgctaacgacgagcaggcaacggatgctcgggagggtaaggagcgaactattcgagctattgcggcaggggctgagcccgcaatgcggaagacgcggcagtatacggctgacttgaaagcgttgcttctagagtgtcgagcgctatgggcagattatgaaagtctgaacttgcgtgacttcttaaagttcggtgagaactgcgataattatctgtcatccttcattgaaattagtgctgtcgagtcaaaagatgagtatttaattaatgttcttagaggagctgcaatgcagagcatttgggatggtcttaaaggggttggtcttaccgagcaaggggctgtgtcggactacattagtagagagctttcttatataaatggccggcttggcgagaagttcatacgctga

SEQ ID NO: 345734 - DNA, 837 bp, Pseudomonas aeruginosa
atgccggtttcgttacccttcgagcaagtcgatgtcttctccgaacagcccttcaaaggcaacgccgttgccgtggtgattggcgccgaccgcctgagcagccagcaaatgctcgagttcgccgcctggacccaattgagcgagacgaccttcctgctgcggccgaccactgccgaagcagactaccgcgtaagaatcttcaccccgctgcgggagttgccctttgccgggcatccgacgctggggagctgccaggtctggctgaaccaggggggcggcaatgctgctgacgagatcgtccaggagtgcctggcgggcctgatccgtatccgccgcaagggcgccttgctgtcgttcgcggcgcctcccctgcttcgtggcggagcggtcgaagacgaggtgttgcgacggatcgagagcgggcttggcctttccccggggcaggtactcggcagccaatgggtggacaacggacccggctgggtcgccgttcggctggccacgcgtgacgaggtcctggccattcgcccggactacgcgaagctcgacgggctcaacgtgggcgtggtcgcgccctggcaaggtccccaggcggaggcggatgtggaagtgcgcgccttcatgggcgaggaactcaatgaagaccccgtcaccggcagcctcaacgcgagcctggcgcaatggctgatcggcacgggagtcatgcccgggcgctacacggcgagccagggcacggccttgggtcgccgggggcggataagcgtcgagcagatcggcggcgatatctggatcggcggtgaggtgcagccgggcatgtcggggcaggtcgtgttctga

SEQ ID NO: 345735 - DNA, 459 bp, Pseudomonas aeruginosa
atgcagtcactgccttgcccttcaccggatgcttgtccattggccaaaggcaacgcctgtaagacctatggccgactcaatgtagtaatcggcgacgacgacccactgggcaccttcgtgttccgcaccaccggttttaacagcatccgcaccctggctgcacgcctgcagtgtttccgagccatctacggcaaccgcctggtgtgcctgccgctggaactgcgcctgcgcagcaaatccacccggcagagccatgatacgccgatcttctacgtcgacatcaccgtacggagtggtatgccggaggaagaagccttgcaggcagcccgccaactggaggagagccgccaatccgtcagattcgatcaggccgcattggatacaacagcccgacagggattcggcaacggcgctttcgaggaagacatcgaggatggtgaccgcgtcgtcgaggactaa

SEQ ID NO: 345736 - DNA, 840 bp, Pseudomonas aeruginosa
atgagtgtcgccctttccgccgcgcccgagcgcaagctcgccgcccccctgatcgccttcgccctgctggtgctcggcgggctgttcctgttcaacgcggtcagtgcgcgccaggccatcctcttcatcgtcggcggcgccctgggcctgaccctctaccacgccgccttcggcttcacctccgcctggcgggtattcatccgcgaacggcgcggcgccgggctgcgcgcgcagatggtgatgctggcgctggcggtgctgctgttcttcccggcgctggcggcgggcagcctgttcggccagccggtgagcggtttcgtctcgccggtcggcacttcggtgatcgtcggcgccttcattttcggcatcggcatgcaactgggcggcggctgcgcctccggcaccctgttcaccgtcggcggcggcaacgcgcggatgctggtgaccctgctgttcttcatcctcggctcgctgatcgccacccagcatgtcggctggtggttcgccctgccgtcgctgccgccgatctcgctggtcgccgaactgggcctggcaccggcgctggtgttgagcctggcggtgttcatcggcatcgccggggtcacggtacgcatggagaaggcccgccacggcaccctggaaaccccgccgagcgccgaatggcgcggctggcggcgcttcctccgcggcccctggccgctggtctggggcgcgctggcgctggcgctgctcaacttcctcaccctgtacctcgccggacgcccctggggcatcacgtcggccttcgccctgtggggcgcgaagatcgcccagggcgtgggcctggacgtcggcgcctag

SEQ ID NO: 345737 - DNA, 2025 bp, Pseudomonas aeruginosa
atgagcgatcatcagaacgggctgcacctcgaggcggaaaactggccgcgcgcgctgttcgccgtggccctggccttttccgtgttccaggtcgtcaccgcggcctttcccctgatttccacccaggtcctgcgggcaatgcacgtcggactgctgttgctggtggtgtacatcagctatcccgccttcggcatacgtcgcccctggcagccgttggcctggttgctgggcatggccggcctgggcacggcggtctaccagtgggttttcgaggccgacctgatccagcgctccggagagctgacccaggccgacatggtcgtcggcgtggtactgatcgtcctggtcttcgaggcggcgcgacgggtgatgggcatcgccttgccgatcatctgcgcgctgtttcttgcctatggcctgttcggcgaacacctgccgggcgacctggcccaccgcggctacggcttcgaccagatcgtcaaccagctgtcgttcggtaccgaaggtctctacggcacgccgacctacgtgtcggcaacctacatctatctgttcatcctgttcggcgccttcctcgagcaggccggcatgatccgcctgttcaccgatttcgccatgggcctgttcggccaccgggtcggcgggccggccaaggtctcggtattctcctcggcgctgatgggcaccatcaccggctccggcgtggccaacgtggtcaccaccggacagttcaccatcccgctgatgaagcgtttcggctacaagccggcgttcgccggcggcgtcgaggcgaccgcgagcatgggcagccaactgatgccgccggtgatgggggcggtggcgttcatcatggccgagaccatcaacgtcccctacgtggagatcgccaaggcggcgctgatcccggccttgctgtatttcggctcggtgtactggatggtccatctcgaggcccgccgggccgacctcaagggcctgccgcgcgagcagtgtccgagcgcctggggtgccgtccgcgagcgctggttcctgctgattccgttgctggtgctgatcgcgctgctgttctccgggcgcacgccgctgttctccggaaccattggtctggcgctgaccgccatcgtcatcctcggttcggcgatcatcctgcgggtgtcctcgctcggcctgcgcatcgccttctgggtggcgctggggctgctctgcgcggggttcttccgcctcggcatcggagtgatcttcgttgtgatcgcggccctggccctggcctgctggttcgtccgtggcggccgggaaaccctgcgcatctgcgtccgcgccctcgcagaaggtgcgcgacatgcgattccggtgggcatcgcctgcaccctggtgggagtcatcatcggggtgatttcgctgaccggcatcgccaccaccttcgccagctacgtgctcgacctgggacgggagaacctgctgctgtcgctggtcctgaccatggtcacctgcctggtcctgggaatgggcatcccgaccatccccaactacatcatcaccagctccatcgccgcgccggcgctgctggaactgggggtgccgctgatcgtctcgcacatgttcgtcttctacttcggcatcctcgccgacctcacccctccggtggcgctggcctgcttcgcggcggcgccgatcgccaaggaaaggggattgaagatcagcttctgggcggtgcgcatcgccctggcgggtttcgtggtgccgttcatggcggtgtattccccggcgctgatgctgcaggaaggcggttggggggcgacgctctatgtcacctgcaaggcggtgctggccatcggcctgtggggcatggcttccatcggctacctgcaggggccgctggcctggtgggagcgcctggtggcgttcgccgcgggagccagcctggtcctggccttgccgatcagcgacgagctgggcttcgtcctcggcgcgctggtgatcggctggcacctctggcgccagcgtgcgcgcgaggcggtggcgtga

SEQ ID NO: 345738 - DNA, 3372 bp, Pseudomonas aeruginosa
atggccgtcccttttgtcatagctgcggggctagtagttcttgctggtgccaaggtcgtcagctggatctacaacgtcaagactgagcaagaggagaaaaagcagcgtgacgaaagaaagcgctcggatgaaattcgcgctcgggccagtgccgccagtcagcgacaggaagtcgagcgcctgatgctgttgcggcagatgggggaggagcattctcagttcttgctcgaatccatacgcgagcatcgcctggctgtggctgacgtaccttccgaactggacgggctggagcgtatgatcggccaggaggtggctgataagacgtccagtccgtatcgaaagtctgcacttcgccgcgaatacgcccgcatcgaagacgccattgtgcgcatgcgagaataccagcgctacctcaaccagcaggaaagtcagatacgatctttgctgggcaaggaggctttcgaggatctgctggggctggacaccaccgagcccttgctgcctgtggactggctctaccccggcaagttggtactggtgtccatggacgaactaggccagcccctgccgcgcttcaaccatcgtatttccttcggccaggacgacaccgcccagaaaaccttggccctgcgttacggtgatgacattccagtactcgtcaagtccgcccacaagcgctacgaaggcctgttctacggctgcgtggctcggggggcgttgtattaccaccacatcatgccaggcgagccgattgagtttgtggtagagcgcatcgctggccccaatgccataggtaccttttacgagggtatcgtgcgcggctgcctacctattggacagcttaagcaccccggcgtgcgcctactatccggtcagaagatcctcgtctacccgactgcttatgacctgtgcttgaacagaaaccccttcgatgagaagagccgagcaatcgaggtaagcgaattcaactaccaagctcggggtgttcagagttaccagcagctttacctagacgtggacgaacgcctgctcgagaacatctctgatgcgcgcttctacgacactgaggaaccttggacgcttctgggttacagcagcacaactggggtgatttccttagccaaggcctcggtgcagctagggtgtgtgatgcgcgatgacggggaaatgcttgaggttcggacggtcactcagactggtactctgcagatcgggttggacacacccttccgcttcacactcatcgctcggcgtttggcaagggccgagcaggtgggctgggcctacggcgtgcaggagttcctgcgcttctgcgcccaggccgctctagacattaatgattctccggagaggttggcccagagccgtttctaccagcgctgggagcaggtcattgcctaccaacgcagtcgagaggagaacctctcgctagagtaccctctagaacttgcccagcgagcggagggtatcctcaccctgcagcgcaatcgactgcccttggaagtccgggagcagttcgatctcgtatctgacaagctgcgcgaggtgttgtctgaaaacaataccctcaatcccgattactgtgttcgcttgcaacattgggacgccaagcgtagcgactatatcccgtccttgcgtttcgaccgccgtaaccggccgctctacacccggcagaaagatagcatcggcattgaaggcaatttctcgctgctggataacgacgcccagatgctacgcctgctggtaagcgtaccaagtgcctctctcaagcggcagagccaggcgctggacgacttcttccaggatcgcttggtcaatccggcactgaagaacatcctgcttgccccggaacactatctgcccgagcaggaagagcgcagcacacccatcgcttgggctagcaccttggacgacagccagaagcgcgtggtggagcttgctctcagggagcgcaacattgctcttattcaagggccgccgggcgcaggcaaaactaccgccattgtggaaatgctctaccaactgttctgccagcggcccaaccgtcgcgtgctggtggtttcccagcagaacaccgccgtggacaacgccttgggcaagttcctagacaagcacggcaacagtttggagcagcccattcaagcgatccgcatcggcaatccggaaaagatgagttcggccattcagcccctgggcttcgaccgtcagcacgccgacttcctcgccgaactcgatgcgcgggccatcgaggcagcggtgcgtctacctgaagccgaaagcaacctttgccatgtctggcgtgccaccctgaagcaggcgacccaatcccgcgctggacaggacgagttcttcattaccctgctggctgaccgcaatctggtgggcgccacctgtgtcgggctggccaccaacaagggcggcattgaccagttgcagttcgacgtagccattatcgatgaggctggacgcgctacggtaccggaaatcctcattcccattttgcgctccagaaaggtcatcctggtaggcgaccactaccagttacctcctagtatcgcgccattgctgcgcgaggacgaagccacccaggcactgggttttttgcgcgaaaacttcctcagtggaagcttctttgagctcatgtttgagcgcctgccagccgagtgtcgggaagtcctcgacaagcagtaccgtatggcaccgcccatcggtgatttggtggcgaacctgttctacagccgtgaaggccagcgcacgttgttcaacggccacccagacagtcattttgaaaagagctacctgctcgacgaaagcatttactgggtggacgtgaaagggcggcagcaacagccccacaacagcatgagtcaggagaatgtccgcgaagctgaagaaatcaccggcttcctgattgagctggccgacaaggtgaatcggctcacctccgtggccgtcatcaccccttacggcgcccagaaagagcgcgtccgcaggcagctacgcaacatcggttggcagaatggccagctcggtccgctgagcatcgaagtcgatactgtcgacgcattccaaggcagtgaggcggacgttgtttgctactctaccgtgcgcactgaaggtggcctcaacttcatcctcgatcgcaaacgcctgaacgtcgcttgctcacgagctaagctgcacctgttgttcttcggtgatagccagtatttgagcagttggcgcgccaagggaaaagatggtttcaacctgttcccggagattatgaagcacgccagtactgcaaaggtggggttcaggaaagatcatctgaaggcatctatgtcggaggcggacagctcagcctgccttgctaaggcagatcaggaatga

SEQ ID NO: 345739 - DNA, 438 bp, Pseudomonas aeruginosa
atgaaagcaccgactaaatccccagcgaaaaagccgaccgtaaagaagcctgtgcccaagaaaggggactccggcttcagtgttaatcaagcgctggacctagccaatacctcggtggatgccatgagggcctacgccgatttcaagaaagaggccgaggccaccaagcgtgcccagatcgatggccagaaagaaataattcttggcgaacagaatctggaaaaagcgcgcatggaacatggtgcacgcttagtcgagctggataattccgacaaagacagcctacgtcgccatgaggaggctatgaccaacctggcccgcaaggaccgcgagttggggatccaggagacgctgcaggatcgtgttcttgctcagttggaggccaaggagctcactgctgaggaagctgcactcttgctgtacggagctcaggaataa

SEQ ID NO: 345740 - DNA, 537 bp, Pseudomonas aeruginosa
atgaaagccattgacatgtttgctaacgtcgccaggcaggtgatggaggacggtcacgtccagaaatacggtggcatattgcttacccgcggctttggagggttgtctaggctcaatcccacagtcgtctgggtggatgctgcagtagcggtcatagaggccgctgggtcctacttccgctactgcgctgcccgtgaagtcaccgaacagctacgtgaatacaaccgggtgctggaaaccactttggctcaagagctgaaactgggagagctagaacttaaagcactaggcaaggagcgaaaggggcggctggcacacattgagcgcagcctagaggctacccgttgccacatccagttcagtcaaaagaaagttcgcaaacaactcaatctcttgaagcggatgcaggccctgctgcaacaagagcgccttcagtcgggtagcttccaagagctcattggtctgcaagtctgcctcgacagttgcattgatgccaccctagcactgctgctcagccccactggagaatactcatga

SEQ ID NO: 345741 - DNA, 1077 bp, Pseudomonas aeruginosa
atgtacaaggacgtatatttgaagattgataactactactgtgccaccgacgacggcctttacgtctatctccccgtgcgtttctacgagctgacgctgaagcaccggctgcttgagcagttaggaggcttctcccacctgctattggatgcgctgaccctattacccgagcagggcataggttgggtgctggaagtcaccgggctcaaccctcaacagctgcaacctattctcaatcgcctggacgggcttggcttgatgaatggggggcagttgagccaacggggagaaaggctcaccgcttggaaacgtctgctgcatggccagacgcgctacgtctggctggacggccaccacaacagccattccttttgtggtgacgcctccttggatgtggtggagctgcaagaagacgacccgtttgtcatacgacgctggcatcggggcaatggcaagccgcgcagttggtcctgccaggactggagcgaagactgcgaacgccagaaaaaccgcatcctgcgttatccggatgagtacttgggggcagtgttcgagactttccggaactgtttcatcgataccggcttcaatgtccatgagtgggaactcaatgtccgatatgtatcggacatgcctgagcttgttgcactggaggttcagctggaccccgccggcctgcggtccggtgccgcttatgattttgtagtagctagcccagtgctctgtctggacacccgttatcgcttgcccgatggggcgcctatcgaactgcgtgatctacagcctgaagaccagcgtcgtgccatgacctttggccgtgccgccgctgacactgagcttttgctcgacacgccgggcagcttctggatctggccggtagtggacgaaccagtccgccggcaggccgttaacttcctgtttcagaacgttgccgtatcagcccctcaagctgaggcgctcttcaatcgagatcacaatttggcagagcgctggcagagcttcgggttcgactggtccgctgtagagggcagtctgcaagaagtcgaaggtgttcatcgcatcaaaggcgatacatga

SEQ ID NO: 345742 - DNA, 1038 bp, Pseudomonas aeruginosa
atgagtcattacaagccgtatccggcctataaggactccggggtggcgtggctggagcaggtgcccgagcattggcagataaagcagctgaagtatctggcttcccacattggcagtgggaaaactccgtcaggtggtgccgaggtttatcaagacgctggggtgctgtttctacgcagccagaacgtctatgaagatggccttcggctggatgacgcggctttcatttctgatgaggtagatgaagaaatgaagggatcaagggtgaggccatgcgatgtgttactcaacatcactggtgcatcaattggtcgctcctgccttgtgcccgagatattccaacgagccaatgtgaatcagcacgtatgcattattcgtggtgaggcgcctgtaatttcaaaatggatatcgctttgccttccgagcaaagccgttcaggcgcagattgatttctcccaaaatggtgctggccgcgaggggctaaatttcgagcaaataggcaacatgctagttgcgctgcctcccgcagaggaggtcgatgaaattgctggcagcctcgaccgcgagaccgcccgcatcgacgcgctggtggcgaagaaaacccgctttatcgagttgctgcgcgaaaagcgccaggcgctgatcacccatgccgtcaccaagggcctcgatccgaacgtgaagatgaaggactccggcgtggagtggctgggggaggtgccggagcattggagtattcgaagcttcaaacaccttgcaggtattcgctatggaattggtgaaccgcctgcctacaaacctgaaggcacaccactaattcgagcaaccaacgtcgatgctggttgcatcagttcggatgggcttgtctacgttgatccggcagacattccggataagcgcatcgtctggcttacccccggtgacattatcgttgtccgcagcggtgcgtacactggggattcggccataattcgggagcatcattgccctgcaatcgcgggttttgtagtggtcaacccatcccggacagtgggttga

SEQ ID NO: 345743 - DNA, 288 bp, Pseudomonas aeruginosa
atgatagattttgaggaagctttgaaggtggtcgttgattacctaagtaagtctccggcgcagttagtgattacttactctgaagagttttctgaagggtggctgttctgcttcgattctaaagagtatgttgagacgggtgatttctctttccagttcgttggaaatggtcctatttttattgataaagacaccggcgaattgtatgtgtttggtacagagcttccgccaaaggagtatgttgaagaatactctttgaggaagaggggcaagcagcaagataggtag

SEQ ID NO: 345744 - DNA, 1350 bp, Pseudomonas aeruginosa
gtggcggtcccagtggaaatgcaccttgacccggccgtactggtcggtccagatctcctcgcccttgggccccaccaccaccgcggtctgcgggccacgcaccaccggcaccggggtcgacggcaaggggcggaaggcctggccggcatcgatacagtccagctcgctctcgaactgcgagccggcgccgccactgccggtctcgtagagttcctggaccacccggtactcggcgccgaccaccaggtattcgcggttctggtcgagacgcgggtagttgctcaggtggaacaggtggcccgccccgatacccctggcgcatccccgcaggcgaatccgctcgtactgggtctggatcgcctcgatgcgggtccgcgcatagtgttcgccgtcctggctctgcacatactcgccagggtagtcgtagagcgggtagtcggccgcggcatgggcgcggccgacattcgaacgcacttccaggcgggtgccgggacgctggaagtcgtagtcgttgaggctcagcgaaccgggctggacctcacgcgccatgtgccagtcgaagaagtggtcgcgctcgcggtggccgaggctcggcgggtagtagggcacgctggtgtagccggccgggctgtggtgcgcgccgtaggcatcggagagcaccaggatgtggcgcttcttctcgtggcggaaccagtagtagatgccttcctgttccatcaaccggctgacgaaatcgaagctggtctcgcggtattgcacgcagtattcccactcgcggtaggagcggctcagggcgtcctcgaagtcggagaagccgaggtcgcggaacacctgcttgatgatgtccggaaccttctggttctggaagatgcggcagtccgaagtgcgcgtcagcagccacagccagggccgcagggtgacctggtagctggcgaactggccggcgccggcgccctggctgcagcgcgcgacgatgccgtggaagtgccgccggctaccgccggggagttccagcgcgaggctcatcggcttgcccaacagggcatccagaggcaaggcgggattgctcgagaccagttcgagctcgtggctgaacagccggcccagttcctcgcggccttccagccgttgcagttgcaggacctcggggcccagcggggagtccacgtgcaccagacgggtatgttgggagaacagcatgggcaatcttccttgatagtcacctgcggcgggcggcccgaacaacgcgccagcggcgcgcaagatgatcgtacaaccccgtgccgtcgcgaaaggctagccaatagccacgacacccctgcccgcctcctgcggacccgccgaccctaa

SEQ ID NO: 345745 - DNA, 294 bp, Pseudomonas aeruginosa
atgaacctgttcgacacgctgacgcttcccaacggctcgaccattcccaatcgcctcgccaaggccgccatggaggagaacatggccgatgccgcgcaggccccctccgaacgcctgatgcgcctctaccaggcctgggccgacggcggcgccgggctgctgatcagcggtaacgtgatggtcgacagccgtgccatgaccggccccggcggggtggtcctggaagacgacgcgcaactggagaagttccgccgctgggcgcgcatcgggcgttccgccggcgcgcagttctga

SEQ ID NO: 345746 - DNA, 948 bp, Pseudomonas aeruginosa
atgactcaggggcgcagcattcgcctgtttctggtcgacggcacgcccaacggcctgctgaccgccgagatcatgaactggaccggtcacgtgctgaccggcccgcgcagcaagctggccgaactggtacagcgccccgagtgcgcgcgtaccggtgtgtacttcctggtcggccccgacccggaggacagcttgcgtacccgggtgtatgtcggcgagtcggacgatgtggcccagcggctcaagcagcacaatcgtcccgaggagcagggtggcaaggacttctgggagcgggtctgcttggtcaccagcaaggaccagaacctgaccaaggcccatgcgaagtatctggaaagcaaactgatcggcatcgtcgccagtgccgcccgctgcgtactgggcaacggtaccgcccacgagtacagcaacctgccggagtccgaccgtgccgacatggcctatttcctggagcagatccgtaccgtgctgccggtgctgggcttcgacttcctccgcgagctggccaagccgtctgcgcaggtcaccgccgctgttgtgccgatggccgaacagtccccacgtttccggctggatatttccaagcacggcgtagtggcctttgcccaggaaatcgacggcgagttctttgtgctcaagggctcgcgcgcacgccaccagtgggttggcgttccgggcggttaccaggggctgtttcagcaactggtggctgacggtgtgttggtgactgatggctccgcacatcttctgttcagcgacgactatgccttcagcagccctagcgcagcagcggcggtggtcagcggccgctcggccaatggacgtatctcctggatggtggaaggcagcgatgagacctacgccgcctggcaggaccagcaattgaatgactcggccgtgactccgcagagtgagactattgatgcctaa

SEQ ID NO: 345747 - DNA, 696 bp, Pseudomonas aeruginosa
atgcctaagttagccacttcgcagcgtctgatcctggtggactacgagaacatcggcaagatcgacctgtcgctgctggatgcctcgtaccgcgccatcatcttcgttggggccaagcagaacacccccaaggcctcgcgcaagccgtccacggcacatcgcttcagtcgtgtggatttccacaagatcgagggtataggcaagaacgctctggactttcatatcgccttccatctgggccgcaccttcgagacggcgccggaaaccgaatgcatcgtgctgtccaaagacaagggcttcgatcccctgctggcctatctgaacaagaatggcctggcctgccagcgcattgctgcgctggaggaactgctgccgccggctgatcagcaagcaccggttccagcacctgcggcatcccctgcgggcgcgacctgcgggcgttgcggcaaggcaagctgcgtggaacaccttggcggccagtggtgcagtaactgtggccacttcgccagcccgcccgatccgaaacagatgccctcgcggcagccgcagtatcgcgagaagaagcaaaacgcctatgcctacgagccgctgatggcgacctgtggctggtgtcaccagcgcaccgacatgagtggcggcatttacgacgatggcgagtggatgtgtggaggctgcatcagccgctacgcgcgttaa

SEQ ID NO: 345748 - DNA, 1647 bp, Pseudomonas aeruginosa
atgaaactcaccaccagctggttgaaaccaccctacgccagtggcggcattgatcacctcggcacccaggcgtcctgtgtgatgatctatggccagctattgccaggcattaccaatgtcactgatcgggcgcgttactactctttctatccttggctggtctggtcctatgatcagcgttatgcgaaggacgattacagccactacgtcgaacggttccgtcgggcggactgcctgttcaccctgatttccgagcggcacgcgcacgcgaccgaccacaacaacgagcgacacggcgtcgccatggtcggtcgtaccaagctggttccctcactcgccagtctgaaaaacggtgagcctctgcggctatccctctatgcgacgaccgaggaaacgccgcagcgctacttcatgaaccggctgggtggcctttcgcagtactacgcgggcactctggccgagctgcaactgatggagtcctccggtcgctcctggagtttctacagcagccagtatggagcaccgcttgcgcagagcgtcgatgcgtcagtgcctggtgagcggttctgggaggttgtcgagaatgactcggtgacgcttgctgaactcgacgagctaagcgccttctgtgcctgcaacatccctaacagccaggacgagtgccagcagctcaccgacatcttctttgatgctggcaaccgctatgcagaggaaggcacgcagcggcgccgaagcctgggcctgatacagcaactggcggaagctctgccggatgaatgggacctgaccgaggaggtgttccggggctgtgtctacagtggccagttgcccgatgacaaggtctggagcattcccgatgccttgtactccacccgggcgcactgggctgtgtatgtgcgcaatgatctgatgtcggtagctttccagacgatcctcgccatctgcctgcaggagctgcaaccgcagtccgtggtgcagcgacgggtatttcacagcgtcgaggcgtttgctggttggtttgctagctcgaaaacggttgccggggtagtgagtgatctgggcccgggcagcttcggcgacctggttgccagttgccggtcacatgctccagcgctgactgattggacaaacgatgcgcatgagatccagctgggcgggcaactgattggcggctggcagcctggcgttgatattgcgccgctgctctcgcagagcctgtgcctgctggcaatgctggtcgttcgcgatgatcctgggcagcagccgtattcagggttggcgatcactcctgaggcactcagggactacccgatcaacctgatcagcttccgcagccgcagtgctgtctggcagacgatgtctctcgagcaggtggttgccgatctggtcgtttggtgcctggatacccatctccgcgtggcgctacgcaaactccggcagtccaaccgctcgaccttccatttgcgaccgtccgagcgaggcctggaagttgtgggtgaccagatcccgccgccatcccagaccacccctcgtttccggcaggcggtacagatccttcgcgaccttggaatgctggcgcgtgataaaagccacatgaccaggctgactgcctctggtcgggagcagatggaggttgccagtgtctga

SEQ ID NO: 345749 - DNA, 2535 bp, Pseudomonas aeruginosa
gtgtctgaagaggtctcccttctcgaagtgataaagcgcggaggttacgaggcctcgctgatcaccaccttcaacgcgacgctgcccttctatgaggaggtgctgctgcgcaagctggttgctgccggatgtcggcataacgtggtgctgatggatcggggccaatgtgccgcctcctgggaaagccaggtggctcggcctcgtctggcgggccatgcctacactcttttaccgatcggcgtgagcggcgcgtttcacccgaaggtctgtctgttgctggggccgaagaaggcctcgattctggtcggcagccacaatctcacgctatcggggctgggtttcaatcgcgaggtcaccaactggatcgaggttggcggtaccaaggatggtgagggcaccgccgttctaagagctgtctggcagatgctccgtgagtggatcgagctggagcgcggcaaggtccctgagccgctattggagtcggcgctggcaatcggccgcttcatcagcccgttgattgccacggccggcgccatgggctcgcctgccgtgctggcgcaaggtccgagagggctggcgcttatcgatcaacttgctgaacggattactgccccggtcaggaggattgctgtactgggcgcgttcttcgatcaggagctgacactgctcaaggagttgaaagcccgctggcccgccgttgatatcgtggtgggtatcgatcccgactcggtccagcatcccggtagctatgacggcgaaatcgttcggtatgtggatgcgcgggagattgcagatcgggccggctatctacacgccaagatcctctatctcgaaacgcatgactcagctgccaatgtgtttgtcagtggcagcgcgaaccccagccgtcccgcctggatggacgcggcgaatggcaatgtcgaggccgtcgtgcttcaggcaggtagtgctgcgcgacgagctgctgaggccacttcaatgctcagcctgttcgaattgccccagctggcgccagaggcgttcgctgcgatccagaagcgcaacgaggccatcgagaccgagcagcaggtgtcgctgcccctgctctcgggcttttcggacacggagcgtggcctgatacgtatcagctatcggggcaagcggctgccggtaacggcggctgtgctgcttggcccgaaccaggagaagctggagacgcttgccccactggagcagcatgaccatgaggttgtgttcagggccggggttgagctgacagacattcgctcctgcctgttggaggaggacggaaggtcgattgcccgggcgatgatcctgcacccctccatcattgaatcgagctcccggtcctccaggcagtaccagattcgttcggcgctcagtgacttgggctcgagtgacgccgatatttccaaggtcatcgccagcgttgagcgcgtgatcttcgcggagcagtccgatcacgagatccagatggcgatccgtgagtgccgggataaaaaggatgcgcctccagctgaggatggaccgacatcgttggtgatcagcgtgaccgagatggctcgggtgaagcgtaaacagcgtgtgctgaagtccggtgatctggcctacctgatcgatgtactcatgcgtcgtttgagcgatggtctcgaggtgcagagcgtcgaggttgaccggactggccggagcgaagaggagcaggtcggtcaggaggacgagggggacgaagaatcgagcggtccagtcgagatgccccagttctccgatgctgaaatcgccttggccgttgccaggaaggcgagggcgttgagcaggaaaatggtcgagcagctgaagctggccagtcaggatgagtcgaggcaggtcggtgcctctatccagctgattgcagtgctggctctgattcgtgagctgcgccatctcgacaagctaaaacgctggcgagcaaccgggcaggatctcgtggaggcgcgggatcgtcgctatctcctcgatgaaagcatcaggtatttgctcggttcggagtcgcggttgctcgaagcgatcgacaagacgatcgacgacgatgctgacgagacgatgcagctgcgtaccttgctggtctggctggcctgggatttgggtgatgagttgacggccaagatcagcctgatgtggggagcggacgaaaaacgccgtaggttgcagactaatgcgctgttccttaggctgatgccgtcgattgctgcagaccaagatgccagtgcagagctgcgcgaaagcattcagcgaacactcaagctcactccgagcgcctctattcaggcggaacaatggctaggtctgcatctggcttatggttccgcttggtcactcgggcaaaaggagtccgacgagtttgagcttggcggttattgcaggatccccagccttgatgatgagccgagggtcatcatggagcttgatcagaataacgtcggcttctgggatttcgatgatgtacggaagttcaagcgtgaccgggtggttgcgctgacgccgatgcagccagcatga

SEQ ID NO: 345750 - DNA, 1230 bp, Pseudomonas aeruginosa
atgaagaaggctaagaagacttatcagaacggcacaggcaagcagaaaccgctcaggggatcgagtgctcggcgggggtggcgagcatggagcgagtatgtttcggcattccttgactatattgtccccgagccaccgcatgtagattcgatagcgtgcgttccagcacacatcaggctaccggatgcagctgctacggcagccgaggatgacctcctgcttcgacggctctacatcctggagcccgaagacctacttgaatttactctcgacgacctcctgctcgcttggcgctggcggttcgaggtatgcggttcagaaatggcagcggccgagctctacgcgctgtaccgggtagctaccggtcaagatgaggtttatcaaggtggcgcccactttgaacaggcacttgaggtgctggctatcttcgatcccgagattgttctctcggaagatggtagtcgtcccggccatgaagccccactacaggacacgacccctgatcccgatccaccgccggtttcccccctgtctctggaggatgttcgttcgctgtcggcaagcgtgctgatgcgggcatgggaggatcgccccgaaagctttgcctctctggaggcagcggcagaggcacttgcactgctgcgggtatctagttctgctgactcagagaagaagagcctcagttattaccttcgacatcccctgatcttggaccttgaggagtatcttcctggggagacatcccgagccgaggactccgcagccgaggcgcgattgcttgatttgatgcaggaggatcgccggaagatcaaggttcagagcaccgttgtgcgtaccgggcaacaagacttccggtccgaggttttcaggcgttacggaggaatatgctgcgtgacagggtgcaccatcgccagcttgctggaggcggctcacatcatcccctaccggggcagccataccgaccatgtagagaacgggctactactgcgtgtcgatattcaccggctatttgatgatcatctcatcagcattgaccctgtgaggttagcgctgatcgtatctggcagcattgaggacgcttcgtatagggagcttcatggcaggccgctgttcaggttgagcgccaaacctaacgccctctacttggaagaccactatcggcggtaccagagagcggagcaccatcgcgccggtctgtcgaataatacttccagtggcgcatttgcatag

SEQ ID NO: 345751 - DNA, 231 bp, Pseudomonas aeruginosa
atggatcagttggcgaaagcgttgggggcacgcatccgaacgcagagaaaggcccgtcggctttctcaggatgcactggcgctggcctgcagcatcgaccgcagctatatggggcgcatcgagcgcggcgaggtgaacatcaccgtcgagaagctgtatcgcattgccagcgtactgagttgcgacccggcgtctctcctgcctccagtgacagcgctacaggccggctag

SEQ ID NO: 345752 - DNA, 585 bp, Pseudomonas aeruginosa
atgaaacccgccacgttcatcctcgacaggcacgtgtatgagctgcttcaagaggaagggcgctcacagttcacgacccgtgagctgcgggatgcctatgcccagcgcctaggaggcctgacctttcgtcttggcgatgtgcgtcgctatgtgtacgagcagatccgtcgcatgctccgggcgggttggctcgtacctgacgaagagcgtcgctcgcggggacaggtctaccatctgcaacctttcccggagagcctgctgctggagctggttgacggtggattcaagaacagcctcaaggccgtgtgcgagccggagccgtcagtccccgaacacggaagtgtgctgcccaacccttcatccgatgcggagcagcatctggaagcactcctcaaggaaatccggctggacttcctgtcggcgatgggcgaggcggagcgctataagcagctcctcgatgacatgccgcatctgcgcgacaaggtcgaaggtgagtacctggaggccagagatcgcagctcgcggttgctgggacaccttcgcgctgtcgagaaaacgctcaagacgcttgtctctacccgatga

SEQ ID NO: 345753 - DNA, 792 bp, Pseudomonas aeruginosa
atgcctgaattcattgatcaccttctgagcatccggagttcggttagtcactacgcggcaaccttcccccatggccatcagggcttgggcaatctgctgggcgtgctcgatatcggtggcaactaccagactagccgcatccggcttgatctggcgaagctcatccagcttggcgcaacccaggccgagcagttgatcgatcacctcgtcatggcgcagcagttcttcaaaggtgacgggggactcccccaacagattggcgatgctggggaacagcctgacggtgctctcggtctccagctcctccgtgagcgtcaccttctggttgtcgaggaggacgatgcggggcgagcggcacacaccgtcagcgatggcctctttcagaccatagcggtagtcgcagatcagatacccctccggcgacgagtaacgggccaaagcaatagcccggtcgtccgagcgccatggcgtgccggacaacgccaaggtgaaagcggcgcgatcctgtatccgctgcaggatctgctgtccccaggcgttgctcagcagcggatcatgcccggcgcaatgatggatctcgtcgaagacggcgaagacgcggtagtcgtcgaggagccgccagaactcctcgtcacggtaatccatggcctgataggtatacgcggcccccacagcaccgagcagtccatccaagcgcttgccgagtacccccgcaaaggtcgagcggaagccgtccacaacctggcacgacggtgcgaaacagagcacaagatcgatcctgtcctgctctaa

SEQ ID NO: 345754 - DNA, 636 bp, Pseudomonas aeruginosa
atgaagtcgagtacggccttgacgcccagggcgccgacaaggaccgtcgcgacaagaccgaacccgacagagaacgcctgggcgagcgcctgggtgtccaacatcgacgggtcgaactgctccggcatgcgggtcaagacccacatgcccgaacacaggggcgccccatccggcgcaatcgagatggagccatcgcaggacagggcggaaatcacagcaaagccgccatggtgtcggtccagccccacagatagcccgtggcgaggcctacagcgaacatcgagagataacgcaactggcggccccctatcagctagcggcttgaacaggcgcctttgcggcagccggagacgcaacgcggcgagcttggcgcggatcaacttcgaaccacagtcggtcatctttcacgcgacaagtaatgtcgcactcataatgaccagcaggcagaatttcattctgcttagctgcgtagtattcgaagcgctgcggataaggaatacccggcaaatgcccgaaggcttcacacatatggtactcattgccagctttggaattacccgagcgaacaacgccagtggtttcgatacggatagtcagtgcattagccattgttggtttctccggctgtcggtttag

SEQ ID NO: 345755 - DNA, 378 bp, Pseudomonas aeruginosa
atgaaatctggtatcgcgacccgtcgcctgttcatcaacgacaccaaggctttggtgcataccgtcgacgggaccgccatgctggtcacgccaggaatcttcaagcgttatatccaggagcatccagagctcgaaaagctggcccaggccaaggatacgaccggctggaagctggtgcagcgcgctttcgagaaacaaggtcttcaccgaaagaccagtaaaaacctgaacatctggaccatcaaggtttctggtcctcgcaagacgaaagagctcaaggcctacctgctccaggatcccaaattgctgttccctgagcagcctctggacaacccaagcctcacggtcatcaccgatgccgaaggaggtgtggaatga

SEQ ID NO: 345756 - DNA, 672 bp, Pseudomonas aeruginosa; identical to SEQ ID NO: 333034

SEQ ID NO: 345757 - DNA, 339 bp, Pseudomonas aeruginosa
atgatcgaggaacttcagatcggcgcccgcgaggcggtggccaccatgaccgaaagccagcgttacagcctggagagcgtggagatcgccaaccgtgccggcgaacgcctgggtagcgtgaccagccggatcggcgagatcgacagcatgaaccagtcggtggccactgccaccgaggaacagaccgcggtggtcgactcgctgaacatggacatcaccgagatcaacaccctcaaccaggaaggcgtggagaacctccaggccaccctgcgcgcctgtggcgagctggaaacccaggccgggcgcctgcggcacctggtggacagcttcaagatctga

SEQ ID NO: 345758 - DNA, 273 bp, Pseudomonas aeruginosa
atggtgctgggtgatgaccaacacatgctcctgcccagccagcgccagcagacgcacgcgcagcagcggcccacgagccaggtcgaatggctggcggatttcctcggccacccgctggcgcaacgttgcttcgctcgccccggcgcaatcctccaggacaatgcgcaacggcatgttcgccaggatcgtctggcgcgcctgaccgtcgacctcctcgaagcgggtgcgcaaggtctcgtggcgcagcaccagccaatcgaaggcctgctgtaa

SEQ ID NO: 345759 - DNA, 954 bp, Pseudomonas aeruginosa
atggccgccgatcagaacgcgcaatacgaacagtaccgcaggccgacgaggcgcgacgcgttcctggcgacgatggagcagatcgtgccgtggtcgcagttgtgcgaggtcatcgagcctcactacccgaaggtcggcaacgggcggccgccggtgggcctggagcgcatgctgcgcatgtatttcgtgcagcagtggttcaacctggccgatgccgcgtgcgaggacgcgttgctcgacagcacggcgttgcggcggtttgtcggcatcgacctgggccgcgagcgtgtgccggacgccaccacgctgctgaagtttcgccgcctgctggagaagaacaagttgggcgaggccctgttcgcgaaggtgggcgaggtactgcaggcccgaggactgaaggtcggcgtgggcacgatcgtggacgccacgatcatcggcgcccccagctccacgaagaacaaggagggcaagcgcgacccggagatgcaccagacgcgcaaaggaaggcaatatttctttggcatgaagatgcacatcggcgtagacagccagaccggcttggtgcacagcgccatggtcacggcggccaacgtgcacgacaagcacccgctgcccgatctgctgcacggccaggaacagcgggtctggggcgacagcgcctactcctcgcagcaggcgctgatccgctcgaaggcaccgcaagcggccgactggaccaaccagagggtgcgcaaaggaagcgagatggaggacctcgagcgcttggccaaccgagtcaagtccaaggtgcgggcccgtgtcgaacatgtctttgccgtcgtcaagcggctgtggggcttcgacaaggtgcgctaccgcggcctggccaagaacgccacgcgatccttcgtcgcgctggggctggccaacatctacctcgcacgcagagtactgtatgagcaggtccgcccataa

SEQ ID NO: 345760 - DNA, 807 bp, Pseudomonas aeruginosa
atgcgccatgaccccgccagtgcagccatcgtcatcatgctgcgtgaactcaagatgcacggcatggcgcacgccgtggccgaactcgccgagcagggctcgccggccttcgaggctgcacagccgatgctctcgcagttgctcaaggccgagacggccgaacgcgaggtgcgctcggtggcctaccagttgaagctggcacgcttcccggcctaccgcgacctcacaggcttcgacttccagcacagcgaggtcaatgaagccttggtgcggcagttgcatcgatgcgagttcatggaggacgcccagaacgtggtgctcgtcggtggcccgggcacgggcaagacccacatcgccacggcgctgggtgtgcaggccatcgagcatcaccaccggcgtgtgaggttcttctccacggtcgaactggtcaacgccctagagcaggagaaggccagcggcaacccggggcacatcgcgcatcggctgatgtatgcggacatggtgatcctcgacgagctcggctacctgccgttcagcgcctcgggcggggcgctgttgttccatctgctctcgaagctctacgagcgcacgagcgtggtgatcacgacgaacctgagcttcagcgagtgggccagcgtgttcggcgatgcgaagatgacgacggcgctgctggaccggctcacgcatcattgccacatcctggagaccggcaacgacagcttccggttcaagcacagctcggctcaacccgttcaggcagaccaacccagaaagaaggagaagaccaagaacttatccacaccgtga

SEQ ID NO: 345761 - DNA, 1566 bp, Pseudomonas aeruginosa
gtgattgacgtggcgacactgagtgtcatcagacgttgggcattgcgtgagcaactgtccatccgggagatagcccgacgcacgggcctgtctcgcaataccatccgcaagtaccttcgcgagggcgaggcggcgcccagctacgcgaagcgggtcagcccgagcaagctcgacgcgtatgccgagaagctcggcgcctggctcaagagcgaggcatcgaggtcacgcaagcagcggcgcaccctcaagcagatgcatgccgacctggtcgcgctcggctaccagggctcctacaaccgcgtggcggccttcgcccgagcgtggcacgcacatcgccacgaggtcgagcagaccaccggccgaggcaccttcgtgccgctggccttcggtccaggcgaggcgttccagttcgactggagcgaggactgggcggtcatcggcggggagcgcaccaagctccaggtcgcccacttcaagctcagccacagccgggccttcctggttcgggcgtatccgctgcagacccacgagatgctgttcgacgcgcacaaccgcgccttcgaggtgttgggcggcgtgccgcgacgaggcatctacgacaacatgaagacggccgtggatcgggtgcgccgaggcaaggagcgcgacgtcaacgcgcgcttcagcgccatggtcagccactacctgttcgaggccgagttctgcaacccggcttcgggctgggagaagggtcaggtggagaagaacgtgcgcgatgcgcgtcaccggctgtggcagcccgtcccggcgttcacgacgttgccgctgctcaacgactggctcgagcaccgctgcaaggcgctgtggagcgaaatcgcccacggcaagctgcccggcaccctggccgacgtgtgggcccaggagcggccgctgctgatgccaatgcctcgtcccttcgacggcttcgtcgagcacaccaagcgcgtctcgcctacctgcctggtgcacttcgagcgcaaccgctacagcgtgcccgcgtcctatgcgaaccgcccggtgagcctgcgggtctacgcagaccgcctggtcgtggcggccgaggggcagctcctgtgcgagcacacgcggatcatcgaccgccgtcacgacacggccggccagaccgtctacgactggcgtcactacttggcggtgctgcaacgcaagcccggggcgctcaggaacggcgcgcccttcagtgaactgccgcagggcttccgacggttgcagaccgtcctgctccagcagcccggcggggaccgggagatggtagagatcctcgcgctcgtcttgcatcacgacgagcaggccgtgctgaccgcggtcgagctggccctggaagctggggtggcgagcaagacgcatgtgctcaacgtcctgcaccgcctgctcgatggcaagccagtagcgcctgcgcctgtgacggcacctcaggcgctgcgactggcgaacgagccccaggccaacgtgttgcgctatgactccctcagaggacgcgtgactgcagtcgatccgatcatcatccaggaggtgcgccatgcgccatga

SEQ ID NO: 345762 - DNA, 252 bp, Pseudomonas aeruginosa
atgggctacataaatccactactgcaacttcctgccgggcaggctctgcttcagcttcctgcggaagataaggccaggattgaggcggtaatgcgagagctacgtgtccaggcgaacaccgaggcggagaacgcttggcgccgccggaaggggccgatggccgcatactggcgagcggtttccacgtacgcccggcacatcgcccacgccctttccaacagcaataagacggaggggggcgacaatgcgtag

SEQ ID NO: 345763 - DNA, 207 bp, Pseudomonas aeruginosa
atgaccaagcaacgcacgataaccatcccagcatgcgaccaacacggcgacattcgccagcatctcggccagcaggcaacggcggagcggcaggaggctctgcttttggccgagcagttcatcgcaggtttcgaaggcgacgaaagccaggaaggaatcagcgatctactcacttctattcgtgcggccatcggagggaatcgctga

SEQ ID NO: 345764 - DNA, 462 bp, Pseudomonas aeruginosa
atgagcgctagcgactatgttttctcgccgtccgcgcgggtgttctatcccgtggcgttgcgggaggtgtacgagaccggggagggctggccggccgatgcggtgcctgtcagcaatgaacgctatctgcacctgcttgccgggcaggaggccgggatgcggatcgctgctaacgcctccggccagccggttcttgtcgatccgccacccctcaccgaggcggagcggcggacgaaggctcgggcctggcgtgacgctcagcttgcacagaccgatggcatggtggctcggcatcgtgacgagcgcgacctggggaatgacaccactctccaacctgagcagttcgtagaggttatgaactatcgcgcggccctgcgcaattggccggacgacccggcattccccgaccccgcctccaggccggagccgcctgcctggctggccgaagaaggcaccaactaa

SEQ ID NO: 345765 - DNA, 1137 bp, Pseudomonas aeruginosa
atgaacctaatagccttgggttcgaaattgtctcggtatcgcgaccagcttgagctgagtgtggaagaagtgagtacagccatccgcatttctccagaccgattacggtctgttgaggctgggaccctggagcccacaggcgatgaggtgcttatgctggccgacctctatcgttgcgacttcaaattcttcatctcaaatgagcagttagctccgtttgagcagacggaaattctgtatcgcaagcacggcagtgaattcacgaaggatgatcgtagggccattcaggaatttctgtacctgtgcgaaacagaggacttcctaatgaaggagctaaatgtcacccatcgggagtttatggcgcccccgacaacggggcatttcaagatggacgggatcagagccgccgaggcctttcgccgtttcaatcaacacccaagcaatggcgtgcctagggatctcttcggcgaaatccgccaaacaggtgtgcacgtgttccgtcgcaagctaggcaattccaaaatatcaggcctgtttctggcccaccccaaggccggtaaatgcattctggtcaactatagtgaggacgtgtatcggcagcgttttagtgcggctcatgaaatggcccacgcgcttttcgatgtggagggcggccccagcgtcacgtattcccgaactgacaaaaatgactatctggaagtgcgcgcaaatacttttgcttcccggtatctcatgcccccagaagtgcttcggcagcttcccaatcctgaacactggaagcaggccgatgctgagtactgggctcaggagcttcgtgtaagttgccaagccctaggcataggcctaaaggctgagaggctcgtcagtgaggaagcctcccgacgaatcagatccagtcgagttccccggactctcaagatcgacgcagagttgccagctcatctgacggatcggcaacgagaacgcaaagctcgcctcttggaacgggggctatcaggcagctatgttgcgttatgcttggatgctgcgagtcaagggttgatcactcaaggtcgcctagctgaggcacttctctgtgattacgcggagttgcaggacttgctaaccctctacgggagggtgtctgatgtcaattga

SEQ ID NO: 345766 - DNA, 732 bp, Pseudomonas aeruginosa
atgccattggaacctgatcgtattttttacgaactaggccatctcctcaatgaaatgcccgatatgaacactgaggcctggcaaacacccgaaggtcagcgatggtttggacgtgtagccgtcctcattcgtgaaatgggggagctgccggattatgtctctttcaacatggccgtggagaatctgcactcaatacgggattacccaaggcacgttcaggaaattacagccattctcaaccgcaccctggcccaagccgaactgcgcgcgaccccagctgcacgcgcagcttttatccctgtaggcgaagtctttgctgcattcgcaactgtttcccgaatcgtggccgaagcgaggagctgcgtcatgttcgtcgatccttttgcggacgcaaatctgcttacggagtttgcagtcttagtaccagagggagttgcaattcggatcctggcagatgctgccggtggcaaaccgtccttaccgccagcaatcacacgatgggttgatcaatacggtgaaacacgcccgctcgaagctaggctggcacaacccagaacactacacgaccgattgatcatcattgatgaccaagtatcttgggcagtgggccaatccttcaacagtttagcgacgcgcgcgcctaccagcatcattcgaacagacgttgagacagcccggcttaagatcgatgcacacaggcagatttggaacgcagcgacccccgtcgggtaa

SEQ ID NO: 345767 - DNA, 1158 bp, Pseudomonas aeruginosa
ttgcctaataaactatgcatagctggcgccggctcaggcaaaactcacaagataatcacagagtcaatcgccgaaatcgagcgtgggggaagggttctggtagtgacctatacgaccagcaatcagcaggaactgagacgtcgatttctggaggtttttggtacgtacagtgatcggttcgtggtcaaaggtctgttctctttctacttggaagacatggtgagaccgtaccagcaggcattgttcccgcggcgaatcgatggcatctgcttcgatcagcgcaatcctcatataaagcctgattcaacatttatgctgccgggacgagccgagcagttggacgataagagctacaacccaagacacttcctgactccatgcgaaaccaaagctcacaccggctttctcgcaaaactggcgagtcggatcatgaaggtcacgaaaaactctgctgcagtacggctaggggagatttatacccaagtgttctttgatgaggttcaagatctggttggatgggactacgaggtgctcaaggggctgaacaaagttatgccaacatccatcacgtgcgtgggagatttccggcagacggtgtacgaaacgacgtttggacagaaagcaccaaaaacggccgctgagaagatcgcagtcttcaactccatgggctttgtgtatgagtcactgacgcttaaccggcgatgcattcaatcgatttgtaacgtcgccgatgctgtacacaacggtacctacgaagcaacggagtcggcagtgaagcaggtgccgcctgaatttgcccatcatctcggcacattcatcgtcaaggagtcggacgtcgccgaatacatcaaagtttttgatcctatggtgctgcgctggagcgtaacgtcaggagcgaagcttcttcccaccgaggcgcgctgctataactttggcgggagcaaagggttgggttttgatcgggtgttggtgctaccgactgaaaaccagttgcatttcgtcttggatggccgaaagccgtttcccgcgaaggatgaaacagctcagaacaagctgtacgtcgccattacgcgcgcgcgttacagcctggggttcatcgtgcctgacaagaaagccgctggcttacggttccctatctgggcaaaagcatttgcttga

SEQ ID NO: 345768 - DNA, 1662 bp, Pseudomonas aeruginosa
ttgctcatagaatcgatacgcctggtcaacttcaaaaagttcaaggatcagacttttgaattcaacgaagatgtgaacattttcgtgggtgataataacgcaggcaaaagcacgattttggaggctttggagatcgtgctcaattttcagtatcgcggccgaccattcaataacgaactgtccccagacatgtttaacgcagagacagttgctgcgttccgcgcatcacctaaaacgcctttagatttaccgaccctcgtgatcgaggcgtatatgaagaacgtgcctgactaccgcggcacgaacaacagcctgaagaaagatgctcaggggattcagatcaaagtcagctttgatccagattttactgatgcctataacaaatacctagcctccggcgccacacttaccagcataccagtagagttctaccaagttgaatggatggattttgcttggaacattatcaaaccgatgaccaagcaattcagagcactctacattgaccctactcgcattcaccccaccttcggaaaaaatcagtacatctcaaatgtgttaagtaccgcactcagaaaggacgaagagtaccgtctaagcttgcactatcgtgagactctccaatccttcaacaacacggacgaggtcaccaccgtcaacaaggatttggattccgataacaggatcacggacaagcggctgaccatcgcagccaataccatgcccgctggcgctcttcaaaacgccctgcaacttgaagtaaattccgtgccataccatatgatcggcaaaggtgagcagagcaaggtgcaaatcaagctggccctgcacaacaagtcaaaagatatcgacctgattatgatggaggaaccggaaaatcacctgtcgcatgtcgaactaagcaagttggtgcaagatattgaggaccagcgagacggcaaacagctattcctgaccacccacagctcttatgtgctgaacaaactgagcatcaacaaaatctgcttactgcatgacgcatacaaacggctacatctcctggataagaaggtggttaagacgctaaagcggctaccaggctacgacacactgcgcgtcgcactttccaaaaaggtagtattggtcgaaggcccatctgatgagttgatcctcaaaaagatctacaaagacactcacaacgggcgacttccagaacaggacgggatcgatatcattgtggtccgcggcgtcggattcaatacgttcatttcgatcggcaaagaaatcggcacagcgattaacgtcttgcgagacaacgatggcgattacgaaaagaacgtagttgaagcacgcaaggaatacgcggactatccaaacataaaattagtttcatcaatgaaagaagaagagttctcgctcgagccggcgatgatttcagccaatagcgcaacggaaaaagagttaaaggaattcgcagaaattgtcctctccagcgaaaccttcaaactattcgctgccgaacctacctttgctgaaaagctcaagttcatcgtggagtggttccgaagcagagacggagacggaaaaggcaaaaagaaagtcgattctgctatcaggattttcgaaactgataagcctttcaaatatccgctctttctcgatgaggtactgaaatttgcctaa

SEQ ID NO: 345769 - DNA, 216 bp, Pseudomonas aeruginosa
atgagtatgacacgtaagctacggctggggccgctaaccaagatagagagcatcaagctgacctccatgtgctcggccagcttgaaggctgacctagaccgttactccgcgcttcatgcgcagacttacggcgaggcggccgatgtaacatcgctgatcccccacatgctgaaggaatttatggccggggataaggggttcaagaaaatacattga

SEQ ID NO: 345770 - DNA, 807 bp, Pseudomonas aeruginosa
atggtgattcttttccctcaactcccacaccacattgccctgcaaattgctgatgacgcgcgctctgcctctatcgaatcccttgccagcaaggctactcctgattgcccatcctgcgagtacacacccaccggaggtagccgagcgacattagctgttctaaacaaactgcgaggtgatctgctgcagcttgcagtaaattccgggtatccgcgacctccaggaatacaacccgcagccacattcgatgcagaagcctccatcgttctaatgcagcaaatgccgatggcacctgccgaagcggccaatggcggcatatgggcgttccttgcctgtgtgctactgccggatatttcccgctggcgcttcagcggtaccggcgggggggccacaccgcttgagcgatttgtgtcaggacgccggaatgtctttcagcgcctttggtggcgcgcgtttcaccttgccccaaggacagccaaagccccaccgcttcctgaactactacgcactcttggtgaagatgagctggtccaattaatggagcgtccttcgctttccggcatcgcgggcctgcccggttctatcgcagctggcctgctagccgcatcacagacttattccgatctaacccggcgtcagttaatcagagaagcacagaagcgttttctcagactttcgtcattcatcttgttcgagtcgattgaccaagatgagatcgaccatcacgtcgaaagcgtattcgaacaagtagcggcatcacttctacaccgggataccaagttggagtccgcagctagccatggctga

SEQ ID NO: 345771 - DNA, 906 bp, Pseudomonas aeruginosa
atgaaaaccgcagtggtcctcccctacaagcgtgctttagcacaccgaatcacagcaggccaatgggacattctatcggcagagtcccccttgcctcttccgtcgatcctgtccgggatggactatggctccgtactccgcctacgcagagaaatcgtcattgatgttgacagtcttcggggcgactgtgggctgcctgacaatgctcccttgttggcagcagcaagctggtcgagtacaggcacaatgctgcgccgtaatctagccagcaccaccatttcttgtgaaagtggcacttgtcttgttgaactatctggagaaatttcaggcggcgacatagctcaagtcctgcacatagacaccacgattctgctagcacgtagacaggatggtggctctccgctctcccctagacacgcaggaaccattctgcttcaggatcgacagaccattcggctagactcatcacaatcgttctttcctgttgaggttgtggacttcagtaaaggtcattgggccaactctgaggcgggatggaggctttcgtggaacgtgcatgctttggaacaaccgtttctaggatccgtccgcctgtttattaatgcagctcatctacgtgtggtacgcgctgtttcaggcgacgcccccacagccgaagcctctgccattcgctcgacgatatattttgatgtagcaaaatcactaattttaggcgcactggcgagcgaagagttccttgaaagacacggcgactatggagagggtagctgcggtagtgtcatcttcacgatgattcaaatgttgttccccggcgacgggcttagtggcctcgcggctgctgcggctcagcggccagaccatttcaataccgacctacaaggccggctcaggcttttctggagctga

SEQ ID NO: 345772 - DNA, 1902 bp, Pseudomonas aeruginosa
atgctgacaccgctggctctgcagtctgagccattttcaccaacaggtggggcagctgccgaaggcgtatcaaatcagcttggccgcccacgagccgatcgcttcacactgctgatccgtgaggctatccaaaatagttgggacgcaagactcgcgcccgaaggcggcgtccgattccaagtagatggatatcacctcgagccagaggttcgtctctccatcgcggagcagatattcgcaaacgtcccctctgcgattggaattcgaacccacctcctatctagcgatacttgtccagtgcttgctgtcagcgacttcggaacccggggacttggcggcccaacccgcggagatattattccacagcctggagaggcgacgaatttcgtcgatttcatgcgctatatcggcaggccgccaaatcgcacacatgctggcggcacctatggctttggcaaagctgcgtattttctcgctagttcactgcgaaccatctgtgtctatacccgtttccgcaacgattgcggaattcattcaaggttcatggccgcagcactaggaccacagtttgagacaaacgggccggacggacggcgctttactggtcgacattggtggggccgactggcacaagacggtatcgtggaccctcttgtagacgaggaagccgacgcactggctctgctattaggaggggtcccgcgcgacgccaatgactccggcactaccgtctatattttcgctcccgactttgaagaccaaggagcggagcaagtcctaaaacaaatggggctcgcaataaccgactatttctggccgaagctcatcgacggtattggtggagtccccaccatggacttcagtgtgcgctggcagggcagcgagataccgttgcccacaatccagaatgaaccagacctgagactacttgcgggagcctttatcgcagcctccagtaacgcctcaactagcggcacagtactggaaccgattgtttcactgagacccaaaaaactccttggccacctggcgctacttcggcaaccctcagtaccgacggagccaaataatacttctgtgcaggatggggaccaaagaatagacccgctttaccaacgacctattcaacggccacttcggcatattgcagtgatgcgcgctccgaacttcgtagtgaaataccttgaagggccgatagttccgtacgagcttgccgagtatgcaggtgtatttcgagttgacactgatgcggatgctgcctttgcccgttccgaaccaccaacccatgacgactggattcctgatctgctgttggatgctgcagagaaaacctacgttcgagtagcccttcggagggtgaatgatgtcgtaagtgccttcgcagccccgcctcccatcgaagcaactgggactggagcagggtcgattgcaggcttttcacgcctcttaggtggtctagtcccagcgttgagtccggacgcaatgcgtcaaactcgtttgaatgacccatctgattccaatggtggctccggaagaaaggctaatggtcgccgagcaggtacgcctcacattgcatatgtcggcgcccccgaactccacatcgtggatggagcaccggcgatgatcgcccgctttgaaacatcaatccccaatggcgaatcaatccgagtttcagcactgcccaaggtgatcattgctgatggctttgaaagtgatccaccgcagggcgcacagcaaccgcaagtattgcaatggctggactcccaaggcgtgattgtcgcaactaaggttgcgaactgtgttatccccgccacaggaggcatatggactgtcgtggtgagcatccctcccgatgccatgatttctgtggcgctcaaagcggagcccgaaacagacgcatga

SEQ ID NO: 345773 - DNA, 1044 bp, Pseudomonas aeruginosa
atgataagcggtagcacctggaccattgcagacggctggcaccagttggaggcagtggtcgacataccaatacggggcgagcttcgggtcttcgatacaggcctgagcatcgcagatggggcggttctgctagccgtagatgctgccgggcttcgacatgtgttggttccggtcgcacccgactttcatgctgcacatgatcggcgcagcggcggagttcatctgacaacccgcgcccttgttgatgtgtcaggccagcggcaatacctcgatcttgcatgccaaaaggcgcatctcaacaacatcttttcccactttgccgaagaggttctcagcgtattgcacatcgatgcccagccgctacaagcttgccgccaaactctacagcgttggcgtgagctattagatcgcgaggccttcaatactctttccacggaagctttatgtgggctcttcggcgaattgtggcatctggtccgcattgtatccaagagtccccaaggcatctcgagctggcaaggaccatatggtgcgcggcacgacttcactgcgtcaggctgtgctctagaaattaagacgacagtacgtcgagatgaatggaaatttcgcatacacgggttgacgcagctggaagcgccacgcgatgcccggctttatctgtgtgcaatgcgtcttgagctgaatggtgcagccggaaccaccgtgccggatctgattcagactgctctggcatcaggcgttgaccggcacgatctgctgctgcgccttaatcaagtgggatatgacccgcgcgacgaggctcactaccaacagcttcgtcttgacgtcacagactggcgcatctatgaagtggccgcatcgtttccgagtttaacggcagcttctttcaatcccgcaacacctacaagcggcatagtggatgtccactacaccattgatcttgccgcttgcgcggtcgcgccacttctgcccgcaacgctggacagcctctacgcaacatttgcaggagttcctgatgctgacaccgctggctctgcagtctga

SEQ ID NO: 345774 - DNA, 2565 bp, Pseudomonas aeruginosa
atgacacctgaggatgccgccgcgcgtctgtctacgttgctacccgcctccctggttgagcaggccctgcagaagtaccgcgaagcgagccgccgcgtatggacgatgaaagaaccaggcagcatctacaacaagcatcttgacccgtggtacttggggcccgacccatcagaccgtttgtggcactcctatgaaaagcacctgaatgacaaggaatgggatccagaggccatcaaagacatcgatgacgcctcaacacgagtggtttcgctgctagacccaccaggcaaggctcaaattagaactcgcgggcttgttctgggccatgttcaaagcggcaagactgccagctttacagctgtcatcgccaaggctgccgacgtcggctaccggttcatcatcgtgctctcgggaatgaacaacgttctgcgctaccaaacccaattacgcatcgacgaagatctcattgcagctaatctggagcactggatcacagtgacaaatgtggaggacgacttcgcctccaacaccaacgtcaactccttcttgacggaaaaacactccacaaaggtattgggcgtcgtcaaaaaaaatagcgctagactccagcgtctccacaaatggctcacaggtgcgcgacctgaagtacttcgcgcatgccccattttgatcatcgacgacgaagccgaccaggccagccccaactcgcatccgaagcctgatgagcggaccaagataaatgagctaatcgtacagttgctggcagatctgcctaaagcagcctatgtgggctatacggctacgcccttcgcaaacctcttcatcgacccttcgctaccggaagatctctatccgagggacttcatcgttgatctgccgcgcggaaaggggtatttcggcacggagcagctatttggacgcgccccgctggatgagaccgacgacccagtcgatgggttgaacgtcatcagactggttccggaatacgaagccacacagttgaagccgccaagtagagacgaccggtttactttcgcccccgcgatcacgcctacgctgcgtgaagcaatcctgtacttttggatggccaccgccgcacgccgcgtacgtggtcagcgcagtaagcatgcctccatgctcattcacaccactcagtatgcagcggtgcatagaaactccaagggagtcattgacgccttccaaaacaccgtgttgctgcagattcaaaaaggcgatacagctttagcaggtgagctcgaggcgttgtggctgcgcgaacaagcagagctcccttcgcaggagcttgatctagagccggtcgccttcgaggatttgatggcgaatatggcggcagtagtcaagcagacagaaaccaaagtggagaatggcagtagcccaacgcttgatcgagttgactaccagaaagatgccgatggcaatggccgcatctacattgtggttggcggcaacgtgctgtcgcgcggcttgaccttggagggattgacagtcagcttctttactcgatctgcctccgcctatgacacgctgctgcaaatgggccgctggtttggctacaggcctggctatggcgacctcgctcgcgtatggatgacagaagagctacgcgattacttctacgatctagctagcgtcgagcgcgaaatccggcaggacatctcgcgctacaagaacggcgacgtgactcccatggagtttgcagtacgcatccgacagcacccggctctggccatcaccgccaagctcaagatgcagcatgcagtgccggctaaaatggcgttcaacgccagagaggtccaaacgattgtcttccgtcacgaagatcaggactggctggaccagaaccttaaagcgacgcgcgatctcgttgcacggattcgcgaaatcggcattcagcctgtaacgctgaccgacaagccacacaaaactttcctaaatgttccgtcggcccaagtgcttcaattcttgggcgaatacaccatcgatataagcaacagcgaaatgccagcggcgttgctgcagagctacatccgcgaacagaatcaacgtgggcatattaccttttggacagtagcaatcgttacgcgctcagagccacgcccggagctagggacaatcgatcttggactcgacgccgagatacctttggtcaaccgtgcccgctcactacgcgaaagaaatccgcaagtagtggacatcaaggcactgatgtcagaaaccgacgtagctattgatgtgccgcgacaagctgccgatcttcgcggcaaggatcgatccgcccttcgcaatcttcgtgacgaagcagcaccagacaaagggctactcctcctctatccgattagcaaagattcggtaccgcgaaaaggaagcagccaacgcgcaccgcttaaggcagtccagcacatcatgggcctaaccctcgtatttcccgatgttcctcagagcgatctgacgccacagaactacatgacggttgagctaccggatgtcggcagcgaaatgatcgacattgatgatctcgaagacatgactgagaccgcagaatga

SEQ ID NO: 345775 - DNA, 2109 bp, Pseudomonas aeruginosa
atgaaacttgaattaaatacccccgacctcacatttgatcttcagattcttccgggcgttggcgcaataacagccgacctcgggccggtctggattttggaagaagttacaggccatctacgtgctcaaggcagaaagaaaggtactccgcgaatgaggctataccgccttagcggggatatcttgacagtcgagcaagagcaggatttacctgcaggagcctctcgtattgaaaccgcccgtgcccttctgaacggtgcaaacgctcgaaacggagtcgttgtcagcagtttccgcacagttgctgcagcccaaatggtagagcacctagagagctcgccttttaacagacttcattacctaatcgaagtcgacccgacccgcaagattaccttcgctcgagccagagacggaatgcgtctcatatcccccaaagagcgcatagatacagcaagctggcaacaggtcaatttaagcaggcccgctggtgactcggaatgctacgcggcaaaccttggcaaagctgcacttgctggaaatgaggagctaacttgctttgccctgtctattggcggtatcaagggatatcagcgcggaattctcgtaggtatgacatcgctgagtgtcgataacggactcaggaagctagcgcagttactagcgtggacacgctgggtcagattagcggctcgccgggccaaacgggagaagtcagcaaccgttgctgctttcacacgcgtgcccaacgccattgatagtaatgcgcaactggatattctcgtacgcgccaatcgcaagatcgctgcaggccatgatgcaagggctgccactcaaagctcgctactccccgagccaatacaatttagacgtcgactgactgcgaacaagaaaatactgaatattgtggagcttttcgctggtgccggagggatgggcctgggcttcctcggtgcgcgggctcccgatggaagaggctaccgcatcgtcgggtctgcagagattcatcccatctacacccagacattaaaacagaaccatacctacatgcaaaaggcggggcttaccccgaccaatactacgccgactgagtatgcccctatggatctttgctccgacaaggtcagagcgcaattaggatccatggcaagagagcacggagatatcgacgtactgattggcggccctccctgccaaggcttttcaagcgcaaaccggaacagctggtcgagctcgaacccgaacaaccgattagtggatgccttcctggactgcgtttcgcagatggcacccaaagttctgctcatggaaaacgtacaaggaatactgtggactcccagagatgaatcagacaacgatttgagcgttgcggctcacgtgctggagcgcctcggtggcatgggctatctcgtcttcccgaaactgctcgatgccgtttggtatggggcccctcagaaccgcaatcgcttcttcctgcttggcattcacaaagatgtgggctattcgccggaggagtttggcaagtggggaccgttcccgaagcccacacatggtccaggcacggataacgcgtttgtaactgtccgcgatgcaatctccgatctaccggagctaggaaacggggatgctctagccgaacgcccctacaatgaaaatatcggccgcctgcagcaaaatacctttcttcaaaccatgcgtgctggcgctcccgaaggaattatctgggatcacgttacctcgcgacacgcagaatatgttatcgaacggtacaaaggcataggtcaagggcaaaactggcaggcggttcgcgacctaatgactaactatgcagacgtagagcggacgcacagcaacatctatcgcagactggcctggacagaaccagccattactattggccactatcgcaaaagcatgatcatccacccggcgcagcatcgggggctttcgcttcgcgaggctgcacggctgcaaagttttcccgactggttccgctttgctggtagcacgtcgggtggtgacggcggcctcatgcataaacagcagcaactcgccaacgcggtctgcccgaatgtaacgaaggccgttgcagagttcattctcaacctctag

SEQ ID NO: 345776 - DNA, 1551 bp, Pseudomonas aeruginosa
atgagtcgcacgttcaacgctatcgagcgtgcgctcaacgctgagttcaaacgcgttgagcgagaaaatccgagccaagagctcaagatggccattgagaccagcaccatcaggaaagtcattcgtgacatcctttccttgcctcccctggcaaaggtgccaggcacagctgacgaacatcgtattctggagcaggtcatctgtctggttagcttttacaacaggaaatggctgagtgagatccaggtagcaatccctcacagccgctttacgtccaaaacacgcccgagcgaggcgaaactcaaatccaaggtaccattacgaacgaagcctgttggagatagggctcctgcgatgtcagacatcgagttgcggaactactttctgcatctgcttttgacgtgtgtgcctgaagaggaaagaaaggctttcccgcacctgttgtcgttatataactcaaacgaagatacatctgagacggcagataagctccaggttgtaatggaatcaggagcgtggctggttctgagcaaatgccaaggccatatctacgatgccgaaagaggctctcggcctcgcccacggcctgagtcgcaaacaccacgacatagtattcgggatttcagccttgaagagatacagagtattcacgaggaaattttagagtcgatgagccatagcgtacctagaagcagatggtactcggatcttatagctacaacgccaagccaagatggcttgttcgctaagttgttgatcaatgcggctcttaatcgctttattttggagaattgggcgtttgagcatcgaacccatgctgtagccgatgtccatcgtgattttctgtctgagctggagcaaaccgttcctcagggcttgctcggtatccttgatgactaccgactgaatggcgagatctgtcacggggcgcttgccaagtatgtgctcaagggctctatgtcaaagcgcaccaacgctttgaccgatagtgtcatgaaagcactcaatgcgcaggccgaggctgtgctcgcgagcgcgagcaacgcagagtacggagccgaagtcgaggttaaccacgccattctgcgctctcacgaattatcgcgagctatgatttggctcgccctcgcgtggatctatctcaacgacaggaggctacccgatgacaacccgaatctccatgtcactggatttcgccctatatctcgccgtgcgagagctacagagataggtcaaaacatggtttcgctaaggcgcgttctgtcgacgttgatgctaggccaccattatgactatccatctgcagcgcggagcattctgcatgctcggtgggtaatcaatgtacggcgcattctaattcgcaccctgctgggtaacttcaagcaagccgcattgtccaagtgggacagtgtactcatgagccagtgttcagaagaccaagtcgcgcagttgctagaaaggtgcggcttgcctccaaggccatgcgtgcaacttcagggcattgtgggggggcctggccactcatctcatgcttcgtgtgagtcttcgtag

SEQ ID NO: 345777 - DNA, 279 bp, Pseudomonas aeruginosa
atgaaagactatctagacaagaaaaaactcctcatccgccaagggcaccagctctggcatctccataacgctctgcaggagaaccctgaggaggtagtgatcggcgagctagcacgtgtctacaaggatgtggggcgcgtaggtaccatctccgaaggcatggttctggccgccgccaacatcaccgcttaccgcagcaccgaggagggggagcgagtaatgcagcgcactcgccgcaacctgaaagcccggactaagcccacgctgttgttcacctaa

SEQ ID NO: 345778 - DNA, 792 bp, Pseudomonas aeruginosa
atgaatcgccccgccccgctacgggagttcgatcagatctacatgaaagtagctgacatggtcgtccaggccgagtacgtcgctcgtgttttcaacaacaagaaggtcgttttcgtgggagacggcgacggcatcgccctttcagccgctcacctcaaggcacaaggtgtgatcgactatggcccctcgtcgattacgctattggactttgatgaacgcatcgttaactcagttcttcggttcggcgaaaagctggctccgaaagtggctatcactgctcacctctacaacgtagccgatccgcttcccaccgagcatttcggagcctacgacggcttccacataaaccctccatggggtgcgagcaacgccggtcagagcgtcaccgcatttctggagcgtggcagccaggccacccatgacaagggcttggggatagtagtgatcgcggatgatcccgaccttgcttggactcaagaggtgctccgcgacactcagaaacgggcaatcgaccttggttatgttgtctccgagctgctgccccaactgcatctttatcacctggatgatgcccctgacttgcgctcgtgctcgtgcctatttcgccgggtacaaccagacctgatggagaagtcctccgaaaagctttcgagcgatcgcctgcgcaacttctatggaaagaacaatccgctgacctacaagtacgtgagggagaagccagacctcaatgccaaccgggaggcagaacagcgctattcacttgaacattacctggagactccagatgcctaa

SEQ ID NO: 345779 - DNA, 576 bp, Pseudomonas aeruginosa
atgcctaacccgctcattgatggacagggtgtgattttcatgaaggtaggcctccatgcctcggagactcttgaagatatcgttaagaggaagcagcgagagtacgagcaggccgggtcaatcttctggggatatggcgggagctcctgccaccccaaaacgatggtgcaaccgttcggcaggacgatggaggaagcagggaagcacctcctaatcatcatgaacgagatgaactcgaagcatacagccccgccagtggccgccgctgagtattcggaagatggcgtcgactggcttgcggttccaaagggtattgaagtccgcggctcacgctatgccctagtcctcgatgagctgttgattgatgagtttgaggtaaacctcaacgagtttgaggtcgggctcggacaatcccggggcaaagttgcttctgactacctgaaaggtcagaacgataagggctgcctgattttccatgagccccatattcctccccccccagagcaacgcatcaccaagcaaatagggctcattgccagggtgaagccaccgtatgccgtcttcttaaggaactga

SEQ ID NO: 345780 - DNA, 756 bp, Pseudomonas aeruginosa
atgattccctctaccttttgctggaccaaaatgggtgtcgaatcaggcgaggctctcgacctgatcattcgccgcaaggagtgggagcgtcagttgggcgatgggctgtttttctggggtataggccaatcgctaggtgacaatgctcgcgacgcagccgggtctatggatggcgagattcaggtcttgttttctcccatgcctagtaaggcgaaggccatcgatgtgacgccgggtgatgtgttggtctggaatagctgggtcgatgagcgaggtaatacccagccattgccgaagcatgtgttgatcaccagtcgagctgatttgccttctggtcggcgaaaatccagccattacgcactggtgtgccgatccgtcgacagtttgggcggggggacggaaatgcaggtcacggccgcattcctgaggaacttctcaagtgacaagccgctgggggcgtctcaggtgacagcggtagtgcgaaatgctgagtatgcggtcagcgggaacgttgctaagaagtatccggtgagttttaccgccaacatggctgcaccctattcggtacagctttctgatccagccctgcttacccaatgcgatgttgaggccatcgttgaggtctcatcctgcggaaccgtggaggattggaatcggcttgtaaccaagctgcgcagtaagcgtagctcggagagtcgaagccctattactttcgatcttttctgcgctgaccaaagcttaagcgctgctatttga

SEQ ID NO: 345781 - DNA, 1014 bp, Pseudomonas aeruginosa
atgccgaacacgcacattgaccgtatttttggggtgcttgagtcagcaggctatccacgagatttccagcattcgcttcttcctcactgggtaaccagcgaagtgctccaggatgagggagcaacccttgaggtggcggctattctggcgaagcggctgggcctgagagtcgcccccctctttgctgataacccaggccttgaagagcttcgcagacgagatacgaagtacaagcgctcgatccctaacaaatccaagaatctcaatgctgcgacatcacttgctatgttcgtagctgaatcggttgcctacgcgacccccttcaaatatcagccattccctactgatccgtttgagctgcgagcagaaatcctaggtaccgagggcggtaattggctcggcctgcgtaacgcgctgcaagcatgctggcggcatggcgtaccagtgatctatttggatcatgtcggggaaggccttcccaagatggacggcatggtcaccgccgtagatggccgaccagtcatcatcctgtccaagaagagcacatcttgggcgtggcagttgttcatcatcgctcacgagattggtcactgcgctctaggacacatagggccggacgagatactcattgatgaatctctcggggagcaatcgtatgctctcgatgatccggatgaagatgagcaagcagctgaccacttcgccatcaccctgctcaacggcagggaaaacgcgacctatgcttctggaacaagcagcatgtccgcgcggggcctcgtgcaggccgctattgattatggcaaagcgaataaggtggacccaggccacgtagtcctcaacttcgctaagcacaacgatgcttggcccttgggaatggcagccacaaacatgctgcaggagggaaagcccccggcgggtatagtcatcaacgacttgctttggagatgcattgagcatagagccctccccgatgacaccctaggattgctaagccgcgtggcaccggccaaatag

SEQ ID NO: 345782 - DNA, 645 bp, Pseudomonas aeruginosa
atggcgctcaatctcttcgtagacaacgacgtgattttgaagcttgcccagtacgggatcctcgagcgcctgcccgagctatttagcgaccagggcgagcgcgtccaattgattgttctggactctgccaaatacaagctcctacctaggcgcagtcgcttggaactctgtggaaccgaggaagtggctcttcaggttgagcattttcttgatagcgccacgaagttgtcgcccagcgtggttgacctcaatacgttagagatcttcaacgctgcgccaggaatcgatgctggagaggccctccttttcgctgcagcggcaggcgatgacaacggcagagtactaacaggggataagcgcgcgctatccagcctactagcccaggatcccgtgcagcttacctcctggctgagcaacaagctgataactctggaagcgctgatacaaggatttgcccgcctagatctaccggccatccaacacatggttagagccaacgccggcgtagataaggctctcacaaatgcgttcggcgtatccgccccagcctccgaagacagcgtgcaagctggccttcaatcctacattgagcacttaaagaaaagcttgggagggctcataaatagcggccctccgtttacctag

SEQ ID NO: 345783 - DNA, 756 bp, Pseudomonas aeruginosa
atgctcttcgtgcctccgtgcgctaacgcgctccgtactgtaaaaacccgcctgtctgctgttcttccccatatatcgtcgtcgcacctcaccgaagccctcgcgttttctgctggcttcagaaccaatgcatctcttcgggcatcactctgggagccaggaaaggatcccgcgtcctttccggcgcttgaatttcacgatgggaagttcctagagcgacttcgccaatttgactacgaggacaccggagagtggcctggcttttctcgctttgcaaagcaggaatgggtcggcacgatgtaccgttccgaacgtgcaatgtgtgcgcgtaatctgttaaccgcagcaattatttccgggttcactcaacgccttttcgggttaggtgctaaggaaaacttctggccaggagctgaggtcgacaaccgaaccggccgatccaagaccggcacttttttccacgtatggatgccagaggggatacccacactagcctgggtggacgacaacgggatgggtgagctcaccgtcaaagtcgcatgccggccaaaggatgatcgtattcgctattcgggtgggttcgaatctggtgaggcgactgcaattggttggcttgaacgggcgaacggcacctggatcatgaacgaccaccatgggggtatcgatctagccgttcgccggacggtacaggggcgaatcgcccgggcaatttcgccaaccatagggttccaggatcaaggagccttcattttctga

SEQ ID NO: 345784 - DNA, 636 bp, Pseudomonas aeruginosa; identical to SEQ ID NO: 345754

SEQ ID NO: 345785 - DNA, 1650 bp, Pseudomonas aeruginosa
gtgattgcgttgcgcgcctggctggtcctgctgtgcgccgtgccgttgctgcttcgcgcagcggaggcgccggtccagctggcctggcgcacgacccagggctacgaactggtgagcctggatcgccagcgggtactcgagcgccggccgttgccggccgatttgcaggctccgctgggcagcctgtggaaactgttcgtcttcgcctggctgagcgacaccggccaggccgagccgccctatacctgtcaggggcgcagccgcgaggaggtctactgctgcgagaatggccagacgatcggtcgtgaccgcgccctggtgcgctcctgcgggctgtatttcgagccgcagcgcctcgccttgcggccggaggcctggcgcggctactggcaggcgcgccaggcaccggcctggttgctcgatctggaacggctgcaaccgcagacgcgggtgccggttaaggagcttctggagcagttgcagcaactgccggcccagggcgaggcgcggcgggtactgctcgatgtggcgttgcaggccggcgacggccatgccgtggccagccttggcggccgcctgcgggtgaagacctggagctggctcgacgaccatgacccgcaggcgcgccagggcggtttcgccggctggctggtcgatggaacgccgctctggctcggcggcccgggaaccagcaaggtgattctggaccgctacgccgaggtgctcgggcgcttcctgccgagtccgtggccggccgatccgggccgttgcgtggaagtgaacctgttcagccgctatccgctgcgctcggtcagcgatccctccggccacccggccgccgaaggcctgctgcatggtccgcagcaagtgctcttcgccaacggcaatcgactggacatcgccagcgccggcgacctcttcctgcaacgggtggatggcgtgccgcgcctggtcgcgcgggtttcgcgcgaagagtacgtggcgcgggtgctggagcgcgaagcctcggcgcagccgaaggaagccgctcgcgcgctggcggtgaccattcgcacctatctattgcaaaacgccgcgccgcgcggcgaatgcctggccatcgatgacagcagccagcgccagcgcgtggcgccgcgcccggccagcgcgccgacgcggcagatcgctgcctggagcgccgacctggtgctggccggggcgaccgtcaactatcactccgaccagcctggtccggcgcgcctgtcctggaagcacgcggtggagcaagccgggcagggactgggctacgacagcatcctcgcccaggctttcccgcgcagcagcctgagccgctgggacaacccggtggccgcctgccagccgttgccggctgccgaagactggctgcgcaagcagcgccggcagtggcgcgagcgtctcgaccgagagcccggctacgaggagattccgagtttttccgtgtgccgcctggcttccgggcggccctatgtcgatcgcgagcgcgaacgcatcttcgtccgcggcctgtattccctacaggaacgcttggacctcacccacgaatacctgcacctggccttccgcgcccatcccagcggccaggacgaaaactatatcgaaagcctggcccggcgcctgctactggaatga

SEQ ID NO: 345786 - DNA, 888 bp, Pseudomonas aeruginosa
atgatcgcggcctaccaggcgcgctgccaggcgcgcgtcgatgccgccctggacgccctgttcgtcgctccccgcgaagaactgcaacgcctctacgaggccatgcgctacagcgtgatgaacggtggcaagcgggttcgcccgctgctcgcctacgccgcctgcgaggccctcggcggagcgccgcagcgcgccgacgccgcggcctgcgcggtggagctgatccatgcctactcgctggtccacgacgacctgccggcgatggacgacgacgacctgcgccgtggccagccgaccacccaccgggccttcgacgaagccaccgcgatcctcgccgccgacggcttgcaggcgctggccttcgaagtgctcgccgacacccggcgcaatccgcaggaacatgccgtctgtctggaaatgctcacccgcctggcgcgcgccgcaggctccgccggcatggtcggcggccaggcgatcgacctcggctcggtcggcgtggccctcgaccaggcggccctggaagtcatgcaccggcacaagaccggcgcgctgatcgaagccagcgtgcgcctcggcgccctcgccagcggtcgcgccgagcccgcctcgctggccgccctggagcgctacgccgaagcgatcggcctggccttccaggtgcaggacgacatcctcgacgtggaaagcgacaccgccaccctcggcaagacccagggcaaggaccaggcgcacaacaagccgacctatcccgccctgctcggcctggaggccgccaaaggctatgccctggagctgcgcgacctggccctggccgccctcgacggttttccgccgagcgccgacccgctgcgccaactggcccgctacatcgtcgagcgacgcaactga

SEQ ID NO: 345787 - DNA, 603 bp, Pseudomonas aeruginosa
atggctagagaaatagaatcattctcagtatgggcaccaaaaaatcttcatgcggaatccgatatcgcctgggtacaaaactacctgcatgaaaaaggggaaatatctctccatgggcctgtagatttagatcgacttattagagcgggagtacaactcgagaaaagcgactcaggaagaaattcccttagacagttaaaggctgcctataggacaagaaaaagcaggagtgcggaggaaagatcaagtacaggagacatcagccccgcagagcggggcctctcctctcaaaacagaaactataaggctctaataaacttagccgacgaagtattaaaatacgaagaagcgtttaaagcaaaactaaaacactcagagaaccagataaaagaattaaaagagaggatatctaaatctaaaaaaatcacacaaaaagccctcaataaatcaaaaaaagcagcaaaaacactgaataactttcgggaaagccccctaaaaaactcagaaatagaaaaaatcatacaggacaatgaagagatcaaagaactacttatagacacattaaacattctagacccactccccctcaaaagcgcaccataa

SEQ ID NO: 345788 - DNA, 1146 bp, Pseudomonas aeruginosa
atggaagcgaaaggacactgcgcaagtggcttcgaggaggtccgccaggtgttcgaggcgatcttcgacaatccagccgagcgcggcgccggtctgtgcgtacaggtcgaaggggggacggtcgtcgatctgtgggcgggtgtcgccgacctccatgggcaggttccctggcagcgcgataccttggttaacgcctattgcgtgatcaagccagttaccgccgtggccgcgctcatgctggtagaggagggccggctggggctggacgtgccagtgtgcgcctactggccggcgttcgcgcagaacggcaaggagcgaattactctgcgtcaggttctctgccataccagcggcctgcccgcgttgcgtcctccagatcgaaccccaataatgtatgactgggaggcgatggtggaggcggtggccgccgagcccgcatggtgggctccggggatggaattggggtacggcgcgacgacttacgggtggatcctcggtgagctgatcaggcgggtcgacggcagggattcgcaggccttcatccaggagcggatcacccgatcgctggggctggaagtgcatgcgggcgtggcggcggaggatttccagcggatcgctcacttcgagtacgccgcgggtcgccagggtgaacactacgcccgggagctgcgcgaaatcattgtcaatcgacctggggatgtcgctaccctagcgttcaccaatccaagcatgtcttcgaagaataccagcgacccccgctggtgggcctaccaccaacctggtgcctgcagccatgctactgcccatggccttgcgggcttctacagcgctctgctgggtggacgcctcatcggcaccgaactgctgcgcgactttcaccaggagcaaagctgtggcatcgaccggacgttgtgccggccgatgcgctacggtttgggctgcatgttggaaaacgctgccgatccggtggcctcgtactgtatggggcagaaggcgttcggccatgtcggtctcggcggtccggtcgcctttgccgacccggaacgtaacctgagcttcgccttcgttaccaccaccatgggcggccatgtactgatggatccacgtcccagggcattggcggagcgctgctatgctgcgctgtga

SEQ ID NO: 345789 - DNA, 126 bp, Pseudomonas aeruginosa
atggcaccaccgtctacgatgcgaaggaagaagctgaaaaagcccagcaaggtcaaggcgaaccgcaaggtgagcccgcagctcctgctgagcacgctgaacaagccgctgcttgagcaggcttga

SEQ ID NO: 345790 - DNA, 162 bp, Pseudomonas aeruginosa
atgaattacgcccaggccgttgaaatgcccgctctgcccgaagttgaagaagtaagcctgaccgacatcgaggatgaactgctgaacaacagccacttctgcgacatggcttggttgatcttctccagcctgagcactgacgcagtcgttctgaccgcttga

SEQ ID NO: 345791 - DNA, 711 bp, Pseudomonas aeruginosa
atgagcacaatgaacccgttcctcgaaaacctgtgccggtaccgcgtcgagcatctgcttcaagtcaaatactcgaacagcgaagtaccgtgcaatcgatctatccatagcagccaagcacatttgaaggaccgggaggtccagtgccaaccctgcatcttcagcaacgacctctgcctcatcgtaggagctggaaacatagatccagagctagccgcgcgctgcggaagtgaaggcacggtgatcgacgtcacctacgccgttctggatgcagataccggccgcttcatcgggggcacctacacccttgatggcgaccatgcccttgtggaccatctagcgtaccgctatgagccatggagtcgctcctgggagatcagcaaatcccacattccgttgagggctctgcacaccctcctggagagtttcggcacgaagatgctgatccgactcgctggagtcctaattggaatcttctggatagacgaactaggcagtgttggcttccgactggtgcatacgccctggaccgacgagaacctggaagtgatggacttgaccgcctcagccttgcgtgaggagcagatcgccgctggctacccggccgaactggtcgacctacttcatctggcggctcaggcagacatccgctacctggtactcgatccattcgcgcccacgctcaagggcctgccgctttatgacgattga

SEQ ID NO: 345792 - DNA, 930 bp, Pseudomonas aeruginosa
gtggccgagaaggtccggacctggttcaaccagatgttccgctatgccttggtggtcgtatcgggccttgaacacaacccggcctcggacctggatgtggtggccctgccgttgcctccggtcaaccacaacccgttcctgaggatggccgagttaccgaaatacttgcagcgcgtgcgcaaataccgcggccggctgcagacgcagttgggccttcggctgctgatgcttaccggcgtgaggaccggggaattgcgccaggcgactcccgaccagttcgacctggaccagggcctgtgggtcataccggccaatgtcgtcaagcagctcaagacggacatgcgccgcaagcgccagttgccgcagcacatccccccttacatcgtgcccctgtcagtgcaggccatggaagtcgttcgctatctgttggagcagttcaagcccgcccagcgctacctgctgcgcggtgatgtggacatcaaggcccgcatcagcgaaaacaccctcaacagcgcgctcaagcgaatggggtatcgcgacctgctgaccggacatggcatgcgcgccacgatgtccaccgcactcaacgaaattggctaccccaaggtctgggtcgatgctcagctgtcccacgtcgaccccaacaaggtcagcgccacctacaaccacgccgagtacgtcgagcagcgccgacggatgatgcaggactgggccgatcgcttcgacctcttcgagcaaaacaaggtcgaagcggcgagcatgccgctgaccttgcgcatggaggacgtcccgcggctggagggcgccaacaacacctcccgaccgcaggccgcccccattcttctggtcagtccatcggccgaggcggcacccctggtgaccgctgcgacacaccgtccgccggcggtaccgcagccgcgcaaggcatga

SEQ ID NO: 345793 - DNA, 402 bp, Pseudomonas aeruginosa
atgtccgacgtccagaggcaacggatggtgttggttgacctcttcgaggccccccacaatcttcccgtggccgagtacgccaagatggcgggcaagtcgcgccggtggatcagctatgaaatcaaggcaggcaacctgctggcactcaacctgggtaatcgtgggcagcgcgtgccggactggcacctgaacccggccaagcatgccttgatccaggccctgctcaagctcaatcgtacagctgaaccttggagcatctaccatgcctcgaccgcaccctgcccaggtctacgcaagcgctcggcgattgagtcggtgaccttcgacaacttgaacaagctgatcggtctggtttcttcgaccatcaaggaaactgagtggtcgccgcttgattcccgctga

SEQ ID NO: 345794 - DNA, 3186 bp, Pseudomonas aeruginosa
atggatcgacgccaattcgagttccatttgcactctttgacgagtcgcaaggaagaaaccgcgtttgagaacttcgcgcgggtgctaggcgaaaaggagatttgcccaaacttgataccacaaaccgggcctaccggcggtggtgacagcaaggttgataccgagacctatccggtcgccccagcgatagcgacgctctggtatgagggaagtcctacgtcggctgaccagcgttggggcttcgctataagcgccaaggctgactggaagccgaagattcgctctgacgtcgcaaaaattgttgcgactggccgttcgtactcgctcatctatttcatttcgaaccaagccatcaaggacaaagatcgtgccgacatggaagatgccctgacggccagccatggcgttcaggtgcgcatcctcgaccgcacctggattatcgagaaagttgttcgaaaccgtcgatgggatgttgtggcggagactcttcagttcgaactcatgcataaaacgctctcgacgccggggccattagacgtcggcaggcttcgtgacctggaagcgctggacgagaagatagaggcagcagcggtctccgcgacgactccgcaattggttgaagagagcttacagtccgcactgcttgcacgtgccctcgacaggccaagatatgagattgatggtcgtttcgaccgtgcagaacgtctggcacaaagaacaaacaacagtagacaacatcggcgcatcctgtaccaaaaggcgtggaccgccttatggtggttcgacgattcggaggaggcggccaggctttacgagcctcttgcggccgaagccctttcctcggactggatttgggacattgagggcgtcgtcaatctgtggcttgccctccaggcaagcaacgccttggacgaatcgcgaacgctcgccctgcgagtagctctccagcgtcatgccgatgacaagactagggagacgagctctctgtgggcgcagaccctgttatttcaaatggacctcgtcgccggcatgcgcgaaaagggcgacctgcggcccatcttcgttgctatgcgccaagtacttagcaatgtgcgccggcagattgagttcccgattgaacctgtcgttcgcctcatacgcgagctatcggccattgttggcgattcacctggctacgacgagttgctggacgcagtcatcgagattgagcgtgacagaaacggtgaccgcgcggccggggagctgcagttgcagcgcggcctgcagaagcttgagcgacagaagtcctatgacgcgatcgacgatctggcgcgtgcgcaaatgctgcttgcgcaggaagattgtcgagacgagttcatcgtagcgcttggcggcacggggttggcatatgagtctgctggccttctctatgcagccagggcgaacttggtgtctgcgctagaccgctgcctgtattcctggttcaaggaggggactgttgaccaccgagccttgccactactgaaaaagctggcgtggctagaattgcagcttgggcgcgtaccttacgtgctcgcttgggttaagtggtttgagcctatccagagtgtgttgagcttgaacgaggaagacaccaaggctctcgagcaggagttgcaggccattgaccgggtcttggggatcttgattctgcgcaccgcgcatgaagattgggcatcgctgacccggcttccgggcgtcctgagcagtctgggcctggagatgtcgcgcgcggcggctctcttcatgctcggacatgtagataaagtccgagccgaatacggtgcggagaacgatgacctgaaccagttcgcgagcgagtggctggccgctccggcggcgcaggatcttccgaatcggcctctatggcacttcgggaccacgactatgacgacggtcattctggggtgccaggttgatgttgtcgcccgcggcggtatcgcatcagcgttgcttggcgagagcatcattggatttctcgaggccttctactccactgccgtgcgttccaggcgactttggtctcccagggaacggctggttgtggaggtccgacagtcagaggctgcaacgccgccctttgttcatcgccaaactgaggatgactgcggcgaaaccaagctcgtcgtcacccatcctgttctgccagccgaaaacctggttggtgaaggtttcgaaaagcagatatttgagctttttgcgcatatcacctccgagctacaactcggtgtgggccgaccggaattcgaggagatgtttgcgaagcaccgtgctcaagaccgtgcctaccacgtggcgcgctctatccttttcgtcacgaacatcctgggcaactcgccgccagggcgggcggaagactgggttcgggacgaaactctcgacgcgttcccgctcgtgcgcgacgaaccttggatagcgaccattgcagggcccgcgcccaccgaccagactcctgaacgggatgccatgcccacgagtgaaccatcgttggaacatctatttggcgcggatgcgttgcggcatcgcgacgtgatggtcatgtctcccatcaatctaccactttgggataaggccaagtggaaggggactgctgtggcgctgccgcaggtacctggcgaagtggtgccgccgtttatgggtctcgcgttcgagaactttgacgcaggcaagaagatctttcgcggctggcgcaagaaggttggtgctgaaaatcgcgacgggtggctgagtgtgacggtcataaccggtattcgccgtgaccgcccgctggactatcgtgtagccatcggcatcagcgagtcgtatctggagaccgcagcaaatggcaagcaactgctcgccatggcctaccggatgcatgatatgacgccctcatccaaccgtaacttggaagccctgcaaggtcactttcgtcgtgcgggattcgtcttcctaatgcccgtgatgttcgacgcggcgtcttctggcacccagatgacaaatgagaactttgagctcggcatccagctttcccagttaaggttcattccagcttggcaggttggggaaacgtcgccactgctcggcgccatgggcggcataactgatcctgttgttccacaggatgtggccgaggtgcctttcttacgggctttggaacgcatcagagcacgggcgtcgggcgcctag

SEQ ID NO: 345795 - DNA, 744 bp, Pseudomonas aeruginosa
atggcgaatcgtcgtctgagcaaggagatccgcaccatccaccacgaggtgaatgggatctatggccatcgccgcatcaaggccgagttgacggccatggggcaggcgtgtggtcggcaccgggtcgctcggctgatgcgcgaagccggccagcgtgtttgttcgcgcaagcgctggcggctggtttccagcagtcgtcacgctctgccgattgtcccgaatcacctgaatcgccagttcgcctcggatcgcgccaatcggcactggggctcggacatgacctacgtgcggacggcccaaggctggttgtacctggccgtcgtgctcgatctctattcgcgcgctgtcatcggttgggcgatgcaccaccgcatgcagcaggccctggtacatgccgcgctggaaatggctgtggcacgccgccaaccacagacggaggtactgctgcactcggatcgtggcagccaatactgcgcctacgactacaaggccttgctgcggcggcattgcatcgtgtccagccattcacgtccggggaactgctgggacaacactgcgacggagagcttcttccgttcgctgaaggccgagcgggtgtacctgacgcgctatgccaactaccaggaggcgaaaaccgacttgttcgagtgcattcgcttttacaatcaccgccgtcgccactcgacgttgggctatctcagtccgatggagttcgagcggcgaaatgcgagcagtaactcttaa

SEQ ID NO: 345796 - DNA, 246 bp, Pseudomonas aeruginosa
gtggcacgcgacagcgacatgcgtcccatgctcggcgtcagcatcgagttgatgctgttctctatgtcgctgaggatcgaggtcttcagctcggagctggtggtctgcttgctgccggagtcgccgctgatgccggagctgccattctgtccagtggatccggagccatccccgctgatgccggcggccgtcgtcataccggaacgcacggtggagtccaccgtgttgacgtcgtcgaaggcgtag

SEQ ID NO: 345797 - DNA, 603 bp, Pseudomonas aeruginosa
atgctcatcgatatcgccgccaccgaggcagcggccgaccaacagccgcgcgagccggtcaggatcgtcgccggcgagcccgtggctccgcactatggccagtcccgggaagcccagccatcggcagcagcgaaacagaccgagcaggcagaagcaccgaaggccgtgccgcgcgaaacgcccgtccccgtggttctgacgcgctatgcggcgcagatgctctatgccccgcttcgcacggtggaaccggtggatggcgtcggtcaggtgcgcgtcaagcgacagctcgacctgaccaccctgctccccagcctacccatcacggctaccgccttgggcgcctggcggctggacgactactacgtcacggcggtgaagctgcagaacgccaacgcccagcacctggccctggatcccagggacctgatgggcaatttcgtcgccgcgaccttccagcacccgtacttgggggcccggggcgacgcttccgacactactaccgtgtatctggtgacgcgcggccgcggccttgccgacgcgctcctgccctcctccatcagccagatcgatcccaaaggaggccgtcgtggcgctgaccggtaa

SEQ ID NO: 345798 - DNA, 1506 bp, Pseudomonas aeruginosa
gtggcgctgaccggtaatcccctcctgaaattgctggtcatccccgtcgtgatcggcgccatcctgatcggcgtgagcatgatgggcaagaaggaaagcgcgcagtcacaaggcgccgcaactccgacggtaacgtcggaagaagcggcaaccctgggcatcgacggcgacacgcccgccgacacactacgcaccatcgtggcagaaagccggcagctcaaggaccagatcagcaaggtgatccaggagaatgactcgctcaaagccgccaatgagaacctgcagggccgcctgcgcaacatcgatcagaacatcgagcagaagctcaacaacaccgcccaggagctgcagcaacagcaggagaaccgtagccagacgatcctggaccaggtacagaaacggctcgagaacttaacccacattcccgagaccggcgacaccgacctgcccgtaggattcggcgtgcgaccagaggatggccagcactttcagggagcgggctcgtcgtcatcggacatcgtctggatcgagccccaggacgcccgcgcggtcgatgccaatggccagccgctggccgccggctccaccacccaaccgagcggattcagcttcccgacctccttcggcaacgccgtcgatcgcggccagaacgcgctggagcggatcgatgacgggctgcaccccgtcggccaacagcgatccgacctggaaaaccgcaagctcgtccgcaagacctacacgctgccgcagaactcgacgctcatgggctcggtggccatgtctgcgctgatcggtcgtgtgccggtcgacgggacggtcaatgatccttacccgttcaaaatcctcatcggcccggacaacctcaccgctaacggcatagagctgccgggcgtcgccggcgcggtagccagcgggaccgcctcgggcgactggacactctcctgcgtgcgtgggcagatccgcagcctcacgttcgtgttcaacgacgggaccgtgcgcaccttcccggcgccggccgaggaggtgaatgacaaccagagcaacaacaaccagaccgccagcgccgaccagaaaaccatccagggcggcctcggctggatcagcgacccctacggcatcccatgcatcgccggtgatcgccgatccaatgccaaggagtacctgggcaatcagagcctactcacggctgccggggccggcatcgccaagctcctggacgccgacgagaacaacactagtaccgtcttcagcggcaacggcaccagcttcgggacgaccggaaccaacagcaactcggccctcaacagcatcctctccggcggcgtcagcgacatccgtcagtggatgaacaagctgtacggcgaggccttcgccgccgtctacgtgcaacctggcgcacgggtcgccgtgcatctcgatcagcaactggcgatcgactacgaactcaagggccgcaaggtcgactacagctctggagccgctcatgcaacagcagacctggactaa

SEQ ID NO: 345799 - DNA, 444 bp, Pseudomonas aeruginosa
atgcaacagcagacctggactaacccccttcttcgtctctgcgccggcctggcctgcgcgctaaccctggcagcgtgctccaccagcaaggaggagatgctgccccacggcgaggccaacatgctcgacgtctgggaacaaggtgcaaccagctcgataggcaacagccgtggccggctactcctcgatgccaggcaaacgctgcggcgcccgatcaatccgcagcaggttgcctccgcgaacgaccaggccgactacacccgcacggccagcaacgagatccacagccagttcaaacgactgcccaatcccgacctggtcatgtatgtgttcccgcacctggccggcagcgatcccgccccggtaccgggctataccaccgtgttccccttctaccagcgagtccagtacgccatgccgggcgagcgcacggaggactactga

SEQ ID NO: 345800 - DNA, 351 bp, Pseudomonas aeruginosa
atgcttcgctcgatcaagatcatatcgacctaccctgatctgcctgcgcggatccttgagcttcgctcactgacccttgacgatgagctggacgcaacaatcaccctgaccaccgcacacaaggccaaggggctggaatgggatttcgtttgcctgtacgacgacttcaacgcggacccgctgtcccccgacaccgacccaggcaagcgcgacgatgagttgaacctgatctacgtcgcagtgacccgagcgatgaagatcctcgccatcaacagcttggtgctgtcgatcatgcagcggtacgtggacgacagacaactgaaggagcagatagctatctgtaaaaaatga

SEQ ID NO: 345801 - DNA, 300 bp, Pseudomonas aeruginosa
atgaagcagaccttcgaataccatgtcgagaacatcgacattccctataaaaccctcaccaagggcgtcgcgatgttcaaacacaaagaagacaccttggaacccgacgaccacgccttgctcaaccctctgcgctgggccgaggtcgtgcgtctgggccaggaaggctgggagctggtgagcgttcagccactcatgcggggtgtaaccgagatcggcaatcagaacgcccagggctgggcctggggcatcgctctgcccgtcagctacctgctgtttttcaagcgcgcaacctcataa

SEQ ID NO: 345802 - DNA, 618 bp, Pseudomonas aeruginosa
gtggccatccttggccggtgcggctggggggagcacagtggtggattcaggcttcttggccggagcggggctggttgtgatcggcgccggtgtcggcaccgaggcgaccacgacgggcgactccagcgtgctgactttttccgtggaagaaggttgcgctaccgcctccggtgttggggcagcgggtttcgcatacagttgctggaccggtttcggcctcgacgctgggggaagttgatagcccgggcgcagcacgaagcagacctgccgcgccacttcgtcgaccttaacctgccaggctggaccggagaggacctggagggtgttgcgcagggtcatggggccgagcttgtactgagccgccggcagcggccgggtgtagaggatgttcacatgaccggcctctgccgggcacagcgagtaacccgagcggctcatcacgtactgcatggcgtccttgacactcgggttcatgctcgacgggatggtcacgtcgataatctgtgccatcaggtcgcgctggccagcgtccggctgggtgctgaccagggtgtagcgcccgtagcgcacgacgggctccttctccggctgtacgccattcgggtacaggtccggtga

SEQ ID NO: 345803 - DNA, 870 bp, Pseudomonas aeruginosa
atgaacgtatttgcactcattaataatcctggtgagcctattcccctgaccgaggatgagtattacaggcgaacaaatagaaaggagccgtatgttcaaagtgtgaatggtgttttgagatcctatgcgatctgcccctcgtgcaagaatccaacagttatggtgaataggactgcaactgagacgcgcagcggtagcttctatgctaaacactacaaaggaaatgttcgtggtgttgctaactatgatgagggagaatatctaaactgcgatcttaccaattcatcgaatatggacgatagggttaggcgccctccctctcagaggaggaaaattgatgaggtaaagcaggcgctagtgatggcgtttgatctggtcgtctcatttattgaaactgatgtaggggtcagattcgtagaccgtgttttggaggatatgcttgacgattttgccaaaaataagggatacgagtataaggcgattaatctttacaacctgccctatgcgttcgcgtacatgacagagtccaaggatatatttggttgctcggtcagtgatgaggttgcagagaagataaatgctctttccgaaggttttgaggccaagcgttacgggcgatttatctatgtccgaaggaaaggtggcagccgctccaagatacggctgctattcttcggtcacgcggagtcgatgaaagatggtggtgcagagtccatcactgtgcggattgtagagatacctccgggagagtcagtcgatacagctaaattcttatatgagaaaaagataattctcgatggtgcgaaattttacaactactatatgaagcgaaagcggcgtgtggaaatggctcactcaagagttgggtag

SEQ ID NO: 345804 - DNA, 327 bp, Pseudomonas aeruginosa
atgagattcgagcaaccctctccaactatcgactaccgacgaaatatgattctgcaggcgctactaaaaatagatacactctacgaactaacccaagccgcctctcctaagctgctagcgaatattagggaagcgctaaccgacccagataaaatttgcgaaatggtgaccacggtcgccttatattatcttcaccgggagcctacggtaccggcgttatacatagaactcgtcgaggatggagttgcacggcacccattcaccctcgacgagatagaggcagtgatgaactcaaaaatcaaggaagtactcctacccaactcttga

SEQ ID NO: 345805 - DNA, 156 bp, Pseudomonas aeruginosa
atggtggtggtgaagatcccactggtcgagggcacgatcgatgagcagctgtggcaactgctcaacgcgaaacgccaggtagcccaggacctcatcgagccagagcaggttgacggcaatcgcgcgcggctggcggcaagcctagccgagggctaa

SEQ ID NO: 345806 - DNA, 132 bp, Pseudomonas aeruginosa
atgcagatcagcctgatccactccatcggcaagcaggccgccgagtgtgcggaaaagatgggccaggccgaggccgagttcatgggccgactgcagcagagtcagacccgccctggttccgtgggcatgtag

SEQ ID NO: 345807 - DNA, 156 bp, Pseudomonas aeruginosa
atggtcgtggtgaagatcccactggtcgaggccacgatcgacgagcaactgtggcaactgctcaacgcgaaacgccaggttgcccaggacctcatcgagcccgagcaggtcgacggaaaccgtgcgcttttggccgcaagccttgccgaacgctga

SEQ ID NO: 345808 - DNA, 234 bp, Pseudomonas aeruginosa
atgcacgtcactggcgcgcagctctgtggccttacgaatgatcttgaccacgcgctcctgcatctgggtggcgcgctggccatcgctatcgaccaggccgtccatggcgacggcgcggtagagctggtgaatggtctgcaggtcggtgaggttgagctggtatcggaagccacggcgatcgagacggtcgatgaacgacagaacgtgaatgtcgttctggtggctctccgatag

SEQ ID NO: 345809 - DNA, 276 bp, Pseudomonas aeruginosa
gtggtgcggaccatctacggcgccggcggcaagatgactgccacattcttgttcccgggcgggtacgaggtggacgccgccagcggcgcggagctgccgggcaactaccgcgtcgagtcgatttccctggaccaggtcgtactcaccgacaaggacggcaaccgcgtgcccgtgggcttctccagcgttgccccgacccaagccgcctcctcggcccaaggcgcctccgttccgccggcgctgcccggggcggtaccgcagccgttcatccagtag

SEQ ID NO: 345810 - DNA, 612 bp, Pseudomonas aeruginosa
ttgcgccaggccgcgatcctgaagcgccagttcgacctcagcgatgcggatatctcggcccacacggtggaaaccgcgtgcattcccactcgaaccaggcgctctcctgccccatggctgcatgaactggccgggatctgcgccagttccttcggctgcgactacctggccgcttacgcgatgccagcgggctggacgttcaagttcatgggtcgtgggatcggccctgagctagccgctcacgcctactctacgctccaccaccaactggtggcggcgcgctcagctcatgtcgcccaacagaagcgctgcaagctgtcgaccaagcgccgtcgcagcaagctcttcgtcgaaggctggcttctcgcagtgcgttcgctggtacgtgactttgccggcaggccggacgagtcgactcaagcagccatcaaggcctacctcgaactacaccatccggagctgaaactcctggagccggcagcgccgacgaagcccctggcctatgaccaggcttcgctgcacgcaggctgggagcacggcaaaaacactcgcctgcaccgcggcgtcagccggcgagttcagggcgcgctcgagcagggaggttcccgatga

SEQ ID NO: 345811 - DNA, 501 bp, Pseudomonas aeruginosa
atgaagaagatccttgccacgctggcattttgcacggcgttcgcgactcaagcctgggccgccgggctgatcgttgtcgaagacctgggcggcgcctcggcgctcccctactaccaaggcctggatccgcagccatccgctgccgcaccaggacctggcgacctgggcgtccgtggctcaggtgcgtttccagttcgctccgcccgtctttcgccaggacaggtccaggggcgcgccatcaacgctccaggcctgcaaccgctgttcctggtcggcgacgacacgctgtctcaaacctggctgaaagagcgaggcgacgagctccgagacctccaagccgtgggcctggcagtgaacgtggccagcgaagcgcgcctgacggagatccgggcctgggggaaaggacttcagatattgccggcgccggcggacgacctggtcgaccggctagggctgcagcattaccccgccctcatcacatccaccgccatccagcagtag

SEQ ID NO: 345812 - DNA, 135 bp, Pseudomonas aeruginosa
atgagccaaacgactttcggcgtgatcatgctggccgccttgcttgtagtgtgcttgtcgatggcggcctgggccgattggcccaacctcaagcgcaagcttacgaagtttaaccatcggcaccgcccgcactga

SEQ ID NO: 345813 - DNA, 351 bp, Pseudomonas aeruginosa
atgctgcgctcgatcaagatcatctcgacctaccctgatctaccggcgcggatcctcgagcttcgctcactgacgcttgacgatgagctggacgcaacgatcaccttgaccaccgcacacaaggccaaggggctggaatgggatttcgtctgcctgtatgacgacttcaacgcggatccactggcccccgacacggacccgggcaagcgtgacgatgagctgaatctgatttacgtcgcggtgacccgcgcgatgaagatcctcgccatcaacagcctggtgctgtcgatcatgcagcggtacgtggacgagagaaagctgaaggaactggtggtcagtaatagggagtaa

SEQ ID NO: 345814 - DNA, 162 bp, Pseudomonas aeruginosa
gtgggcctggcagtgaacgtggccagcgaagcgcgtctgacggaaatccgtgcctgggggaaaggacttcagatactgccggcgccggcggacgacctggtcgaccggctcggactgcggcactaccccgccctcatcacatccaccgccatccagcagtag

SEQ ID NO: 345815 - DNA, 336 bp, Pseudomonas aeruginosa
gtggaatactcctacatcgattgcaaagtggtcggcgcccaagctgaaaagcttgtccgccgttgcaaggaagcagtcgaggccgagaagaaggtgctgatttctttccgtatcggcgacatctgggcggatcccttcacctacgagaaaggcgagaaaaaaggccagtccggcgcaagcctcaaaggccggctgctcttcatctcctggatcaaagtggatggcaccaccgtctacgatgcgaaggaagaagctgagaaagcccagcaaggccaaggcgaaccgcaaggtgaacccgcagcccccgctgagcacgctgaacaagccgctgcttga

SEQ ID NO: 345816 - DNA, 276 bp, Pseudomonas aeruginosa
gtggtgcggaccatctacggcgccggcggcaagatgactgccacgttcttgttcccgggcgggtacgaggttgacgccgccagcggcgcggagctgccgggcaactaccgcgtcgagtcaatctcgctggaccaggtcgtgctcaccgacaaggacggcaaccgcgtgcccgtgggcttctccagcgttgccccctcccaagcctcctctacgacccaaggcgcctcggttccgccggcgctgcccggggctgtaccgcagccgttcattcagtag

SEQ ID NO: 345817 - DNA, 219 bp, Pseudomonas aeruginosa
atgatcgttacggctcagcacttacatacggtcccgacctggaccactcggcagggctactgccatcgccaggcgcgggagttcttcaagcgccatcacctcgactggatggcgttcttacgggacggcatcgaggccgatcagttgattgcgaccggcgacgcgctcgcgctcaagctggttgagcacgcacgccaggaggtggctgatgggcgctaa

SEQ ID NO: 345818 - DNA, 240 bp, Pseudomonas aeruginosa; identical to SEQ ID NO: 328651

SEQ ID NO: 345819 - DNA, 822 bp, Pseudomonas aeruginosa
atgagttttaacagccgcgaaagctcgctcgcggatgggcagccggtgcggctgtaccagttcagccgtggcgcgatccgctggagctacaacagcagcgaccgggacatcacctaccagaaccagattttccgcaccgtgccgggcggcatcaccgacaacgggatcatctgttccggcgacccgcagtccgatcagttcatcatcaccgcgccggccgacctcgatgtcgcgctgctgtacaaggccaaatcgccgagtaatgccatcgatctggtcgtctacgacatgcactacggcgatgtcgaggcagcggtttcctgggtgggggagattggcgacgtggactggccgaccgtggacagcagtcgcataacgtgcgtgtccgaagacgagctgatggaccagccaggcttgatcgataccagttgccgcacctgcacggcgaccttgggcgaccaccgctgcaaggtaaacctcattccgtatcgagtgacgctgacaccgcagagcgtgtccgcgtgggtgatttccagcggagtggtcgccggctatgccgacggctggtttaccggtggctatgtggagtggcaggtggacggcgacaactacgaccgccgctacatcgagcggcacgccggggccgatctgcacatcctgggcggcaccgagggcgtcccggcgggggggcaactgcgggtctatccaggctgcgatctgctcgatgaaacctgcgccggaaagttcgacaacatcctgaatttccggggctttaacaagatgcaaggcaagtcgccattcgatggcgaccaggtctggtga

SEQ ID NO: 345820 - DNA, 1077 bp, Pseudomonas aeruginosa
atgcgcctggcgccgcgccgggagttcgaagcgaacatgtacgcggtagaccgcgagcggcagctcctggacatgacgctgtttggctggggcgcgcgaatttgggcgctgccgatttggcctgatatccaactgctccaagaaccgctggcggccggctcgctgaacattccgtgcgacacggtcggcctcgacttccgcgacggcggtctggcgatgctgcgcggcgaggacgccttcacctatgaagtcgtcgaggtcaaggcagtgaccgccgccggcctggacctggtccgccccgtccaggccacctgggtaactggctcgcgactgtacccggtgcgcaccgcgcagctgaccgaacagcccacgctgacccggctgaccgataccgcgcagtctgcgcgggtgtcgttcctgataatggagcccagcgcctggcccgaggtaatgccggcgacgacctacagggggcggccagtgctggagcagcgcccggacgaaagcgaagacctcacctccagctatcagcgcctgctgtccaccctggacaacggcagcgcgattccccgcgtgaccgacgtcgccgggatggcgctgcccgtcatcggtcatcgctggatcggcatgggccgagccgagcggtcggcgttccgcagcctggtctatgcgctgcgaggccagcagaagccgctatgggtgccgacccacgccgacgacctgaccctagtcgccaccgtctcgcagctgtccactgcgctggacgtgcgcaatatcggctatgcccgtttcgccaatgggcgaccgggtcgtcgcgatatccgcatcgagctgtacgacggcaccgtctatcaccgccgcattctcaccagcaccgagctggacgccgacaccgagcgcttggccatcgacgccgccctgggccgcctggtcgagccgaccgatgtagcgcgcatctgtttcatggcgctctgtagcgccgccagcgacgtggtcgagattgagcacgtcaccgatagcgagggcgtcgcaaccgccgcgctgacattcaaaggggttcgtgacgatgagttttaa

SEQ ID NO: 345821 - DNA, 924 bp, Pseudomonas aeruginosa; identical to SEQ ID NO: 330488

SEQ ID NO: 345822 - DNA, 369 bp, Pseudomonas aeruginosa
gtgatctccgctcgcgctttatcggtcgcgctggcctgcctggtgctggtcggcctcggcgccgccggcggtgtctggctcggcgcgcggcactaccggccgcagcttgatgctgcgctggcggatctggtcgcctgccgcgccgccaggggaggcctggaggacgcagtggcggagcaggtccggcaggttgccgcgctgcgtcaggctggcgagcagcgcgcccgggatgccgcgcaggctgtggatcggggacggcagcaggccgcggagcagtatgccgaagcccagcgcctggtacgtgagcgaaccgccggtgagcagtgtgcggccaccgaggcggtcatcgatcaggagttgggcctatga

SEQ ID NO: 345823 - DNA, 216 bp, Pseudomonas aeruginosa
atgaagaccttcgaactgatccgcatggaaggccttcgcacctacggtcgccaggtggaggccaatacctggcgcgaagccgagcagcaatgccgcgacggcgagatcgtaaacggcgaactgatcggtgtgtacgactgcgatcctgttaccgaggcggtctgcactgcgcgcaatgacgtgatgattgagagcttggaggtgtgcagtggctga

SEQ ID NO: 345824 - DNA, 318 bp, Pseudomonas aeruginosa; identical to SEQ ID NO: 337152

SEQ ID NO: 345825 - DNA, 1089 bp, Pseudomonas aeruginosa
atgcgcgacgaccgcgaactgaccccggaacaactggcggccttcggcgccgaactcgatgccctgcgcctgcgtaccgtggccgatctcggcgcggacgacgcgcgctacatccgccgggtccgcgcggcggtgcgcgtctgctgctggagcggcagggcgctgctgatgttcggctggctgccgccgacctggctgctcggcagcctgcttctcggcctgggcaagatcctcgagaacatggagctgggccacaacgtcatgcacggccagtacgactggatgaacgatccggaattcgccggccgcgcctacgagtgggacatcgccgggccgtccgacttctggcggcacacccacaaccatatccaccacacctacaccaacgtgctgggcaaggacgacgacgtcggctatggggtcgtgcgcctgttcccggagcagcgctggaagccgttctaccgctggcaaccgctgtgggtgacgctgcaggcgctgctgttccagtacgcggtggcgatccagcatctgcgcctggacaagtacgccaaggggcgcctggacaaggccgaactcatgccgctgctacgccgcctgcgtgccaagctgggtcgccagtggaccaaggactacctgctgttcccgcttctcggcctgttcgccggcggcttcggcgcggtgttcgtcggtaacctgctggccaacgtgctgcgcaacctgtggaccttcacggtgatcttctgcggccacttcaccgagaaggcggtggtcttcccgccctcggtgctggagggagagacccgtggccactggtacctgcgccagttgcgcggctccagcaacctggagggcgggccgctgttccacatcctgaccggcaacctcagccaccagatcgagcaccacctctacccggacctgccggcgcgtcgctacgccgcgttgtcccgcgaggtccgcgaaatcgcccggcgctacgggcagacctacaacagcggacgcctgggacggcaattcctcactgtcttgcggcgcatctgggtatatcggctgccgccgcgcgagaccctcccggcggggcgcggctga

SEQ ID NO: 345826 - DNA, 207 bp, Pseudomonas aeruginosa
gtgcagcccaagcgcgtcaccggcgaacaccgggtcgacgaggcgccgctgcaacacgtggcgatgccggacacggtcagcccgatggccgccaccctcgacccgcgcgtcgaggaagtgccggaggagctggtggtggaggcgccggcgaatatcggccgctccgacggcgagccggacgccggcgagaaacccgctcagtcctga

SEQ ID NO: 345827 - DNA, 396 bp, Pseudomonas aeruginosa
gtgaggatctaccggcagttcgtccgcctgggcagccgccccgtcgtcttcgcatatatccgggcaaactggttcgagcgaagagcgatcaggcgcatcgcagcgcggcacaacctggctcccgcctatgactggccagggccaaggcggtacaaggccagtttcgtactggcgccgaagggtcggctctgcccagaccgcgggccctgcccacatccggagaccaacctctggtatcgacgtatcgtcctcgaccgcaggttcacatggctcgataccgggatcctcgccgccagcggccccggcttcgcccattggccgctggcctctgccatggtcgttctgctgctcgtcggtttgtctgcgtacctccagtggaagggggagcgcacatga

SEQ ID NO: 345828 - DNA, 1047 bp, Pseudomonas aeruginosa
atgaaaagcgagaaaactagcttggcccaacgcctggccgacgaagccgcacgcaaggcggccgaagcggctaagaacgtcgaccataccgccgccgttgcggccgcttgggacgcttccggctataccggttcgcaaccgtggttagtcggcaacggcggtatctacggcgacaaggcgtcgcttacattcaaagacgcgggcccggatgaactggcggccctgatgaaacacttcccggctatcccccgggtacagtattcgcatagcggcatccgctattttcatccggtcggcgctcgcgccatccctgaaggcgccgccgtgtcggaattcgacgggttcgaagtcgagattagcggcggccggggatatgaaaacctgcgcgctagctggtccgctatggtcggcgacgtgcaaaccgctttccgcgtagagctgcgccgcgtttcgtttcttcacccgcgcaccagccgaaaggctgttatggcattcgggcatactttcatccgatacgaagggcgcgccgaactgaactggccgcgggagttcccgggcgccagcgtgatgatggaagccggcataaccgcgttcggctacgccttgtccgatcaatgctcaggcgatttccgcctgcgcgggcggaacgttctggcgctggcgctggcatgggaaaccgaggcgaaccgccggggcgaacaaacccgcgccgcgttcctggccgcattcgcgccggtacaggcaatgggcctgccgggagccgacgacgtggccgcgcaggccgccaaaatccgcgaccagtacgaacgggaaaacctgcgttccggcacgctggagcaaaccgccgcgctccagaccccgcacgccctagccgataaggcggttgccgaaaaacactggccggaatacgcggcggccaacggcctggagacccggcaaggctatttcgatcgttacgcatgggcctgtgcgttcctgagccgttgcggcttgtacgaagtgccgcgcggcgaaggtacttacaaatacggtcacgcttggctctag

SEQ ID NO: 345829 - DNA, 213 bp, Pseudomonas aeruginosa
atgaaaaacgctcaaatccaccgcttcggcgaccgcgtggcggtatccctgccaggcaaaggcgaaaccgtatacctgtccgaaaaggaggcccggaagctggcccgcgtgttggtcgactgcgcccgcaatatcaaggcccagccgaagttcagcgagtcggattttgtgaccgctagcgtagacatcgccgaccctttccgcgggcgctag

SEQ ID NO: 345830 - DNA, 645 bp, Pseudomonas aeruginosa
atggacaaagcattccttgcaattcagtgcaaagcgccaaacggcgcgaccggcactttcctttaccgcgataagaacgaagacggctatgttctggcttcgcctgtaatggccgattgcgtagcgctcttcgcatgggccaaggccaacgggtggcggtcttgcgaagggccgtcccccgttgggaactatgagcgcgcgggtgcggttcacgacgaaatcaagcgacatatggcgctggcttacttcgggtccgcctacgccgagcaagccgaagagtgcggccagcccctggccggcgagatcatagaccagttaccggaagtgatcgacccggcggcccttcacgcggccgataccctggccgccagtatgttgcacgctaacgacgtgaagtcgccgcccttcgacctggaatcgctgttcctgcgcgccgtcgaaatcgccgcaaacagtgatgacaaaggcgaccgggaacactcgccggaaatgttcgggcactactgcgccatgcaagctatgggacacggagtcgggctttccgatgccttcgggcggcaggtctatgacgccatccgcgtcccctataccgagttcgggagctattccctggagcgcgattgtttcgcacaggagggggcttga

SEQ ID NO: 345831 - DNA, 381 bp, Pseudomonas aeruginosa
atgaacactcaagggttttcagtccacgcgaaagagccggacggctggcttatggcttgggaagtgcgcaaagacggcgtgccggtcgcacacttccgctatcgcgattgcgcggacagctacattgaagacgctatttctatgcaagccccggccagtggctaccgcttcattccgggcttaggcatggtcggcgccgtggtcgacgtgaaggaaatacaggtccgcccgttctacggtcgcgccatgttggcatggttgttcgaagaataccgccattggaccggccagcctggctataccgcgtccatgcgcgccgagctgcgcaacggccggcaaatggttcgcatggtcgccttcgaacgtcggcagggggaatga

SEQ ID NO: 345832 - DNA, 642 bp, Pseudomonas aeruginosa
gtgctacttaaatggatgttcgttggggccttcaccctggccgccttgtcgggttgcgcctcgaacgtaaaacccttccctggctcacctaccgtagccatcaaaggcgccactccagaacaagcggaaggcttttacagcaattggtgcttgagcaatggcggtcgcctagtctccagctcaaataaccaagtggtatgcgctaaagtcatccccatggacacatacggaatgctctatagggggctaatgactgagcgctatgcgtccgaccccgaaactaactttcaattctcttgggcccgcttcgggggagacttgcgcgtttatctttcggcatggatagaacatcaaaacgcctacggcaaaaccactcgcaattacctaaaccaagactccagcaagcacgagttacaagctgtagcggacaagtctaaggtggaattcgaaagccagatcgccgtttcccccagcgccagctcaacggcctctccgcctcccactgctgcgcccgctccgtcatcgcctcaacctgcggcctacggcaagtcgaaagaacagcgcctggaggaactccgtagccagacgctgccctatgaggaatatcagcgtaggtatcagcaaatcatgagcgagccgtag

SEQ ID NO: 345833 - DNA, 450 bp, Pseudomonas aeruginosa
atgcatcaccctactgcaaccgcccatgatctgcgccttaccgtcatcgacggcgtcccctatattgctctgtccgatctgccgccccacactctcgaccaagtgccggactcgacccgtggtcgcggacgcccccggaaagccccacacacgcccccgcctgccgttatctcccgcgaacagtacctagagctagcggccatggttgaaagcgttatgaagcgttgccggcggccggactcggcgaactggtgggcgtggaagtgcgtccgcgacctggcgggcgacatcccatcggccgagtttctgccgccccacctgttccccgccgcctgcgccttgctagaggatatggcagaggaggcgcagcacctggccgagcgctacatcaggtcggaaacgcggatgctccagacgttcgccaaacgctacaacaaagggagaaggtag

SEQ ID NO: 345834 - DNA, 201 bp, Pseudomonas aeruginosa
atgggcgcttatatcgcactggtcgagttaggggacggcggcaagctggtgccgttgatcgatggggacggccatatgctggcgttccccacctgtgaagacgccgagcgcgccgccctggagcgtgtggcaaacatcccgaactaccccgtgcgggtggtggtggacctgaatagctggggcgttagccactcgctataa

SEQ ID NO: 345835 - DNA, 1287 bp, Pseudomonas aeruginosa
atgggcggtttgcagcaacggtgtctgtgggaagtggttacgcctcgcctgtgcggagcggcgagcctgaacggcgagcagcgcgccgacgtatgtgtgatcggcgccggtttcaccgggctttcggcggcgctccacctgctggaggcgggccgttcggtgtgcgtgctggaagcgtacgaggtcggccacggcgggtcgggacgtaatgtcggattgatcaacgccggcacctggattcccccggacgaggtggtcgccaccctcggcgccgagcagggagaaaagctcaacaccgtgctggggcgggcgccggcgctggtgatggagaccatcgaacgcctcggcatcgattgccagttgcgccgcgagggcaccctgcacatgtcgcacaacgccagcggcgtggccgatctgcaacgccgtcacgcgcagtggacgcgccgcggcgctccgctggagttgctgaccggcgcggcttgccacgaggcctgcggcacccggcgaatcagcgcggcgttgctcgaccgacgcgccggcactctcaatcccatggcctattcgcgcggactggccaccgccgtcgtacagcggggcgggcaactgtaccagcgctcgccggtgctcgccctggagcggcagggcgcgctgtgggcggtgcgcagcgccgcgggggcggtactggcggaacaggtggtgatcgcctccaacgcctataccgagggcgagtggaccaacctgaggcggcacttctttcccggctactactaccaggtggcttcggcgccgctgcacggcgccgcggccgagcgcatcctgcctcacggccagggttcctgggacaccaggacggtgctcagcagcatccgtcgcgatgcccagggccgcctgttgctgggaagcctcggcaatggcgcgaacaagcccgcctggttcctgcggcaatgggccgatcgaatccagagccattactttcccgacctgggccaggtcaactgggagtacagctggacgggttgcatcgccttcacccccgatcatctgatgcgcctgttcgagcctgcgcaaggcttgctggcggtgaccggctacaacggacgcggcgtgaccaccggtacggtagtgggcaaggcgttcgccgactacctgctgagcggcgagcgagcgacattgccgttgccgttcagtgacatgaagcccgtccccgcggccaggctgcgcagttgcgcctacgagatgggtttttctctctatcacgccggtcaatgcttgcgcgtggttctctag

SEQ ID NO: 345836 - DNA, 288 bp, Pseudomonas aeruginosa
gtgagcgagatctggcgacagtgcaagggtgagcggcatgtccgaccgctccaggggcggctggtgcggttggtggagagccaggagcaggtggcgaccctgcaattggtcgacaccctggaagaacaggcgttgctcgaggaactgctcgagtcgagcaagccgccggtgccggcggatgccgagccattgcattacctgttgaagaccccgttccgttatccgcccttgcgttggggtcgcggtttggccgtcgtcacgagccaagcctgttctacgccgcgttga

SEQ ID NO: 345837 - DNA, 603 bp, Pseudomonas aeruginosa
atgggaagacggccgaccaaaccggggagcattccccggctccgcgaaagacgccgcggagacaagatctattactactacgacctcggcggcaagccacgcaaagaactgtccctcggaacggactacggcctggcgatcactgaatacgcccgcctggagagggcgcgcacagccgatgcaaagctagcggagacgctcacgtttcgctatgtggctcaacgctacttcatcgacgtcgtgccaacgaaaagccctacaacgcagaaggacaacgcccgcgagctcaagcaactgctggcgttcttcgatgatccacctgcagccatcggggatatcgaaccgaagcacatcaagcagtacctgatcttccggcggtcggcgccggttcgcgcaaatcgggaaatctcccttttctcggccatctggaactacgcgcgcgagatgggctacaccaaactggccaacccatgctcaggggtgaaacggaacagagagcgcgggcgtgatgtgtatatcgaggatgacctttatgcagcggtctatgaagcggcagatcagggactgaaggatgccatggacctttcttatctgacggcctaa

SEQ ID NO: 345838 - DNA, 1005 bp, Pseudomonas aeruginosa
atgggtgatgaagatttaaaagagttggagaggactatatctgatttgctttctccgtatgaaagtgaggggaaggtaggtgcctcacttgatgaatcacctattactatatatgctaatcaaattccttattatataaatgatacttggctggctaactggagtttggctgctcgtacagggatagctcagtcgctaattgactctataaatacgactattgggcggcccatggtcgtgtctgatcactatttcagagggcatgaaattagcgtaagaacggttcctgagactggtggtagtaatttgataaccatgtctgatttttcggcaaagctcaattctcaaataaatacatttatacaagataggattgatgaagacaaagaagcaaaggttgctctaatccagcagtcaatggagtcattggctgctgaacaaattaattccgactttacggcgaggcatgagcttccggctggttctcgtccaaacaccgtaacgattccccaggcaggtgactctgcaatcacggtcggatatggatttgacttaggacagcacgatgagcaggaactgatttccatggggataccggtttctaccagggacaagatccggcctggtctgggcttgagtagaactgatcctaatatatattctgctcttgctttaattatccctccatttaccgatgatgatgggatggtgttgttctctacgaaactagatagggtggctggcgctgttcgtagcaaattctctgacgtttggagtgggttgcctccagccgtccggacggtggcggtagatatttactatcaatatggtcaaggaaaagtatttcctaattttgaggcagcaataaggcagcatgattgggcttctgtagtttacgagttgagaaattgggatggtcatccaaatgtgcccggcgactacagaacaaatcgcttgaatgacagggcggactatcttcaacaatctttaggtcttccgaactag

SEQ ID NO: 345839 - DNA, 471 bp, Pseudomonas aeruginosa
atgatcgcctacctggagatctcgccccgtctcaccgggaagacaacccgcctgtgcgccctggcccgcgacgtgctcgcccaaggccggcaggtgatcttcgtctgcccgcccggctgctgcgccgatattcgccgcgccctccccggcgccgtcgtcctgggcgatggcgagccgctgccggcgtttacggatccggatagcgcggcctggttctacgacgaattcgactggctgcagaacgtccaggtgcgccccggcggctactacgcgaccaccgcgcagcgcctgcgcgaccctgaactggacacgcccgcggatgatctgctgctgcagctgctggaggccaacggcaaccgccacgaacgccacttttggcctttcgggctgaatggcctggccgagttcggcgccgccaccgaggaccacgacagctaccgcctcatgtacctgggcgagttcctgaaatga

SEQ ID NO: 345840 - DNA, 1002 bp, Pseudomonas aeruginosa
gtggctgaccaggttcaggtagcgcggcgagcggcgctcgatgccggggtcgagctgatcgatgcggcgctgccaggggaagcttgcgccgctgctccggtaatcggcgtcctcgacctccagtgcggcgcggatcagctccagggtatgcgggttcttcggcccgcggtccttcagcgccacgctggcgtggttctcgccgtcgacgatggcgaaggcgatctcgccgcgcgattcttccaggcgccagccgggcctggcgcgctggcggacatccagttcgaggctcaggcggcaggcgttgaggttcgccgtggcgatccgcaccgtgccgtcgccgccggcttcgttggcgatggcttcgacgccgctgtagccgacattgcccaccagtaccgtggcgagcaggcggccggcgccgtaccaggcctcggcgccgaacaggtcgcgctcggcgagttgccaggagtacggcgagcccagctccagtcccttcagcacctgggtgccggtctgcccgacgaagcggttccagcctttcagtacgcgaccgatgaaggagcgtcccttgtgcgccagcggcgagccgaagttggccggggcgagcatcaggaagcgcttgaccggcgcgctggcggggtcgaagtggcgggtcagccagtcgcgcagcaccagggcgccggtgctgtgcaccaccacgtccaccgtgcgcggtgcccgcgacagtccctgggcggtccaggcgcgatccagggcggcggcgaggtcggcgtaggtgacgtcgtcctgcagggagatccagtcggcgaggcggatctgcgtcggcgcgctgccgaaccaggcttccagctgctcggcgaggcggcggaacgacttcgaatcgtcgctccagccgtggacgatgacgatcgaacggggcatgtccggcatcctctggggctgatccgggcgactatagatcatgcgccgcggcgatgtgccctgacctgtgaaaacgtctag

SEQ ID NO: 345841 - DNA, 183 bp, Pseudomonas aeruginosa
ttgctgcggcaggcgcgggacgactgtcgcggcgaccgcctgttcacttcccgcaaccgcttcaacctgccgatgcggcgcctgctggagcgcgagggattccagccgagcggggtgatcgacaacctcgacgaaggcgatccggagctggtcttcgtgcgtttcctcgcgccgtcgcgctga

SEQ ID NO: 345842 - DNA, 708 bp, Pseudomonas aeruginosa
atggtgttcggggagtgcttcctgtacctcaacgagaacttcgccgggcaggtcctggagctggagcacctgccggcaatcaacatgcgctgcaggatcgacggcgggtatgtgatgttgctgccgaacggagaacagctggagttcgaccaggatgaggttctgcatctgaaggagtacgacgtagaacagaacatctatgggatacccgactacctgggcgggctccagtcgctgctgttgaacgaggcggccacgctgtttcgccggcgctactacagcaacggagcgcatgccggctatatcttctataccaacgatccggacttgagcgatgaagacgaagaggaattgaaggcacagatcgcggcaagtaagggtgtcggaaacttccgttctatgttcgtcaacattcccggcggttctgaaaaggcgatccagataatcccggtcggcgatttccaggcgaaggacgaactggagaaggtcaagaacataactcgtaatgatgttatcgccgcttggcgaatgaacccggcgctggcgggaattattccggagaatagcgctggattcggtgacattgagaagatcgaccgggtgtacatgaataacgagattcgtccgatccaacagctgttccttcaggtgaatgaagtgctcagaggagaccggcacattgcgtttaaagaagcctcagcaggctag

SEQ ID NO: 345843 - DNA, 924 bp, Pseudomonas aeruginosa
atgccccgttcccttgtttcaccgtggaagcgcgtggccgtcagcggcgataccgtagacgggcgcgtcatcaccgagcaggaactgcgcgactgcgcggaaacctacgaccgcagtttctacacggcgacgatctgggccgagcatgaccgctggagaggcgcacacggcacggtctacgaagtgcgtctggtcgaagcaaaggacgacccggaacttgagcccggccaggtcagccttgaagcccgcctgcgcccgaacgatgacctgcttgcgctgaacgatcagggcaaggggctgttctccagcatcgagatctggccgaacttccgcaactccggccgctgctacctcagtgggatggcggtcacagacgagccggcgagcacccgcacccaagagctgtatttctcgcgccgcacagcccgacgcggccaggctcgcttcttcaccagctccctccccctcagcaatctgcgcgaagacggcacaactgcacccgaagtgcgcggcctgatcgcctcgctgatccgcgtctttaagcggttcggcaccgacatccccaccccaaccgacgagagaaaaccgatggatgaagccaccgccacggcgctgaacgcgctgctggaacaactgctgctggtcgccgccggcatgaaagcggtcctggagccggtcgaggacgacgccgacgaaacccagaccgaggaccaggtaagcgccgtcgaagaggcagtccaggacatcgtggaccaggccgaggaggaccgcgaattccgccgccgccgctcgcagtcgaaagatctgagcagccgcgtcaaggccctggacgacaagctgaccaagctgctcaacacccgccaaggccggcagatcccgcgcaccgccagcgcccccgccccgcgtaagaaggtgctccgctaa

SEQ ID NO: 345844 - DNA, 1026 bp, Pseudomonas aeruginosa
atggccgccgcactcagtcaacgcgcagaagcgcagtacctgcaactgcaggaggaactggccgaagcctatggcgtcgagaacatcgcccgcacttttgcggtagagccgacccacgcccaggaactgaacgaccagatcaccgaaaaagccgacttcctggggcgtatcaacgtcctcccggtcagtgaaatcaagggcgagaaggtgatgttgggcctctccggcccggcctccggccgcaccgacaccacgcagaacgaccgcgagccccgcgacctcctggacctgaaaaacaacacctacgagctgttccacacggaaaccgacgtagctctgccgttcgccaccatcgacagctgggcgaaattccccgacttcctggaacgctaccttgccgccgtccagcgccggatcgccctggatcggatcctgaccggtttccacggcctggaggctgcgaagcagagcgaccggaagaagttcccgctgctccaggacgtgaacaagggctggctgcagctcgcccgcgagcagatcccggcccaagtgctgaagtctgccgacccggccaagaagatcgtcatcggcgccggcggcgattatgaaaacctcgactccgcagtccatgacgtcaagcagatggtggacccggtattccgcgacgaaggggacctgatcgctatcgtgggctccgacctggtggccaaggacaaaggcaagctctacgccaagcagggacacaccccgagcgagaaagccaagatcgaagaggcgcaggtgatcgacacctacggcggcctgccctcgttcatcgtgcccttcttcccggagaaggggattctggtcaccagttgggacaacctgtcgatctactaccaggacagcagttggcggcgtcacctgctggagaacccccggcgctcccgcgtcgaggactacaacgggcggaacgaaggctacgtgatcgagcaactggcgaagctggccatgctggagtccgactcggtggagcttgcgccatga

SEQ ID NO: 345845 - DNA, 258 bp, Pseudomonas aeruginosa
atgaagattcttatcgctgtattcgccgccctggccctgtccgcctgtgcctcgcctcccgcttcgaacgccccggcgctggccgccagcaccagcaaggctccctacgattacgcgatgtgcgtcttgcccaagtggcaacgccaggcgcccggcgtggcgctgatggagggaaggccgcggctatcgcctggcggacgccggtcagtggctggaggtgcagccggcgaggggtggcagcctggtgcgaatccatga

SEQ ID NO: 345846 - DNA, 345 bp, Pseudomonas aeruginosa
atgctcgctcttatcggcctgtgccagggctactaccccgaaacccgcacaatcaatggtcagaacggccagacccaaatcaccgagcactacgtgctcgtccaggtcgaacattcaactaagttcggcatttcggaaaacaaagttatccaggtccgtatttcgaagcggcatatggatggcggactcaataatgtctggaagatggagaagggcaaaactgtgtccgtcccggtatttatccaggcctgggcgagtaagtccggtaacgccggattcgattattggctgtcgggcgatggcatgccgttgaaacttcaagccgttcaggagaaagccgcttaa

SEQ ID NO: 345847 - DNA, 345 bp, Pseudomonas aeruginosa; identical to SEQ ID NO: 345846

SEQ ID NO: 345848 - DNA, 738 bp, Pseudomonas aeruginosa
atgcgccgttccaaaagaaccaacacgctggttatcgtctctaaccatgtagagtcagtatatgacgatcgttggataaacgacgtgctgcattacactggaatgggtcaggttggccctcaaacacttgagttcaaccagaacaggacgctgagcgagtcacctaccaacggcgtagcggtccacctgttcgaggttttcatcaagcgcgtttacacctatatcggtgaggttgttctggccggagatccctatcaagaacagcaactagatgcagaaggaaacgatcgttcggtatgggtattcccactgcggttgaaggcgggttgtttgccagaaataccagatacagcgttgaaagcgcttgaaaaaattaaagagaaacaagctcgccacttaaacgacggagaagtcgagaaactggcaaagcagcaggggcagacaaaggtaggcacgcgcaacgtcagcgccactcaataccaacgctctccatgggtggccgagaacgcgcggcgtcgagctaaaggttgctgtgagttatgcggtgagccagcgccgtttaagaaaaaagacggtaccccctatctggaaacacaccatatcgagtggcttgcaaatggcggggcggacacggtagagaacaccgttgcactttgccccaattgccatcggaagatgcatatagttaacgatgctgaagatcagaaaaaattaaaaaacacagcaatttcaaattag

SEQ ID NO: 345849 - DNA, 996 bp, Pseudomonas aeruginosa
ttgcagcagctcgctccaccaaagccattccgcccctattccgatttggtcaggctgctgatcgctcgcggcatggaagtccccgaccctcagcgtgctgaacgcaaattagctcagattggctattaccgcctcagcggctactggttccccgcgcgcgatttcgtgagggatgatcagcagcaggttgttctctgcaacgtaacaaacaagccactgcgtcaaagccaattccaagctggcacatcctttgacgacgccgtagctctctaccttttcgataaacgactgcgtcagctaatgctcgatgccattgaaagaatcgagatccatctcagaacggtgattgcccatgaggttggatatcacaatccgatggcatacaccgacgtacagttcattcagcctaaacaggccaagccgtggacagacgcaagcgggaagcaacgcaacacctgggcggaatggcttctacgccagcagggcctagtgaatcgaagccaagaggactgcatcgaatggcaccgcaaagcccataaggccataccattttgggtagcagttgaagcttgggattttggcacgctctcaaaatacttcgagatacttaaaggtaatcaccagaaccgtatcgccggccgcctcgggatacaggacaccaaagccctcacccgctggctacgtgaaataaacaccctacgcaaccgctgcgcccaccatactcggatttggaaccaggtgtcggcaaacccgctcccagtgatcgcaggcccatacttccaaaccctcgcactggatcacaaggctctgactcgactctacgggttgacatcgatcatctggcacctagtccagtgtattggccccagttcgacgtggattcagcagttggcggacatcattgatagcaaaccgtccctccctgggtgcccttacgccgcactaggcctaccagatgaaactggctttccgagaaaactgttcggcattgcataa

SEQ ID NO: 345850 - DNA, 1482 bp, Pseudomonas aeruginosa
atgccctctctacgcccctcgcagataactctccaatctcggtctgacggagggccattcgtagaatttctactctttgatggcgagggcattccgaccgatgatgttctgcacgcggacagttgtgaggtctatttcagcgacatcactgcagactttgaaaaacctgaagcagtagaaacctggcatcggatcctgtctgttactcccggggagatatgcatctacccaattcatcagcgagggggaagtgcgaactatggagctcctaagcacgcccccataggccaaattgtactcgccaggcccaaggcccacccttacagccttccaacaaatcgcgacgagcttgaagggcttctcagcacacttccagttggcttcgcgaaggactggcaaatcggcttgggcctactgtgggaataccgtttcatcattgactcgatagccgatataggtggcatagacactatcgtgatccacggtgaagatggatcggatgacgcaaagatttgcggtagctcgtactatcttggcattgatcgatattttgagttgaagcgcagccttgatcgcttaagccaaaggcatcaacgcgagactcggtcagacaagcagttggtttgctacaccgggttggcccatgcagcggaccctattcaaaaccctgagcggcccaagaagcttccagctaacgtactgacggaccttatcaagctcggcagagggcgctcacagctgtctatagcagaccaaaagtcagcggttcacctggtgaaagacaacgcaggggtcattgccaagaagacacctatgatgctgctcgatctcaaggcggacattgagcgggtcaccctcggcgagttaattgagcgctataagaagctcatgtccaccgacgcaaaggaaggtaaatggcaacagtttttggccgacaatccgttcatcctagacatggccttttcctttccagtgaagctggtctgcgaacggccgtacgtgggcagcaagcgtttcactgggcgaggcgggaactattcggacttcctagtggcagcaaaatcgacaggcaacgtggcgctcatcgagatcaagcacccgcaaaaagatctgctgaaaactccagcctacaggaatgatacgtatggcccctcagtcgagctgagtggttctatcgcacaaataatccatcagcgggcaagcctgcagcgggaaattctccagctcaaagaagatctagaggagccagtacacgcgcacgcagttccagccatcgtcgtaattggccgcacaccatctgataaacaccaacggcgctcattcgaacaataccgaaatactctcaaggatgtgacagtggtgacttttgatgaactgcagcaacgcttggaggacattcacaaggcactgtcaccttcaacgccagcaagctccaatctgaaactggaggctagcgccgaggaggacgacgttccgttctag

SEQ ID NO: 345851 - DNA, 1206 bp, Pseudomonas aeruginosa
ttggatttcgctgatgcccgcgacattgcgcttgcccggttgcgagatccgatctcttcatccgtcttagcgcgcgcgttcgcagcccgctttgaagagctaatcgtcgatgaggcccaagactgcaatccgtcggacttggaaatcatcgactggtttcgctccatccacctcccagtgaaggtgatctgtgatccccaccagtcgatctatggctttcgcggtggcgtgaccgagcagctctttgccttcggtcaaagcttcgcgccgcatgaacaattgcctatgaccggtaattttcggtcgagccgtcatatcaccaaggcgatcatggcgctgcgtgcgccagatatgtgtgcgatcaccgacgatgcgcttggggtccatagtgacgagccgtcccctgtctatatcttggcctatccgggcaacagtgtgccctccagtgtcggaggcaagttccgcgagctgactgaagcgctcggccttgatgcctgcgattgcccggtcgtagctgcgacacggctcggcggcgcgaacgcgctaggtcatcccgccaacagcggtatcaaagatctgagctatcggctggccgttgcggtcagcgactatcatttttcgttcgatctcggtggccggaaggaggcgctcgaagcgatccacaaagtgatgctggagctagaggggcatactgccgataagacctatcatcagcacatttcagacgcagatatcgaaccgaactcgtggcgaccgcgggtgctcaaactggtcgacgctctccgctacgacccgattcgcttcgtgacggccgacgcatggctcaaccatgcccgcagcctactcgcgccgctgctgccaaacgaaggcccgacgatcaaccagcgactccgccgcaatgccgacctggagaaggcactatccttcgccccaccgagcgggcattgcgcccgaacgattcatagcgtgaagggattggagttcccggcggtgtgtgtagtgatgtcctcgcgcacggcgaaggggattctcgactatctaaatactggcagcccagccaccagtagcgaagaggcgcgcaagatctatgtcggggcttcgcgtgcccaacggttgttggcaatcgccgccccgaaatcgcaggctatgcgtttaaggagccgcttagaagcgacgggtgcgtctgtttcgttgatcactttgtag

SEQ ID NO: 345852 - DNA, 1809 bp, Pseudomonas aeruginosa
atgtacctgaagacattgacagtcagcaactttcgctccattgagcagcttgaaatcccgctttgtaacgatctcaccatccttgttggagagaataacggcggcaagagtaacgcgattgatgctattcggcttttgacaatgccgttgagtggtcggcgtgagctctattgcgagacgaccgatatccgcttcggcagtgccaggcgtcagtttgagcttattgggcgtttcgaagaacttagccccccacagcagggacgcctaatctcggcggcgaccgatcacgcgatttcgggcagcatcttcggcttgcgctatgacgagagcagcggacgctttccggtaaggccagttttgtgggctggccaccaacaaggtgctccggagcctggctgtcatgacatgattcggcatgtctatttaccaccgctccgcgatgctaaaagagcactcgcctcaggcaatccaacacgcatttatgccctcctgaaccacttccttgatggtggtgatcctgaggctctggcacggtcgctgcggcgtgatgcctcggcggaaatccttgggaaggttggaagcgctgttgaggttggccttagcgcccttacctctggcgttcgtcagcagacaactgcgctgggcttcgccaatgatgagaagctaattgatattgctcgtgacctgcgcttcaagctcgctgatcatggcgtcgagcctgaggatttgcgctactcgggtcatggctatgccaatttgctctacatggcgacgattgcagttgagctggaaaaggttagcgacgccgacctgaccctgtttctagtcgaggagccggaggcacatcttcatccccaactccaggccgccgtgctctgctttctggaagagcaggcggagaagtctcggcagccaagaccaggctatgaaggtcccgccggccagttgcaggttatcgtcgctactcattcgcccaacctctcggcatgggtagagagcaagaaattggtgttcttccgatccttcatacccgacgcggtcacccctatcgaagtgcctgtagcagccgatgcggaagcggcgaaacccgcgcctcggcctcgccgtgagacacgttgcatcccgctggcgtcgctcgcactagatccggttgagcgccgaaagatcgaccgctatctcgacgtcaccaagtccgctttcttgttcggtgggcgtgtgcttctggccgaaggtatcgccgaggctctgctcctacctgtgattgccaagaagctcgtgcttaaagatagccccgagaagctgaggctcttccgctctgctgtctttgtgccaatcgatggtgtcgactttgagccctatgccaagctcctcttgaccccgttcaacgaggtgcgcatttgcgatcgtctggttgtgctcaccgacggtgatgggggcggtctgcctgaggcccaagaattaccaggcgcgctccgtaaggcgagcttggaggccattgcgaccaaactcggtgctgagggactcgtcaaggtggtgatcaacgactattcgcttgagaccgaactcgtccgcgcaggcaatggggccttgatgaaggctgtctatcttcagcttcacccgcgctctgaagcaaaatgggacacggccgtcgccgagaccggtgacgatcaggcactagcgatccagaagctgtttgagactacccgtaaaggcgatttcgcccagctactcgccgaggcgatcaacaacggccaggggttcgttgtgcctgcctatctcacgcgcgcgatcaacgcgttagtcgaatga

SEQ ID NO: 345853 - DNA, 591 bp, Pseudomonas aeruginosa
atgcaacgcatttacttgatcccgcaagaagccatctctcgccttaagcaacgtgctcgtcgcataaagcgagaaagggatatcccgcatcacgaagcccttgagatcacagccaaggccgctggctttgataactggcatcaagccgcagaagctgcggagcaatgcaagccgattgaggatgcataccgccgaggatttctgctggctttcgacccatcagaagtgcctgacacagaggatgaggactcccctctcaagtgggagccttatgctttcaacctcctgcaagatcggctgtttgaaaactatgccagtcaacttgacgaggaagatcctgacgaaaggccgatttcggagacgctagatccgagcgacctcaaggagtacttcagcgatgactggggcagcatgtacttcttccgactgaagcgctccgaccaagtgaccacgatcgagcaactcttatcgctcgtgagcaagcactcgttttggcctccacgctttgtcttcttcaagggaaaactggtggatacatatgggcaaccggctttgaacgatgatggagaggtggtgggcattcgtttctaa

SEQ ID NO: 345854 - DNA, 453 bp, Pseudomonas aeruginosa
atgcgccgcgtctatctcgataccgaattcaccagcttgaaccgctatacctgcaagctaatcagcctcgctctggtcgtgcctggtggcccggagttttatgtcgagctgatcgatgcctgggacgagggtggctgctccgatttcgttcgggagattgtgctgccacaattggacctggtggcctatggacgcacgacagaacaggcacgaatagagttgctggattttctccaggagctcggttcggtggagatcatcagtgatgcgcctgattgggattggcctttgctgatgtggctggcaggcccggatgggttatcaggaggagtagaggcggggaggatcagttgcgacatcgaggtcgccgccgagtgggaggggccgccccaccatgctctccaggatgcccggatgctggctcaattggtggagcgatccaacctcgcatga

SEQ ID NO: 345855 - DNA, 1554 bp, Pseudomonas aeruginosa
atgtcgtcaacgctggacagattttacgagctggctgcttatctcaacaccttgatggatagcgatcctgctgaggcggtgaggcaagcccgggaaattgatcttgatacacctgagcgcttcaacctgatggggctgcgtgcggcaattctggttgatggtggcgcattggctcggcaacgggatgcgattgaagaaggtcttgcgttgtttcgcgagctttacggattgttccccactgcgggcattacctacaacttggcaaacgggcttgtcgctgcggcaggtaatccgccccgtgatacaagttggttagatcaccaggagcgtactcgggagtatcgggccgaagcgcggcgatgcttttggaaagtagctcaggatttggatgctgattcctcgctgcgaactcaggcatggacgaaccttgctaatcagttcaccaacagctatcggcttggtgaagcccatgatgcacggcttgctgcgctagaggtcgacccggagaacggagtcgcggcgagttccgcagcccgtgatttgctatggctttttgagcaaggtggctgttcagaccttacgcgtatcgaggcggtcatgttggccaagattgtgcatcggcatcaggatcgggtcgtccagtacgctggtgcacaggccgcgaagcagatcgcagagttcgccagcgaacttggcgatccaccaccgcgagcgccgcacactgatccattcataagctgggtcgaacgcgagcgtctgactcttgcaccagtcgtcgagctcgtcgatcccgccctgggtaagctggactggctcatgcttcctgggattctggagcgtgagtcaggcgtacgtggcatgcctccacccgtgttcgcaatgttcaatgtactgaagagcgacttcatcctcgcgcgtgacctggcatggcgtgctctcgacgaaaacgtgtggccagcgacgggacgatttgcggacacccttgactacgctaactacggccccggcgcatctgcgcttatcctggcgcatcgtacggctctcgatttgctcgataaggtcgctgtaacggcgaaccactactttgagttcggacaagcacccgataaggtctactttggcaagctatggcgagggagccctgacaaggcgacgggagtgcgccgacttgccgaaagggttgagaaggcgattcgtgacggtgccagtgccctctatggccttgtggagcttgccgaagattatgacagcagcgcgggtatcttgcgttctcaaaaggatctccgtaacgcaggcacgcaccgattcgtggtgctgcatgaccttggggatccaacgcacagcagacaggcgcctgagatcgaacatcaccgcatggatgtgtttactcaggaggcactgcgcgctttacgtgttgcgaggtcggccatccagatgcttgcgctcgcaatatcgcagcatgagcgaggcatggcacagcgggaaaacggctttgttggatcgttgatcgtccccgaccatgactggatccggggacgcgacgaggaaatctaa

SEQ ID NO: 345856 - DNA, 249 bp, Pseudomonas aeruginosa
atgacgcgccgaatcaccttgaatctcgatctcaacgaaaatgaccttgatgctctgcagcttgtgctggctaatccggctgtaatcgctaaggcagtggctccgaatgatccccgtgagcagattcgcattgtcgatgtactcgcggaaatggccggaggtattgctgaagcactaggccgtgcgatggccgatgtaattgacaagcagattgccactccggctcaggggcgtgatcggtcgatgtga

SEQ ID NO: 345857 - DNA, 414 bp, Pseudomonas aeruginosa
atgtctgatcaagaaaatctgctcgcgcagcagatgcgcgatctacagattcaccgccacgaaattgagctgcgccgactcaaggccagcgccggcgatcctcttgccgcaccattcctgcgagccctcgacgctatgacggtagaagccgcgatcattgaggcctacatcgtgcctgtgccattgggattcgggcgtgaacctggttggagcttagcggttttcagtgagcggccactgtttgctatgcagcgccttgcgctagcaatcgctgcgcaggaggccagcgagtgtgtcgagatcactgtcgacatttatagttggttggaaaacgctcaagagctcgctgaggcgatggccacaggccttctcatctggccaatgaacgattccctggacaaggaagagccatga

SEQ ID NO: 345858 - DNA, 4128 bp, Pseudomonas aeruginosa
atggccatcttcacgatcgacaaattcaccggcggcgatatcggcgcgcgggcgagctatttcgagcgtggcgagggccaggtcctcggtgacgagcacgatcaggtactgtctaccgggggggaggactactaccacaagcccggcgccgacacgctgctggccgagtatctcggtcaaggtgccgaggcaatagggttgggtatcacgccacaggatggtgattacgccgccctgatgagcggcatcaacccccgcaccagggagtcctatgtcctcaagcgccgccaggatcagcttgagcgtggcaccgggacggcggggttctcgaccagcctcaacgtggataagaccctctcgctggtttatgcctcgctaccgcgcaaacagcagatcatttttgagcgggccatgatggaggcatcgagacggacctttgagtacgcggagaaacaggggtacttcggctacaggcttggcgcccaaggggtggaccgctacgccggaaaggccatggccgcttcgtatttgcacttcaccaatcggaaccaagaaccccatctccatgttcacatcgagattccgaacgcctgccttacgcctgatggcgagtggcggccgctcgatggtggcgagctgtacaagcgtcagggagagttcgcggccctatttgattgctatctagcccacgcactcggccgggatctccctcaacttgccaagcattttgaagctgacctcgcgcggaacgggcttcgcgtggccggcatttcccgggaaaccgtgctggagttctccacccgccgcatggagatcctcaaggtgctcgacgagatgggtgcgagtggcgctgattcggcacgaggcgcagccaagcgcacgcgcgagggaaagaaggagcgtgactcagacgaactccgcgccgaatggcgcgagcaactccagaaccttcaccaggagctgcaacgcggcgacctgaccccggaaactaagctcttcgccgaacagcttgtgttccgcaacgcctccgtatttggcgagcacgccctcgatcgcgctgctgcgcagctggcgattctgcatggaggcgagccagcgattccggcaatcaaggctggacttatccgtcagctcggggtgatcgagctgccgcagcaagggcgccaccgcgaattcacgaccgagatctaccgccaactcgaagccgagctgctggcctatgcccatgccgctcagcgtcctgaggctcgattcacgatcaaaccgctcgatgtggaaatggccatcgcgcgtatcgagcgggaaaagggctaccctatgcgcgacgagcagcgcgcagtcgttcgtttttgtacttccggggctcgctttcagatcatccagggcgctgccggtactggtaaatccgtcagcctggccgcgctacgcgagacctacgagtctgcaggtaaccgggtgatcggtctggcgccgtctggcgcagctgccgcggagctgcagaactcggctggcatccaggctcgcacaatccactcgctgctgatgcgcctggaaaacgacaacgctcagtaccgggaaaaactgcgtcccagcgacgtcatcatctgcgatgaggcgggcctcgcggatctgcgcaccctgcacaaattggctgggtactgcgacgcggccggcgccaaactcatcctagtcggtgatggccgccagctagaggccgtgggttccgcctcggtgctggacatgctgaccgaggaggttggctgtgctgagctgatccaaatcgcacgccagaaagaaccagcagatcgtgcgatctctcaggcctggttcgagggtccagcggagcagggcggccctgatgccctggagatgatgaaggcccgcggcctgctgaaaatgcctgccgacgacaccagagacaaacccatcgatttggttatgcgcgacgccctgcaggcgcacgcagagggcaccgactggcaggaaatcctgctgctggctgaccgcaatcaatccgtccgctcgctgaacaacaaggtgcgggagcaccgattcgagattggcgaactggataaggcccagcagatccgcattccggtggagaccggccgaggtgattacgccgacctcgatctggctccaggcgaccggatcatgctgcggaaaaaccagaagatcgatggcgagccggtctacaacggcgaccgcgcgacactcaccaggatcgagcgcgtgcagaccggcacagacgataacggcgagccgatctacgacaccaagctcactgcgcgccttgatcgcaccaaggaggaggtgagctggagcctgtccgactacgcctcgatcgatcacgcctacgcgatgaccgtgcacaagagccagggtctcacagtcgaccgcgcgttctacgtgacctccgagtccacggatcgccgcctcgcttacgtggcatttacgcgatcgcgctatgcctgcgcgttctacaccgcgaatgaccaggattcgctcgacaccctcgcgcgcaacaccgaaggctttaagagcaaacgctgcgccctggacgccgataaagagttccgcgccctgatccgcgccaacgctgaagccggactttacgaagatcggccgatcaaggcccagcagccgagcaccaaggatctactggagaaagccggcgagcgtttcgagtacccgaccgagccgaaagccgagcccaaaaagtcgccagagatccaggtcatgccagccacgcaggccgaccatgacctttccgtcgcccggggtttcctggtgaccgggctgatcgatctgccaaacgacacccgccagaagccgggcaaaccctatgagctgccggccgacgccaagcgcgttgcgctgttggccgagccagtccctctactcccaaccccaaagcaggaaaacgaaaatgagcgagctgaacgatctgttgccgccgaccaaggccaagtaggttccgatatggctaagcctcgtcgcgtctggacgaaagccgagcagcaacgggagacgcaggcgatccgtgacggcgtagaccttcgcgcccacgccgagcggttggggtacgtccaggtgagcggggcgggcgcgaaactgcgtctcgaaaacaagaccctcgacaaggcggatcccatgcgcgaaatcaccttgcgcatcaacgcacgcggcgaggaaagttggatcgccgtcaagggcggctcaggctccggcctcggcggcgatgtgttccatctgcatcagcacgccaccggggcgagcttcctcgaaacccgtgacgaactgcggaagatcgcctttggacgtgacttcgaatccgggatcaagcaccaggggacgccgactgcagagcgtgccgccctggccgagcagcgtcgcgagcaggaggcgctgaaggccgagtttcgccgcgcagcggcatataaacagtacacgcaggccagcgaccagcccaatgctttcctcgtctcgcgtggaatctctgagcagaccctcgccgaaacgaaatggcgcactgaccggcacggcaacgccgtttttccgcatgtgcgcgaagacgggaaattcactggtttcgaacgcaagcaggatgggcctgcgcttttctcgaagagcgagcgaggcctctacatcaccaacccaagctgcgagaacccgaagcgaatcaaagttgcagaaggcggtctcgatgcgctgagtctttaccagctcgatacaccagaacagcgcgcttgcacgctctacgtcagctcaggcggaaacccggccgatgacaccgcccgtgcactgcgcggtctggccaaccgtactggtgcccggcaggtcgatctcgtttatgaccgggacgatgcaggcacccggcataccgaagcattgacgcaactgctcgccgagcaagctcccgacctgctggtcgctgaccgccgtgacgactacaaaatggctgagggcgaagaccctaacgatctcctcaagcgtcaacagagcaagccggcgcaggtcacatcggatcgggatcaacaggcgaaaacccaacagccggtggccgctcaacagcctgtcgcgcaagaggtagtcgaggagatcagagaacaggggaggtcaatgtga

SEQ ID NO: 345859 - DNA, 345 bp, Pseudomonas aeruginosa
atggctttcgagaggaaaaatcacacacagagcatggctactgaggccgctcagcaggcgttcgagcgcctcgctcgggacctgcgggtcccgaaatcggctgtgctgcagaccatcctggaggctgttccggccgcagatttggtcgccctggtgcgcggtgatctggctctgcatacggccaaaatcgtcgccctggagcccgaggaatcgctcgcgatccggtctgagattgaatcctcactcgcccttttgggggctcggatcgcggaggcgagccggttgggagcgcagcgcgcggtggctgaacacctcaagtctctgttcaacgccgagggtgcgtga

SEQ ID NO: 345860 - DNA, 732 bp, Pseudomonas aeruginosa
atgaaagaggcttacgccagcaacaccggtcgcaccggaaaaacaacgctcgcaacgaacatctcgctgcggaatgcccctcccgggacaaaatttcttgccgtcgagtcggtaaacagcactgcagatgcactcggcgtcgatgtcgatcaactgaagggcaacgagttcatcaaaatctatggggagatggttgtcgctgacgatctcgttattgatgtcggcgcctcgaatatcgaagcatttctgatgggtatggatcgcttcgagaacggcacggatgagatcgaccaatggcgcatcgttgttgtacccggcgttcgcgaacaacgtgaggctcttcaaacttgtgccactctcaacggcctcggggtgcccgctgaaaaaattcatatgatctttaaccgcgtggcagcggatatggaggttgagcgcgagttcgccacgctgcttgagtacgtcaagcgagagaaaatctgcatcgcgaaccccgagtgcttcgtccccgagagcgatatttttaattctctcgcggcccgaaaactcacgctggcagcagcgctggcagacaaaactgactatcgggcattgcttaaagaagctcgccaagcggggaaaaccaaagacttcgaccgttacctggaccttttctcagtacaagagcaggttaaagacattgctcgccagcttgatcgcgttcatcagatcctgattgagagcgccaggggctga

SEQ ID NO: 345861 - DNA, 723 bp, Pseudomonas aeruginosa
atgctgaggcagctgtttcgcgagcattacgagctcgctgaccgttttgaagctgcagcccagcaaatctcggtagtcgaacgcagcctgcacggtaccgaggggaacaagggtatcgccgagatgttgctcgatgctgcagagcagtgtcgccacggagcagctgcagtatctcaactcaatgttagtgagcttgcggcaacagttactcagctgaatgagcatacgaaagcactgccgcgacaacttcttcggccagaagagtcacaggcttttcgggaatccttagagcgtgcattgctcgctgatgctacacgcattttgcgagtcgcctacgagtcggcgatgaccagtggttgcctcgaagccgttgaaaacgcgctcaaggaaatgcaaaagcggatcgacacctcatcattggaacgatgccaggcggcagaagagcagagcacagcattgcaagctgaactggagcggactgcaaaagaactgactgcggctcgcgagcgagttaaacagcacaacacagcactgagtaaccagcacgatcttctgaatgctcgatttgctgagcacttggcggcagcacgcaagtggagcttagccaaatttgctaccggggcgatcctaggggccgtgttgtccatcctctacctggcccctcagatcgaagatttcttggcatctgaaatcatctataggccgattcacgaacggcgctga

SEQ ID NO: 345862 - DNA, 309 bp, Pseudomonas aeruginosa
atgagcaatcgtgacgatgacggggattttcgcgcccgaaaaaagcgcgtgttgattagtggggccgatgctcaagcgttcatagaggcacgccggaaagaacgtgaggagtttcgacaggctgaagggaaagacttagacgggttggatcagttggcccgcgaccctgcgatggacgagttgcagaagaagcatcaggagcagcaggaagcccgtgaagaaactgacacggagaaaagctacctcacaacaaaacggcaggaacaactgccacaagaacagcaagatcaacagccgaggtcaatgtaa

SEQ ID NO: 345863 - DNA, 2529 bp, Pseudomonas aeruginosa
atggtagagcaattccgaaaatatatcgacgacccacagtcgctcctgcgcgactggcggctcgcacaaacgcgggcgatgcgagaagcagtcgccggtcaactggccgaagatgcgcctgggtggccagtagagcagatcctgcatgatgatgtgagcgagccagaacaccggcccgttgatcgcgccgggcaaacccggcgcttgttgttcggtcgggctgcgctgcatgtcgccgcacggatcgagtcgcgcttgctcgcgcggcagttcctcctcgccctcattgctctggtggccacgctgttactcggatcattggcattgatcgcgagcaaaggggggctggtctttacttggggatcttcagcagccggtttcagcctcgctatgatcggtggttacctgctgtacctagccagcggcgtagcacgtcgcggatatgagattttcctacctcgcgggccgatgctgactgaccctgacaaggccgatctccgtcgattggccgagcgtgtactgctgcgcgtcgcacctgatgatgtgcccgcagatctcgcggatcagtaccggccgctgactgtcgatgccgatggccagccggttgacggacaaattgttggtgacgattacacgacaagctggttgcgcgaggccctgagttcgatgctggctgttgtcgcggctgtgggtctttcggttttcgcgactgggcttgcaatgaccggggttccgctgttcagcctgctgaccttgccgctcctggtgctcgctgtgatctggacagggatgaaagtcttccttcttccagacctcgctaagcggcggggtctggacgcgctcgaagcgctgcgtcggtcgccgacagcaaaattggttgaccaggtgtcgcctgtggttttccagaagttcgaggcggcgaaggtcggccaaatcacgcaggccacggccgatcaaacgccatttgtggacctcggtcggactacaggtttgctaagtgggcggcgggatccattcgccccaacccaagcgggcatgccctgcggtttgagcgtcgatgacctctctactcacctactcgcgcttggcgcgactggcgcaggcaaaaccgctggtgtgctgcgcccagtgatcggttcatggactgatgccgatgcaggtggacttctggtgctcgacggcaaaggggttttacccgaagagctggcggacctcgacggattccaggtgatcacgcccgggttgcaggtgtttgccccaattgaaaatctaacacccgaccaggtggctgattcgttgtacgaaatgttcgccgggcagagcgaatcgaaagacccgttctgggaaaaagcagcggccgagctgattcgctctgcggcgaaaaccctcgcgctgctggtcgatcttgaggccgaaagctgggattggaccttaggccatttgcatcatctgattttcggcgaggggatgattgatgcggcaaaggccgtggtcgaatctgcgccggagtcgaaagtgctttcgctgatgcctgggcatgtacgccgtgcgtacgatgacttcacacgcaccttccctgccatgccggccgataccgcaaactctattaaacagaacgcgagcgtctggctcggtttgctggtcaacaacgcccagttaagcgcttgggctgacgccgccaccggtgtgcagattgagcaggctcttcacggcgaacgcattggattgctactgccagagtttaaatacggcaaagccggcgcggttattgccaacttcgcgaagcagcgcttctacagcgaaatcaaacgtcgcggcgagggctggaaatcgggtaagaatggccaccggcgcgtcatgctggtggtagacgagtgccaagcgctgatgacagagagcgaagccgaaattctgccgatcgcacgttcccttggcctctgcgcagtgttcgcgactcagaacatcgatggtctgcagatcgcactgaaaaaccagccggcgctgctgcagcagatcctcggtcagttccgttcaatcatcgctgtggcggtcaacacagatgccacatgtgaattcgtcgctggccgaatgggcgctgtaccacgggcgatttacagcgaggtccccgcacctgcatcggatgccgctggaaccatcgctgggctgcagctcgaagctggcagcttcggagtcggaaccgtaatggcatcggcctcttggtcgagcgaactacgggggatgcggggaactggcggcctcgccggtgaagcctgggcaatagcgagccagttggcggaaaaatcgggcgtgaaaaaagcgttcgagctactccctggtgcattcaaccgggaggcgcgagcaggttcggcgaagcttgatacacatcccctggtcagcccggccgaagtgcgcgggctcaccgcagaacggttcaccgctctggcggcggtcaaccgcgccggcgtcgaccggagagatctgatcaagctctcaccgcggttcagctttgctcagcaggaggtggcgtga

SEQ ID NO: 345864 - DNA, 849 bp, Pseudomonas aeruginosa
atgacgtttgagcgcgatgtcttcgagcagcacagcgcactgcttcagttgcgctcgtcgaccgtccatcctgcgattccggaccgaaactggttaccgaggctggccttggccgggctgatcttgactggtggcgcgatggtcgccggaaagctggaagagatacgccgggaagaagtcgctcgggtggccgccgcggaaaaagcggaggctgaccgtaaagttcaagctgagcgggtcgccgctgagcaggttgcaggcttgaaaaagcggattgaggccgtgcaagcacaaatcagccaagggcgagatgacctcctgagtgaccttcagagcgttattcgcgatggtgagacaattgatgccgtggcggttgtactgcgcctatatccagcgcccacgcacgatcttcaagcgctcgatacaagcgagttcgagcagtttctggagcttgatcgcgaagcctggattgcagggaaaaaatcaccacagctcgatgcgcactaccaggcagagagggcaaagctgacgtatgcatcggattatctcaaccatttccaagacgctgtgaatttcactgcgcggggtcaaaagcttcctgagtggatggcttacgaacggttccgggctgtgcccgttgaagccccggaaggggggaaagtcgaactgcaggagcgagagaagactgtggcacaggttccagccgagccagagccagagccagagccagagccagagccagagccagagccagagccagaggttaaacctaaagaatttgctcttccagcacctaaacccagaactgcacctgcagctggcggacgagttcaggtgcttgattggtaa

SEQ ID NO: 345865 - DNA, 765 bp, Pseudomonas aeruginosa
atgccccatgaaatccataactggcccgacattgccaacgattacgctggcaccttattaataggcaacggcgcaagcatcgccgttagcaatagctttaaatataactctatactcgaatttgctcgaaataacaatctaatgaccgccaatatcgagcggctatttgattatttcaacacaagcgactttgaattaatcttaagaattgtctggcaatcgacatatgtaaacaagtgcctaaacataagagataacgcaacagaggaggcatatataaatattcgcaacctcttgatacaggtggttagagctatacatccagaatactccgacgtatctgaaaaccttcagaagctgtatacattcacaaagcgctttgatcgaattatatccttaaactatgatttaattctgtactgggtaatgatgtacggaaactccattcaagacggacacagatttaaagattgcttcctaggggcgcactttgactgtaactggaaaagatttgaagaaccgtactatggcgaaaatcattgcactctagttttttatccgcatggaaatctatacctctctagaaatcttcgccaaagtgaattaaagctcaacgccgacagaggagatctcttgcggagcatactagagagctgggagacaggcgacagagttccactatttgtcagcgagggattaaaagagcaaaaaatcagttccatacaaggaagtcattattggaaaccgtctaccgagagactctag

SEQ ID NO: 345866 - DNA, 825 bp, Pseudomonas aeruginosa
ttggatctttctataggcattggtggagttttaaagaagattttcggtgggttaattgagtttctggataaaatccttttctacagggcctacagtctttcaacgctatacagtggttacagggagatgtttatctggaagcctagcgagctaggtgatgaaattgagtacagggtgctgtggcggcgctattactataaaagaaaactagttaacccattgatttgggtgagggctcgaaagggttatgtattcaaaaaggtggttctgttagtaaaaggcgaatccgagaaaacggagtatcaagatgtggttactctgtttgatttgacagaaaagccaatacagacggcattggctagcttgccctttcgtgacctaagatttgatgatgggtttgttgagactccataccgtggaattagagttaagctgttagaagccttacgtgatgatggctccagccttgattgctcttatgggtatacgaagtatatgacgccctctgatcgcttagaggtacacttaggaagagaaaagggtgatgttgagcgatggggggagatttttaatctcgaatttattgagatggagattcgctctgagcagataaggttgcttggggggaggtatgggcgcagcaagattgcctataaagtaagggaaatcgtctttcagtatcgggctgtggttaagcttgtcttttggctgaaaaatattgtttttgcaaggcagcttgagaaggctctggaagattatttttctcgacaaagagcttttgatgagatggaagataaagtcaacgtgggggcgataaatgagtaa

SEQ ID NO: 345867 - DNA, 240 bp, Pseudomonas aeruginosa
atgagaaccgaattttctctagaaattggcgttgatgtcatcgacattccgacgatgcatgagttgccgcgtaagcagtatatcgattatatcgaaaacaacctattttgggtggatcaccatgatgtgcttcgtgcctcacatggggagtacccgatcgctacctcctcgcaacagatagatgacctagtggattatctaaagagcgtggctcagcggatgaggtctgctgggcaataa

SEQ ID NO: 345868 - DNA, 627 bp, Pseudomonas aeruginosa
atgcagcacgccctcaccttcgctgacatccagaacgtcaagcgtcacgcaaaaaaactcaaggcctcacaccctgatctgccgcatgcgaagcgtctcgacatcgcagctgcagagcttacaggtgtacgtaactaccacgagcttaaccgtcagttcgaagagctgatcaaccggtacgttgataccccagaattgaacggcgtcagccattgtcggtactgcgacttccgtttcgcggcggatcacaagccagatctgaaaactcatcgcgacctgcatgagcgcttcatggaggtgcatgaaaggttgggttatcggcctggaacctacgttgagcgcgaacggatgaagaaagacggctaccagcaagtgaaccatgcagaacaagtcgaagaccgcgttgcgggtcttctcatgatcactcgtggctggttcgacaggtcatttcacgatgcggtttcggacggttactggcctaggcacccgtcgtttgaagaatacgtggccatgatggttccccacctggagactatgtatcctgctcttgcagtcatcgtggctgaacgttacgggcggacgccaggggtcattcccaagggcaacacctactggccggcacgctga

SEQ ID NO: 345869 - DNA, 417 bp, Pseudomonas aeruginosa
atgcaattctatccggggtctgccttcgctggcctggccagcaacgcctacccgcaagcctggaaagcatgtccatcgaaagatcccagcggatcgcagtggtttgcgattcacctggacgccatcggcatcttctgggaagtcgactacgtggcttgggggaagaggtgcgctttcgtctcgactacagatcaccgtttttactggcctgacggcaaacctgggcttgcttggcgggtgctacggcccctgtacctggattggatgcttaggggcgcgctcgcgggagagttcggctcggattatttgcccgagctcgctgcagatcctgtgctgtttcaggagtacgacgagcacctggaggagatggccgcgttgctggttaggtaccagatcgaggagaggttgcaatgctga

SEQ ID NO: 345870 - DNA, 1389 bp, Pseudomonas aeruginosa
atgagatttaaaaatggcgcagactctgcagacgacagaagccaatttaatgttggtcatattcgcgcgggcgacataatcttctttgactctaactcccctcgcttctggcctcgcttgaagaggaaagtcaatgttattggccagcgactccttgccgcgacccgtcactccgagcataaaatctcaatctttgaccgaattcctgagtattcccatgtaatcctaggactcgatggcggaattgttattcacgccgatgggaaatccgttgagatagaggtcataacggatgccttacatattgccaccgtagaacaagcccgctatacgatttacaggcacaagggcatcagcgaattatcacgccagaagatttccattgaggcaattcgatactacagccagaaatattcattttcccctttctttcgaaaatcttcaacatcacccaataagtctactagcagcaataaagatacgacccagttctgttcacgcctgattgcatacgtctatcgcgccgccggtgtcgagttgactaacttaccggatcacaaggtgctcccagttgatctatttagaatatgcagttcgtcgccttgggaaaatattactcaagatttcatagatcaagatacatcaggcgatttagacgagcgtcttggctccattacaatgccgaatggagaagagatgactctatcgacgtttatgaaatcagcaaacgccttactaaaaggcaacgctatattcaatgccaaactccaaaaaatggcatatggatcgctaaaagaagttcttatgagcgagcttctgctagcacaattttgccaacttcaactggacattggcaaacttattagtatcaagcctaatgaaattcagggacacgtgacagacttgatttgcagagctttagaacagatagagagcctgctactactagcaaaaatctcagacctaaaactcattactccggacagcttcagcaactttgacctagatgacagcggtcgtggtgcgtatgttaatttcccaccatcagctactatgcgtgaattgcaattgagtggaaaggcacttcgaatatacgctgccttgctatttgctcaagctggaatatttgcaattctggctcactacgcacccaatgaaaagtacaagacgttcaaaatagtcaaccgagacacagctgacaaattcttaacctccgccctacaaataagagtcgacctatcgacttacgataatttccaagagatgtttgtttggattgagcatgaagccgatcgatctacgagccaggaaatattaaataacatcatcaccgggcttcgattaattgattctctgcgccttgcgagcggtatagacagcaaccggtag

SEQ ID NO: 345871 - DNA, 2193 bp, Pseudomonas aeruginosa
atgaatagcttctctcagcttgtattgtcctggatgttcgggcgctggatatttgaaggccctgaagtctcacaagtagtaactcaggacgttacgccgcttactattttcgctgcagcattttcccagctgggcctcctgatgttcggtgtgctcgcgtcttgggcaatgttcttaggtatttttcggctgaaaaataacggcaacttcttcggcgcccgggacggaaatgaagcgtttttctatccccttcgtgtggtggtcgcattgattcttgtcgcgccggttgttcccgtttccagcgctggaggagtggctatcaccctgacaaccgggcacgcactaatcgcaggcctatcaaaaacggctgctgactttggcgacacgatgcagcacgacgctttcgagctgatgcaccgtcataatcttttcagcgatccgaagtttcgtcctaaggtagatctaggcgttgccctggacatgctcaattcctggaagctttcagcagctcagttggccggctttgctgtatttagggatccaactgaagaaaagatagttgccggccttacgggagaacagcttgcccttgtggctctgcgaaatcgttggaacgaggtctatgggaacactcacccagcaggctcagccgatgcccagtcgcaagccgctgaggcatttctcagtgtcgctggccgatcgctgcagatcccgctaattgctccaacagacgcgcttgctcgcgaggtgactctcggtgcaaatggcctgatcgactccggcgctgttgatgaaacaatcggtcgtgaactcgaaaccgagggatggttttgccaactcggctggatgagctcgatgacatgttctgatgagttcgttcaagttaaggccaataacgcagcgtcgattgaagctggcatttcttcggcacagcgccaaatctggattcaacttgtttctcatgctcttcagtatgcaaagtctgttcaagacggtggagttacccaagcagagcataaggaatacttcgagaagtcaattaactggacggctcaatctgctgattggtacagcaaaactgttgaaacgacgattgctaatacgattgctggagatcaagcacaacgtgcagaaccctattttgatgaggtgaaaaattggggttggatgctaggtggaactttcgttttgcgggctgcgagcgattttagtcgtgctgcgagttatgcagatggtgccacaagcaaaatgatgcctaaatcctcactgtctgctatgacgggtggggaagtgctatcgaaagttgttgaacaagaaacactcgctcaaattcaacctggtaatactgggaacggcacaaagtctctacttgcccgtgttttcagtttggatattctcaaagagacaacagggccgagcatacaaaacatccacacaatcgccgcatggggccgctcactggtcggaacaggaattggcttttatgccggtgggaaaattgcgcaatacatgccaggtctgtcgtctctcactgatggcgcgcttccgaaatcaatcggcgcactgatgatcatcggcggggggataattggctacgtcatgccgctgcttttcgctgttttcggactaatgggcgcgatcagttggctcgttgccgtcgccaccacgtttttcggagtaaccctctggagcgcgggctttgcggctccgaaaggtgaagaacacacatctcaaatgtcagcaaaaggctggaatgcgttgatcttcatcggcctttaccctgccttagctgtgggtggtctggctgctgcgatcgttattagttccatcggattagcgatggtccaagccatggctatggggttatggggcatgtacgaccctggcactgctgaagtaggtcgccccctggaaagtctcggcgggattctggtaggcggtctatttatggtgggtgtaatcattctcatcagttggaatgtcgtcgtcacatcagctcagttaatcaacacatttccgcgtaccgtgctgaacatgatctcgttctcggagcctggcctgaatccgtacgaaaacgcacctcagaatctaatgggtggcctatcaacaaccgcgcggcaggtgctgactggctcaatcagccgagcaattaccccgtctcgtaacccaaacccaccgcaggccggcgggtaa

SEQ ID NO: 345872 - DNA, 399 bp, Pseudomonas aeruginosa
atgaaaatcaaaattgccctgttagctatcgccttcgccgccctggttggctgcagtgaatcgaaagaaaaccaaatcatgccgaaagcagcgactactgacgctgtttacagcgagaaggcctcgaagtatctgcaggacgcaatcggtactccaaaggctaaacgaattgagttgacgttttggaatgaatcaagcaactctgacactggctatctgtcgctagtggtggatggtgtcgagaagattcgaccgattgacaactttggaggctatcgtcgtcgcactgcaagttcggaaggattcaaattcgtgtacagcgatggcacttggaaagcctatgtcgccactggagagacctctactcatggagataacccgcaggagtttttcagttag

SEQ ID NO: 345873 - DNA, 507 bp, Pseudomonas aeruginosa
atgaagctggtgaaaagtgccttggccgcggtggtgctgctggccaccgtccaggccgaggcggcgagcgagcctcatccgctcccgctgctgaagttcagtcgtgactgtgtagtgaaggcatttgaattgaactacggagcgtatcagcgtcagctgcaggatctacatgtggcgtgcatgactgatagagctttcatcgactggcgagcgagccttgagcgagttgggatcatggatcaactgaagacttcgaaaggaggcctcgttctctcggtaaatgtcggtgacagccaggtactgaatgaggaagttaaggccattggcacgaacagcgaatggcggcgatacacagccaccgtgcggacgccggtagcagtcgttttcaacgggaacttagcccgggccccggagggatatgttgaaacggatgttatccgggtgcggcagaacgacagaattgtcggatacgcaattcatgcgatccgcttgaacattaagaagtga

SEQ ID NO: 345874 - DNA, 300 bp, Pseudomonas aeruginosa
atgaccctgcgcctagcaccgctgccaggcctcgataccgccctgctgctgcagcagggcgagatcctggagcacgctgcgctaatgatcgagtcagcgaccgccagccaggatgaaatcgaggagctgcgcatacgggcagaagaatactgcgtcctggccgattccggccgtatcgccctggtccctggcactgccgccaagctgcgcgccggcgccgatgagttgaagcagatgatccgtgactggcgccaaacccagcaagatctggcagaggagatcgctgatgatcgtgcttaa

SEQ ID NO: 345875 - DNA, 735 bp, Pseudomonas aeruginosa
atgaaaaatttcgagcgagacagttctattgatctaattaagtggatcgcacttatcacgatgatcatcgatcactcttggtacattctgcctattgagttacaagagccattacgctggatgcgcactattggtcgcttggcgtttccgctgttctgcctcgcaatcgcagcgaacgtttatcgccaaccgataggttattcaggaggatggaaatatctcggcggtatttttctatttgcactgattagccagcaaccttattcgagatttttcgaggtgaattatttaaatattctctacacgttaggtcttggacttgtcatcgcccaggcggtacaccatcggacgcccgccctcatctccgctggcgtcactgcgcttgctgtagcagcagtctacagaccaatcctgagctacggcctagccggcgtactcctgccggtcgttcttcttactgctcttcacgcatgcgagcttgaaacccgagtcgccacctggtcgcttgcagctctgatcacagctattgcaaacgcaggcgccgggatcctgatcatgtcggatctgccggccagggcacagaccggtatttgtgccgctgcactggcgccgctgctcggcctggcactactgcaattccgcgtgcggtcgatcaggccggtcagcacctggatgtacccgctttatccgattcatatgctgctgctcagctccctgtcgctcgcctggatctga

SEQ ID NO: 345876 - DNA, 900 bp, Pseudomonas aeruginosa
atgctcagtaagcgccagcggagtcttattgaggaagcagttgctctagagtttgaagatgctaaggcttctggagcgacaggctatctacctcatttcttggcgcaggctactttgccgcacaaagatcctaagtgtatgtactttgaaagaggaacttcaaatcttactctgtcaatattggcgcatccaaaatatggcatgccttatgggatgatgccgcgtctattactcgcgtggatgtgcactgaagcgtgccgcacatcttcgccagagttaagtttgggaaggaatcaaaatgaatttctcaagaagcttcagctacctagtgatggtagatacattaaagctttgcatgcgcaaaccgtggctcttataagatcccagctaagtgtcgaggtttccaagactggtgttctggcttttgaaagtatccagatagcaaaaaatggttttgtgttctggaacccaaataagcctgatgaggagtgcttgtggaatagtaatctgacgcttggttctgatttttatgatgcaattacgaaagcgccagtgccgcttaagatggaagctctccaagcactccgtcagtcacctttggctatggatatatatacgtggttagtttatcgaatgtttacgctaaacgtggctgcgagatccgggagaaataaggaggcaaaaattccatgggttggcttaaagtgtcagtttgggggcggctatgaggagacgccgcagggcgttcgaagtttcaaggcaaattttctcaagcagttaagaggagtcctgctgtattaccccgatgcaagaaattacattgaagaaacgccggaacatttcgtacttaaggccggggctcgcccggtggtgcagcaacgagtcgttgctggtcgctga

SEQ ID NO: 345877 - DNA, 345 bp, Pseudomonas aeruginosa
atgaatgaaaccaacacctcccctaccgagaccaccgagtctttttccggtagcagtcatgccgataccggcacaatcgatggcttcaccccgctgcatagcactgaccctctctgcgttatcggctaccccagcaatacagctgcacccgatctttacgatgccgcaacgcatcgtcattccgccgtccttggagtgctttgtgtactcagcagcgcgccagacctaaacgaactaagcacttcgagcctgcagaactgcatccaagccattcgcatcctcagcgaagacgcagctgctctatacgccggagcctggcaagcattgcagaacgggcgccactag

SEQ ID NO: 345878 - DNA, 459 bp, Pseudomonas aeruginosa
atgaaaagcccaactcgtccctcaccggcccgtgaaaatctgcagttccagctagacctgaaaacacaggaagtactgatggagctgaacgccctgctacgctcgcttggcgtaccaaccgtccaggctcaggctgccatcgctgagtgggaaggcaacatcctgctcgaagaagatcctggcacgaagcttccactccactacctgccagtttcactgattccaaagttcattgatcagatcctggatcaactgactgctggctacagagctgaagccatccagattagggacggaagccgcatcatggagaacgtagtccgcttagtcaccattctgaagccagctaacaagcctgaagccggtggatttgatccaagccatctgcttcgtgacgttatcgccctaaaaccttcgcaggggcttactccggcccacaaccctcagggggccttgtaa

SEQ ID NO: 345879 - DNA, 726 bp, Pseudomonas aeruginosa
atgcgcacgtccaaaatcaaaatccatgcgatgactattccctatctgactgacagtaacggggaacgctactggcctatgcgtcccttgtgcgaagccattgaactgaactggcacagtcaggctgcaaaactacacccccctcgatatacagctcgtgagtacgatgtgtgtttaccagggcagcccccgatgaagcgggcactctgtttgcaacaagcagaattcgagttctggctcaaaggactgagctcacgcaaagtgaaccccgcggcacgattgcgcgtggatcagctgcgcacacatttcttcggagatgctccagccgagaagacgcacccagagggactggcagctgctgcgcctaaggtcctgagccgcattctgaactggcgcctgcagcagactgagccttctgaccgtccggacttgtctaagcagatcactggccagtttcgcgaaaagaacggttttgaaattgcggaggctcaagagcaccagctgcgcggcgcagtcgcttcgctcagcacgatcatctatcagcatgatcgtgcaagggcgccgagccggatgcctgtctcacagcgagtcgatgcgatcatcaaatccatcgtggatgcccgcccccaacgcatccacttgcaggactcggacttcgcagctctgctgtgcagcattgagctggagggacaacatcacagcaacgctcagcacgaacaaccctag

SEQ ID NO: 345880 - DNA, 1560 bp, Pseudomonas aeruginosa
atgagagtcaggattgaaccgcgcctgctgcgcgaggccgtgcgcctgcactatggcacacgtctatcgacacgcgaaattgctcatagcactgggctttcgcgcaacagtctcaagcgtttgtgccgccacctggaaagcattgtcctcgatgtggatcagcttgctgaatggagcgacgagcagctttatgagcgtttgggtatcaagccattcaacggctttcgcctgaaggcctgccccgattggaactgggtgcatgcggaaatgcgcaaccccagcgtcaccctggaactgctatggcgtgaatggcgggccaccgagccagacggcatcgcctattcgcagttcacggccagctatcgcagctttgtgcagcaacaaccattggcaatgcgtcagctgcatcaacctggcgacaagctgttcttggacttctccggcaagaccatgccgatatacctggacggccaatcggaacctcgcctggcacaaatctttgtcggcgtgctgggctactccagctacaccttcgcctgcgccgtgtggagtcagcggatcgaggactggatgcactgccatgtgcaggccttcaatttcttcgcgggtgtgccccgcctactggttcccgacaacctcaaggccgctgtgatcaagcatggtaaggatgaagttcagctcaacctgatctatcagcaactggcccaccattaccaggccattatcctgccggcccgcccgcgtagacccaaagataaaggcaaagtggaggccggggtgaagctggttcaacgctggctgctagcagccctgcgccaccgccgcttcttcagcttggcagagctcaatcaggcgatcctggagttgctgccggcattcaatcaacgcccgttcaaacgccagcctggcagcagtcggcacagcctattcgtcgaggtggaacagcccgcgctccagccgcttccgatccacgcctacgagcatgccgattggcgcttcaaggtacgagtgcgcagcgactacctggtggagtatgacaatcaccactattccgtgccgagccgattggtacagcagcaagtggatgtacgcgctacgggcgagatcgtggaggtctttcacaatcatctgcgcgtcagcagtcatgcccgacagtatgtttccggcatcagcgtgcaaccggagcacaggccgccgaaccaccagtattacgccgacagtgagcccgctgcattgctcgcctggggtgagcgggtcgggcctgcactactgcgccatctgcactatcacctgaccgagcgaaccgatgtggccaatggacacaaggccgccagcgccttgcgcaaggaatctcgtctacatggcgatgcacgtttggaggaggcctgtgcctatgcgctgaccatcaagaccttcgccctgaaaagcctgcaatccatcttgcgcgagcagcccgacaaacgccctggcctgaaatccctacccagttcgacacccgctcacgaaaacctgcgcggtgcccattactttgccgatgaaaaggaacgttcgacatgctga

SEQ ID NO: 345881 - DNA, 198 bp, Pseudomonas aeruginosa
atgacggtggagacgatgacactcatggaggtgagccagattctcaggatttctgagcatacggcgcgcaaccgactgagcatgggcttgccgatgccaccgtcgttccgcgtcggccgccgccgattgttcctcaagcaggaggtcgagcgctggctggccgcgcaggctggtgtatccgacagccacgaccgctaa

SEQ ID NO: 345882 - DNA, 1044 bp, Pseudomonas aeruginosa
ttgccgctctacctagacgatgaatttttcgactctttcgtatacgaggatgtggcggttgccctctgggcaatcaggctgcacgctgctgacatggctgttacgccggcaatcgcgctgcgactgatcaggcagtatctacagcctctgattccgcctgagcattgccatgtgctttatgggcaacgcatagcgacctggaatggcatctggggaatttatgcggatctgggatgctgtgttggcaagagcaacaatccacatctgtttgaagtaatgaaggccgtagagcttattcatcacttcacgacctggccgccaagggagtacacgttcccgactgttattgaggtcacctactttctcagcatgtgtactcaactgaagattcccgtgcagagtcatctgcgcttggaaaatggccagcgagttgatccgttcagcttttgcacgttgtgttggcggcagccattaccaggacgaaagctctgtgcacaccactctccccatgttccgctccaggatgaggtcggaacgcaagctgcggcggcacgctacaagtcaggcgttcgccaaagagagcggttcgataaggcggtaaatcgcatcctgaccaaagaagtgacggagttccatgaagggctcttcactcccgtggtgctgttccccgaacagggcattgcggcctggctgactgagcgtcgcccgctgttgtggcaattgctcggtgagcggcagcaggaactcagcgatgggaatgccgtgagcatgctgcttgatctactgcacagccctgatggcctaccgcccaaggcccaccagacttaccgactgattaatcagcacctgcatgagcatccgctgctgatttggccaatgctcatacgagccgagggctggcaccgatgccgagaagacgtgcggggacaatggggaggcaaacgccctggtgcagggcgtcctgtacagccgtcagctacttcgccatgtaccgatcaacaaccgggcgtagctcgcggttgcgctgaccataattctcaatga

SEQ ID NO: 345883 - DNA, 453 bp, Pseudomonas aeruginosa
atgaacaatgccaaaccatggattttcagcgtttcacacaacagcgggcttgccgctaacgctgaacgccagaacatacccaccgtatcactcgcgctcattcagctcagcggcgcggatgatcccaaagccctctactcaacgctttcatggcagcaagccactcaccttggctactacctgattgagcatggatcacgtatcagctccttcgagcaggcgcaggctgtgctacaggttgaactccataccgaactcaacgaaacacctacccatgcaaccaccatcactgccgcccacggcatcgttttccacggcgacacttttctggcaacagacttcacgcgctatggcacctgggcagaaaccgtttgcggagacttacaccaagttcggctggaaatgatcgactccagcgcaccgggcactttcgcaatctgcctgttttactga

SEQ ID NO: 345884 - DNA, 246 bp, Pseudomonas aeruginosa
atgcgcagtgccgatccggagctgatcggtagtgctaatggcggtaccggcttcacccagaccggtgacgacggccgcctgaacttcaagaagggcgagaccttctcgaaaatcttcaagggtaaggtttcggtgcctgtcttggttaccgctttaaggcgcatgctgcatttacgaagaatcgccgcagcatgcgaagcctgtcacgaaatatcatggcgcttaaagcgacctaaagcctgttag

SEQ ID NO: 345885 - DNA, 804 bp, Pseudomonas aeruginosa
atgcgtgatttgatggcggaactcaaggagctgcgcctgcacggcatggccacggcctgggcggagttaactgcacagggtgagtcgaacacagcctcgtccaagtggctgctcgaacacctgctggaacaagagcacacagatcgcgccatgcgctcggtgagccaccagatgaacatggccaagctgccgatgcaccgcgatctggccggcttcgacttcagcgcctccagcgccgacgctcgcttgatcagcgagctggccaacctgagctttaccgacaccgcgcagaacgtggtgctgatcggtgggccaggcaccggtaaaacccacctagccaccgcgctggccgtgtccggcatcacccggcatggcaagcgcgtgcgcttctactccacggtcgatctggtcaatctgctggagcgcgaaaaacacgacggcaaagccgggcggatcgcccaggcactgctgcgcatggatctggtcatcctcgacgaactgggttatctgccgttcagccaggctggcggtgcgttgctgtttcacctgctgtccaagctgtacgaacacaccagcgtggtgatcaccaccaacctgagcttcgccgaatggtcgagcgtgttcggcgacgccaagatgaccaccgccctgctggatcggctgacccaccactgccacatcgtcgaaaccggtaacgagtcctatcgcctgcaacacagtagcttggcggcccaggccaagatcaaatcacgagagcgaaagcgtaagggcggccaggaaccggaggacgatgagccgttctga

SEQ ID NO: 345886 - DNA, 1509 bp, Pseudomonas aeruginosa
gtgatcagtatggaaatgatgggcaaaattcgccggatgtatttccgcgacaagctgtcgctgcatgagatagccaagcgcaccgggttggcgcgcaacacgattcgcaagtgggtcagagcacctgaggccaagccgccggtctaccaacgccgcgcgatctttaacaaactcagcccttttcacgccacgctagagcaggcgctaaaagccgattcgctgcgccccaagcaacagcggcgcagtgccaaggcgctgttggcgcaaatcaaagccgaaggttatgacggtggctacagccagctcaccgcgttcatccgtgcctggcgagggggacagggcaaggcgtcgcaggcctttgtgccgctgacctttgctcttggcgaggcgtttcagtttgactggagcgaggaaggcttgctggtcggcggcatttaccggcgtatgcaggtggcacatctgaagctgtgtgccagccgtgcgttctggcttgtggcgtatccgagccagggccatgagatgttatttgacgcccatacacgctcgttcggcgccttgggcggcgtgccgcgccggggcatctacgacaacatgaagacggccgtcgacaaggtcaataagggcaaaggccggacggtgaatgcgcgcgttgcggtgatgtgcgcgcattacctgttcgatccggacttctgcaacgtcgccgctggttgggaaaagggcatcgttgaaaagaacgtgcaagacagccgcaggcgtatctggctagacgcccaggactgccagtttcactccttcgaggaactcaatgcctggctgggccagcgctgccgcgcgctttggaacgagctgacgcaccctcaatacagcggtctgagtgtggccgaagtgctggagttggagcgcgctgaactgatgcctgtgccagcgccattcgacggttacgtcgagcggcctgcgcgggtctccagcacctgcctggtcagcgtcgggcgcaaccgctactcggtgccgtgtgagtacgcgggtaagtgggtcagcagccgtttgtatccgacgcgaatcgaggtggtggctgacgacgcgctgatcgccagccatgtccgcttgctggatcgcgaccaggtcagctatgactggcagcactacctcccgctgatcgaacgcaagcccggtgcgctgcgcaacggcgcgccctttgctgatctgccggcgctgctgcgtcagcttaagcacggtctggggcgtcatgccggcggtgaccggatcatggcgcaagtcctggctgccgtaccggtcgccggactcgatgccgtgctggtagccgttgagctggtactggagagcggcagcctgagcgccgaacacatcctcaatgtcgtggcgcgcctggccgcgaccgaaccaccacccagcgtcgaaacccacttgtcgctcaaggaagcccccgtcgctaacacggcgcgctacgaccgcctgcgtggccaggccgagggggtcggtcatgcgtga

SEQ ID NO: 345887 - DNA, 534 bp, Pseudomonas aeruginosa
atgaagcagatgaccttcgctgacgccgagtacgccggtaagcgcaaacaaacccgcaaagagttgttcctgatcgagatggatcgggtggtgccgtggaagggtttgattgccttgatcgagccgcattatcccaagggtgaaggcggtcgtccggcctatccgctgatggcgatgctgcgcgtgcacctgatgcaaaactggttcggttacagcgatccagcggtggaagaggcgctgtacgagaccaccatcctgcgccagttcgcggggctgagcttggagcgtatccccgatgaaaccaccatcctcaacttccgtcgtttgctggagaagcacgaactagccgccggcatcttggctgtcatcaatggctatctgggcgaccgagggctgtcgctgcgccaaggcacgatcgtcgatgccacgctgatcaatgcgccgagttcgaccaagaacaaggacggtaagcgcgacccggaaatgcatcagaccaagaagggtaaccagtactacttcggcagtgcgacctga

SEQ ID NO: 345888 - DNA, 183 bp, Pseudomonas aeruginosa
atgtctgagatggttctcctagatttcaatgccgtcagtcgcaaggttggcctgagccgcaagaccatctactgccgtatccgagagggtgacttcccgaaacagttgaagatcggtcgagccagccgctggcttaagcacgaagtcgacgactggatagccagcgccgctgcagcgagatag

SEQ ID NO: 345889 - DNA, 1536 bp, Pseudomonas aeruginosa
gtgtttccccttggttctgggtatggccggtcatgccctgagaaacggtacgcaaaacggtacgcagaaatggcagagacatcgggcaaggcgagtagtaggaaatttctgacagatgtggagctgaaggcgctcaagcctggtcagactgccaccgattcactgccaggccgaggtagtggatcaatcttgttcgattgccgtgcctctggggctgtcgaggcttactaccgccgccgtgatgaaggaggccagcagaagattaagctgggtgtcttcaagaaaacaccgaaaagccccggcttctcacttactgagcttcgcgagcaagcggtacgttacgcaaagatcgcggcagagcatggcgacattaaggcttacctagccagatgtgctgccgaggaagaggtcgagcaagccgagcgccagcgccagctgcatgagcagcagcgacttgctgcaatagaggcttcaaaaggcactttgtctgaattgttccgggattacatcgaagaccgtcgccgtgatggtgtttcagctgcgcagatcaaggagtttgagcgtgtgctgtctaaggatctggaaggcgagaaagttgtagccgtgagcgaggaaggccgagaggaacggctcaacatcatgaatatgaaggccaaggatgtcaggccggagcatgtgaatcttctgctgaaaccaatatgggacaggggagctaggcgtcaggcgggcaaggttcgttcgtttctcgtggctgctttcaatttcggtctgaaagctgagcatcatatcgaccgaagcagtactaaaagctacggacttcagatgaatcctgcggatccagtgactgtcccgaacacgtcaaaacctggcgagcgcgccctcactgataaggaacttaagcaattttggtacaccatcaccaaggtcgattcggttggtgcgattatggcgcgtgtctttcactttgcttttgctactgcagggcagcgtcccctccagtttatccgtgagccctggaccagctacaaccttcaaaagaagtacttgaagatcatagatagcaaagggcgcggtagtaaaaagcgtgctcacttcgttcccttaagcaacagggccgtgcagatacttgaacaggttcgtgccttgcagtccccaggggccttatatccctggagtgttggtgggcaaaagccgattcacgcgtccagtttgtctcatgcggtgagcgagtggctcgctactgaccacgccaaaatgaacagccagcccatcccaaaattcagcccacgtgatattcgtcgcacatgcacacagttcatgcagcgtaacggtatcaaggatttcgagagtgacgcgttgcagtcacacgggcaaacgggtgttgtcgttacgcactatcgcaataaccctgaggctaaactgcctcagatgcgcccgaccatggaggctttcgatgcggcgctgagtcgtctgctcgacggttctgatgaggatgagcatcaggctgagcagctggatttgttcgagattggataa

SEQ ID NO: 345890 - DNA, 4098 bp, Pseudomonas aeruginosa
atgactgatgattccctcccccttcatcccggttcctatgttcggaaaaacgtccttgatcctcgcgggctcacggttactgaagtggcgaagttgatcggagttagccgcccgggcctatcgaatttcctcaatgggaaggtatctgcaacgcccgatatggcggcacgtcttgaacgtgctttcgggatttccgccaaggccattctcgatttgcagacagaatatgacgcgcaagctgataaaacggcaggcgcagctcaaaaggcgcgcacttacgtgcctccttttttaaatgtccaggccaacgatctcgtaaattggttcacaacgacaattcttgcacgcactaagctctcggtgctgctgcgaacgctcattcactccacgggacgggatcttcagaaagtggatttccccggtaacgacgatgccgagcgtgccggctgggacggattcattgaggccagctccggcacaccttggataccttctggcgcctctgggtgggagttcggtgtcaccgcggatattaagaccaaggcagagggggattttgcaaaaagcgtccgggcgatcaagagcgctgaaagggcaaatattacgtttgtctttgtcactccaaggcggtggccgggtaaggctgcctggatcgcggaaatgaagggcaagaagctctggaaagacattcgtgcatacgacgccagtgatcttgagcagtggatggagcaatcactcgcggcccagacctggtttgcgaaccagacggatcgtccttctaatggtgtcagaacgctggagcgttgctggagcgattgggcaaacgtagcgacccccgcgcttcatccttctcttttcgctacggcgaacgaggcgtggaacggcagaatcaaatccttcctggcgaaagacgatgcgaaccccttagtaatagcggctgactccgttgaagaggcgcttgcgtttttaaatcaagtcctggcaacccccgagcttgaacagtatagggatcgggtgttggtgtttgacaaggcaggaatactgccgaaactcgcccaaggcactaccgatttcattgcagtagcccatacgcgggaagtggaacgcgagcttgggccctacagcacatcgctacgaaccattgttgtttatccccgcaatgctactagcgtggagcctcatgtcgtgttggagccactcgggttcgagccgttcactaaagctctggaagcgatgggcaaatcgcgcgatgacatagcgaaactaactaacgcctcggggcgttcgttgacggttcttcgacgtcaactctcgaatattccggcaatccacacgcctgcttgggctgaagatccaaaaatcgcatcggggcttgttccgctcgtccttgtcggcgcatgggacgcccagaacaaggcggatcgaactatcctgtcccatctggctgaggcaccttttgaggtgttggaaaagcgcattcttgatttgttgcggctcaacgactctccagtctggtcagttggtgggtatcgggggatgatttcgaaaatcgattccctcttcgcaattgcgggctcggtctccaaggctgatcttgaccgctttcttgacgttgcgcggactgtactgggtgaagatgatcctgccctcgacttgcccgaggaagatcgttgggcggcggccatgcatggcaaaagacgagaattctccggggcagtgcgagaaggcctttccgagacgttggttttgctggctgtgtacggcaagaatcttttcgggaggcaccttggctttgatggggaacttgaagccgcgaaaatcgtgcgtgatcttcttgtgcctgtaacgactagaaagctagaggctaacgggcgcgaccttccactttatgcagaagctgctcccgccgagttccttgatatcatcgagcgtgatctgcgagcagaaaagtccgaagtcatgggcttgctgagacctgtcgataccggcctttttggttcatgcccgcgcactggactgctttgggctctcgaaggacttgcttggaatccgaccaccttcccgcgggtagtgaagattctgggtcagctttctgaggtagagattaacgataactgggcaaataagcctatcgaatcgcttggctccattcttcgtgcatggatgccgcagacggcggcaaaccacgagatgcgcctgaaggcggtcagcatgcttttggataagcacccggcggtcggatggaaggtttgtctccagcagttcggtgattacgggagtcgcgtcggcggctatagccataagccgaagtggcgtcccgacggctacgggttcggggagcctttcaagacatgggggccgatccatgcattcgtcagagagatggtgaaaatcgcgctaagcaggccgtcctacaccgtcgggatgttatgtgaccttgtgtcaaggctgcatgcactcgcgtcggaggatcaggcgcgcgtatgggagatcatcgacgagtggcgcaacgcgggcgctcttgacgaggaagttgcgaagatacgcgagaaaattcgtgtgactgttctctctcgccgggggcgtaaaaaggtcgatgagaaagggcaagcgagcctgacggaaaaagccaaggcagtctatgccgagttgcagcccaaggacattgtgaacaagtatgagtggctgtttcgccagggatgggttgaggaatcggcggacgaactcgcaggagacgagatggatttccgagcgcgtgagcaacgcatagaaaagctccgcgttgaagccctgacggacattgcgcaagaacgaggtattccgggcattctcgcgctttctgaaaaaggaaattcccaacgccaaatcggcgctcacctagtgtccggcatacttaccgacgagcagattgaagatttgatcttgcaatgcttgcgtccggcagaaaatgattcgggtcgtgacggcatcgtcgccggggcgctctggtcgttggacgaggagaggagaaaggccatatatgcgagcctgcggggtaaagttgccgaagaggaagcgctccgtctcttgctcctttcgccttaccgggcttctacgtgggagcttgtagatcaactttcggctgaagctcgcagtcggtactgggttgaagtggttccgcaatatgcatttgactcgccggaggaaaataacgagagcgttcgccgcctgcttgaagtcgaacgtcctagggctgccttcgcatcgatgcatttcaagctcgaagaaatacacccacccctccttgtgcagatgctatctgccatggcgaaaaatagtaaggataaagctggggagtaccagctgcacgactacgatgtgcagcgtgccttccagcttctcaatcgtaactcagacctcactctagaggaaaaggctggtctggagttcgcatatttagaggttctggctcgctctttccgaggggaaggccagcagcagattccaaaccttgagcgctacattgaggaacatcctgaactattcgtgcaggctgtagtgtgggcctataagcgcaaggaccgtggcgaagatccccccgagtttcgcgttaccgaaggtcgcgagcatttggcacagcgcgggtaccgcctccttgaagccattgaacgtatccctggtcaagataaggcaactaaagaggaacagcatgaaaagctcgcggaatgggttgcaacggtaaggaggtcgtgtgctgaactcgaccgcgcggagatcgcggacgtgtgccttggaaatctattctctaacgcactggctggcgaggatggcgtgtggccgaacgaagcggttcgcgatgtgatggaggacttgcggtctgaggatatcagcagcggcgcacatacagggttatacaacgcgcgcggcgcccattggcgcggggaaggcggtggtcaggagcgggagcttgcagacaagtatcgcgcctgggccgacgccttgcaattcacgcatccctttgtgtcgtcatcgttgctgatgtcgatggtcaatacgtatgagcgcgaagctgaacaacacgatactgaagccggtatccgacgtcggttaaggcattaa

SEQ ID NO: 345891 - DNA, 753 bp, Pseudomonas aeruginosa
atgattcattaccacggacttccaataactccagataccgccgcggaggctgcggttggtggcggtcacgcgttcgtgagtttcagcgcgccagggcagcttggagtcgcggttcaggtctgccagtcatttgcaatcgacaacggtgcgtttagcgcgtggcgaagcggcaaccctgtaactgactggtccgacttctatgcatgggcggcagatgcaaaggcaattccggcgtgcgacttcgccgtcatccctgacgttatcgatggcggagaagcggataacgatgcgctattagctgagtggccgttgccgcgctggttcggggcgcccgtgtggcacatgcatgagtcgctagaacggctagagcgactgactgcggactggcctcgcatctgcataggcagttctggcgaatactcgcagatcggaacgtttcggtggtggcagagaatttctcatgccatgagagtgatctgcgatgattctggtcgcccattttgcaggctccacggcctgcggatgcttgacccagaggtgttttcccggctcccgttctcaagcgcagacagcacgaatatcggccgaaacatagggatcgatcagaagtggcgaggaacgtacacgccgccaacgaaagaagcgcgagcggcggtaatgaggtctcggattgagtcgcataacgccccagcacgctggtcacacatcactcccgaagatgtcccagctcagttctcgctgacgatgcaatag

SEQ ID NO: 345892 - DNA, 255 bp, Pseudomonas aeruginosa
atgaaaaatttcaacacctaccgccacaccttcgccgccgagtgccccgcagacggtgagcagatcatctacaaggtcgagatccgctcacgcacgatgatccgcgtcgaacacatccgcactgctactgcgctcatcaagaagggatatcacgagagaatcgctgacgaattgcacgagcgtttcggcggagagcagcggatcgtagccactcatcaaggcgtcgaggtcgaaactgtgaggctggacgaatga

SEQ ID NO: 345893 - DNA, 954 bp, Pseudomonas aeruginosa
atgaaaaacacgctcatgggtacagaaactgtaccgatggagaggtttcacttggtacagaaactgtactccttcttagatataccaggcgcagcctgggatttagatcttctgatctacctcttttgcagttcaagaaagccctcagaggtgcgcggcatccgcatcctcgctggcgctggagccgatctggcgcgagtccacatcatccaaggccggatcaatcctcaaggtgaggtcgatccattcgacccggccagcgatatcgacctgctacgcgagaccgccgaggccatcggcaaggcgaggccgtctctcatccctgggctgaacgaccgcgccaacgacgcttgggagcctctgctggccatcgccgaccaggccggcgaccactggccgaagtcggcccgcaacgctgccatcgccctgcacgggctggaaggtggatctcctagcatcggtgccgagctgctggcagacgtaaaggcggtattcgaggcgaagagcaccagcaaggtattcagtgccgatctgcttgaggcactggttgccgatgaggaggccccctgggcgacctggaaccgaggcaagccgatgtcaccccggcaactgtcggccaagcaggcggagttcggcatcaagtcgaaggacatccgcatcggctccaccaacaagaaagggtacgaccgtgccgacttctccgccgccttcggacgctacctttcccccgaaccctcccttccatccgcgacagcgcgacacgcctactcccacgcgacctccagagattttaaatccgcgacaccacccctctctgtcgcggataaaaaaacctcgcagcccagtaacgacgcaggctgtcacggtgtcgcggataaaacaccccctgcaaggaaagggacaggcaaggcaaaggcgactctccacgatgaaaccgaccgggaggagttctga

SEQ ID NO: 345894 - DNA, 609 bp, Pseudomonas aeruginosa
ttggcggcgggacaacggcgaagacccgggaaaaaccccgtaacccgcgccttccaagccctccttgtgtttccgcgacatttccttatgaggttgtttagggagcgcatggggcctgaccgacgatataacggggctttcagccccgttgatactgtacaaatccccatacaaccccgcacaaccccgccgctttggtacaggaattggtacattctcaacggcgcgagatcagcgctcggcttcgtacacggccactcccttacccaccggaatccacttctcttccgggtcaccaggccgacagatggcaacctctacctcggtgctcttcccttctgccggctcagccggacgaatggcagcatgccgcagcaagttatccatgccaggcacgaacgtgctctcggagcaatggaacgaccaaacccccgcccgattcgcatcgttcactttccgatcaagcttcagcgtccatcctttcttgagtcgaacaaccagcacggcaacgctccacttcatccaaaatgcatagtctacctttaccagcaatccatttgcggaggtagctatgtgcggacgcttgtcgcagtacaccggacttcatga

SEQ ID NO: 345895 - DNA, 147 bp, Pseudomonas aeruginosa
atgagcctcgaagaactgttcaagattgcccagcaaatcgacaacgcccaggagcgcgtcgcttccgataagcgcgaggcgttcgtatacatggacgttacgtcttctgagtaccgcaagcaggcggccaaagagcgccgccggtaa

SEQ ID NO: 345896 - DNA, 243 bp, Pseudomonas aeruginosa
atgaaatgcgaggaatgcgggctgcgtgaagaacaggtgcgattggctcagtcgagagagtccgaggctatcgcagaggccgcaaaataccgggcactctgggaggccagcgcatcatgcctttccgccaatgcgtcgagaatcaagccacgcggggatgacgaagcgaaactgcttgaaatcgccaaggaagcaaaccacgggccattttggagcggtaaaaccaaaggctggatcgcataa

SEQ ID NO: 345897 - DNA, 1053 bp, Pseudomonas aeruginosa
atgactgaccagctccaaccattgcctggtgaattcctgctctacgaaaccgaggacggacgcactcgcgtcgaatgccgcttcgtggccgatacactgtggctgccgcaggcgggcatggccgagctgttccagaccagcaagcagaacgttgccaaacacctgaaggcgatctttgccgagggggagctgcggcccgaggcagttgtcaaccaatggttgacaactgcctctgacggtaagagttaccgggtggcctactacagcctggaggcgattctggcggtcggctaccgagtgcgctcaccacgtggtacacaattccgccgctgggccacggagcgcttggcggagtacctggtcaagggcttcacgctggacgacgaacgcctgaagaacccgcccgtcgccggttccgccgttcccgaccgcttcgatgagctgctcgaacgtatccgcgacattcgggccagcgaacgccggatgtacctgcgggtgcgcgagattttctcgatggcggcggactactcgcccacgttgccggaaaccacccagttcttccgcttcattcagaacaagctgcacttcgccgtcaccggcaagaccgccgctgaactgattgccgagcgtgccgacagccgccagcccaacatggggctgacaacttggaaatccggcagcgtacagaaggccgatgtgaccgttgccaagaactacctgcgggaatcggaaattagcgaactcaaccgcattgtcacgatgtggctggacttcgccgaggatcaggcccgccggcgcaaggaggtgttcctgaaggactgggcggagcggctcgatgccttcctggccttcaacgaacgcgatgtgctcaccggcgcaggccgtatctccaagaagcaggccgacgcccacgctgagaaccaatatgagcagttcgccgtccagcggcggaccttgttggaggccgaaggtgcagatgccaatgtgcgagcgttggaggacgccgccaaggcgctgcccaagccgggcaaaagcagcagaaagagaaaatga

SEQ ID NO: 345898 - DNA, 2142 bp, Pseudomonas aeruginosa
atgaccgccctttctgctgatcgccccagcatcgacccgaaagacgatcttttcggccatgcatcgtttgccaagagcttggctgacagcatttatcgttatccgggtagcgatggcttagtgctcgccctttacggcccatggggttctggaaagtccacggtgctcggctatgtcggccattacattgagcaacagcctgaggaagaccggcctgtcgtcgttccgttcaacccttggtggttctctggacaagaaaacctcgctcgcgcttttcttggacaactccaagccgttctgcccaataagagtgacaagttcaagaagctgggtgacctgctcggtgatttcgcagagggcgtgggcggactgatcgatctatctggtgtgactggcggtgcagcaggcaagctcgggaagctcatcgggatactgaccaagcggaagccgaaagacgttcccacgctcaaatccgagatcagcaagatattgagagaggccaagaaacgcatattggtcgtgatcgacgacatcgatcgactgacgcctgatgagacacggcagttattcaccgtcatcaaggcattggcggacttcccgaacgtggtttacctgctggcttttgatcgtgacgttgcagcgcaggccatcgagcagcaaagcgggttgccaggtgagcgatacctggaaaagatcattcaggttccatttgagctaccgcctattgaacgcgttgccttgcaggcggcgcttttcaaacgccttgatcaggtattgggcgacacgccagatggtctgttcgaccaatcctattggacgaacgttttctatgatggcattgatcctcttatacaagtgccccgagatgtcgttcgcttcacgaatacactgtccgtgacctatccggcggtgcgtggagaggtcaatcctgtcgatttcatcgcactcgaagctgtcagagtctttctgcccgatctgtatggagttgttcgggcgaatgcaaataggttctccggccacagccgcgacgacagatacgaggaggatcgaaatgcagcccaagccttccgtcagggctgggtgaatcaggtgccggagtcgctacgggcgagtacccaagcattgctggaacgtattttcccgaagatcagccaaatggggtatggctccgaatggttgaacgagtggcgcaggaagctgcgcgcctcccaccccgatgtatttccgatctatttccggctcaccgtgcctcttggtgctgttcgtcgcaatgagatcatggccttgctgagtctggcggcatcccccactgatttcggtgatgcactcgttcgcgccaaagaagaaaagcgtcctgacgggttgtcgaaagcgcgggtgcttctcgaacgcctgatggatcacgtcgagaaagacattccggatgagcatatcccgctggtcatccaagccatcttcaacatcggcgattcattgattgatcctgccgatgaacggggcgcattcgattttggcaatatctcgcgtgcgtcccgccctgtctatcatttgttgaagagattacccgctgatcagcgcgccagtgttctggaagctgccatcaagtcaggcagcgccgtcgcagttcaagcttggctcctacgagccttggatgatgaaaccaccaaggcgaagaaaacgaacgaaaccacgctgctatcggctgatgaagtctctagcttgaaggtcgcgtggctcgatagggttcgtgtgctttcgggcgaggccgaatttatagaacatccggaactaccacgactgctcgccgtttggcggcaatggggcgatggctccgaggtaagaacgtggtgcgaccgcacaacagcttctgatgatgggcttttggcattgctgtcaaagttccttcagcacaccagatcccagaccgtgggcgattgggctgtgcgccttcagcctcgtctcaatccaacatggctggagagttatcttgatactgctgcctgcgccgaaagattggcccaattgacaagaaagggggcggttcccagtgaggcgactgaggctgtttcacaatttttgaaagagttcgagatgctaaaagcaggtaagaacccagacggcttgggagcattcgatgactga

SEQ ID NO: 345899 - DNA, 3183 bp, Pseudomonas aeruginosa
atggcctttctatccgaagccgccgtcgaacaagccctgctcgatcagttgcgcgggctgggctacgccattgcctcggacgacaccatcggcccggacggcagcgcgccggaacgcgacagtcacgatgtcgtgatcctgcaaaagcgactggaagccgccgtgctacggctcaatccgcagcttccgccggaagcgcgggcggatgccacccgcaagctcacccaatccgtctttccctctctgctggaagaaaaccgtcgcatccatacgctgctgaccgaaggcgcagatgttgagtactacggcgacgatggcgtgctgacggcgggcaaggttcagcttctggacttcgatgcgcctgaacgcaacgactggctggcggtgcagcagtttgtggtcatcaacggccaggtcaaccgcaggccggacatcgtgctgttcgtcaacggcttgccgctggccgtgatcgaactgaaagcgccgggcagcgcgggtgcgcacctggccggcgcgttcaatcaactgcaaacctacaagcagcagattccggcactgttccacaccaatgcgctgctggtcacgtctgacggcgtcgcggcgcgggtgggttcgttgtctgccgatctggaacgtttcatgccgtggcgcaccacggatggcaagtccattctggaaaagggcctgccggaactgccgacgctgatcgaaggcgtattcgagcagcagcggttcctcgatctgctgcgccacttcaccgtgttcggcgaaacaggcagcggcctagcgaagatcgtggcgggctatcaccagtaccacgccgtgaatcgcgccgtcgaatcgacgattcgcgccgccgacccgtggcagggggtgcacgaggaaccggcgtcctacggtctgcccagcgtggccacgcaatccaagggtgatcggcgtgcgggcgtgatctggcacacacagggttccggcaaaagtttgttgatggccttctacgccgggcgactagtgaaacacccggcgatggagaacccgacgcttgtcgtgctgaccgatcgcaacgacctggacgaccagttattcgccaccttctcgatgtgccgcgacctgattcgccagacgccgatccaagccgaaaaccgcgagcatttgcagcaactgctggcccgggcttcgggcggcgtgatcttcaccaccttgcagaagttcggagaagtgaatgagccgttgaccacgcgccgtaacgtggtcgtcatcgccgacgaagcacaccgttcgcaatatggctttcgcgccaaagtggatgccaagaccggcgaagtctcctacgggttcgccaagtacatgcgcgatgcgctgcccaatgcctccttcatcggctttacgggcacgcctatcgaggccaccgacgtgaacaccccggcggtgttcggcaattacatcgacatctacgacatcagccgcgcggtggaggacggcgcgacggtgccgatctactacgaatcgcggttggcgcgcattgaactgaatgaagatgagaagcccaagctcgacgctgaggtggaagcgctgactgaggacgaggcagtcaccgaacaggaaaagctgaaggcgaaatgggcgaccgtcgaaaaactggtcggcagcgaaaaacgcctcgcactcgtggctcaggatttggtagcccatttcgaagacaggctggccgcgctggatggcaaggcgatggtagtgtgcatgagccgccgcgtctgcgtagcgctgtacaacgagatcgtcaagttgcgcccggactggcacagcgccgatgacaatgccggagccatcaaaatcgtgatgacgggcgcggctagcgacccacccgaatggcagcagcacatcggcaacaagacgcgacgcgacctgcttgccaaacgcgcccgcgatgccaaagacccgctcaagctggtcatcgtgcgcgacatgtggctgaccggcttcgatgctccgtgcatgcacacgatgtatgtggacaagccgatgcagggccacggactgatgcaagccatcgctcgcgtcaatcgcgtattccgcgacaagcctgcgggtctgatcgtggactacatcggcattgctcagagtttgaagtcggcactggcgcagtattcggcgcgcgaccaggcgaccacgggcgtcgatgaagcgcaggctgtggccgtgctgctggagaagtacgaagtggtgcgcgacatgtaccacggcttcgattacgcaacagctctgaacggcacaccccatcaacgtttgatgatgatggccggagccatcgagtggattctggacaagcagcagcaatgggcggcggcgaagatcaccgaggaaggcaagaagaacgctcagcggcgttatcaggacgcggttctggctttgtcgaaggcgtattcgctggcgtcagcctccgacgaggcgcgcggcatccgcgaggaagtcggcttcttccaagctattcgcgccgcgctggtcaaatcgagcactggctctggcgtgacctcgcaagagcgtgacttcgccatccagcagatcgtcagccgtgccgtggtcagcaccgagatcgtggacatcctgaaagcggcaggcatccagtcgccggacatttccatcctgtccgacgagtttcttgccgaagtgcaacagatgcagaagaagaaccttgcgctggaagccttgcgcaagctcatcaacgatggcatccgttcgcgcagcaaggccaacatcgtcgaaacgcggacgttttccgaacgacttgaagccgccgtagcgcgctaccacgccaatgccatcaccactgccgaggtgttgcaggagctaatccagttggcgaaggacatccgcgcggcacggcagcgtggagaggaatccggcctcagcgacgaggaaatcgccttctacgatgcactggccgagaacgaatcggcggtgcaggcaatgggcgatgacaagctcaaggtgatcgctcatgaactactggtcagcctgaaaggcaacgtctcggtggactgggcacaccgcgattcggcacgcgcccgaatgcgtgtattagtcaagcgcatcctgcgcaagtacggctatccgccggatttgcaggacgcggcggtgcagacggtgttgcagcaagccgaggcactgtctgctggatggatttag

SEQ ID NO: 345900 - DNA, 747 bp, Pseudomonas aeruginosa
atgagtctggattggtgccccggtattcgcgaagcttgcgtgcattggcgcgatgcgccgatgttgcagcagacctttgaggcgctggagcgtaccttggagcaggataacgatgcgtgcatcgactgtgcgaaatccatcgtcgaagtgttctgtcgcatcatcgtggacgaactggattcacctacccaccccgtcaagcccaaggctgcggctccggacttcggcgaatgggtcggcgcagcagtgcgagtgctaaagctcggcgagaaccagaacaacaagttcctcaagctagtatcgcagcaccacaagttaacgacggccttgggcgatctacggaatgaatccgggccagtcagccacggtcgggacggattcctggccaagctgtctgtccatcatcggcgctcggcagttttgtcggcagatgcgctggtgatgttcctacaccaagcctatctggaaacgcagcgcgatcccgtcagttcgcgtgaaccgtgggaacggttcgaggcattcaatcaactgattgacgcaactatcggcttggaattggtaacggacgatgacggcaactcggaacttcgggttctgctgcccggcggcgaatatctttccctcaatatccctgttagtcgcttgctctatcagctcgaccgaggtgcctacatcgaagccctgaacgccgcgcgtggcgttcccgcggccatcatggaacaaaacgaagaacaaggggaagcctga

SEQ ID NO: 345901 - DNA, 1209 bp, Pseudomonas aeruginosa
atggccaagctgtctgatgtagccgccatcaacccgacccgcaaggtcaaaaaaggcgaattcgtgccatttatccaaatggctgcgttgcccttgagtgggcgtgatatttcggtttcagatgttgaaattagggttgcaaaggcagctggcgcacattttcagaacggcgatacgctgcttgcgcggattacgccgtgcctcgaaaacggcaagacggcgcaggtcaatgtgcttgcagatggagccgtcggcgaaggctcaaccgagttcatcgtgctctgtggtcacgattcggaggacaatgatttcgtttactacttgtgcagggagccggaatttcgcaagttcgccatctctcggatggaaggcacatcggggcgtcagcgtgtttcgtggcaatccattgcagagtatcccatcgaactgccgtcgcctgacattaggcgtgatgctgccggttttctggcaaccctcgacgaccgcatcgccaacctgcgccagaccaacgccacgctgctagccatcgccgccgggctgttcaagtcccgctttgtggactttgacggtgtgccgccaggggatatgcaggaatcggaactcggattgattcccaaggggtggcgggcggaagaaatcggcaagctcgtgcagtgcgtgggcggcgcaacacccagtaccaaggacgaagtcttttggaatggcggcttacaccactgggccacaccgaaagatttatccggcctacaagcgcccatactgataaccaccgaacgtcgtatcaccgatgcgggcgtagcacgcatcagcagtggcttgttgcccgctggcacgctattgatgtcgtcgcgtgcccccatcggctacctcgccatcgccgccgtgcctgtcgccatcaatcagggcttcatcgccatgctgcccggcggtgccctgtcgccagtgtggctactgttctgggcgcaggtcaacatggaagccatcaagcaaaaggccaacggctcgaccttcatggagatcagcaaggccgcatttcgccccatcaaggttgtgcagccgccgaccgacgcgctggctcagttcgacgaagtggcggcaccaatgctggaacgcatccagaacaacgagcgccacattgccaccctcgcagctatacgtgacgcactgctgccacgccttctctccggccaactgcgggtgccccaatga

SEQ ID NO: 345902 - DNA, 1575 bp, Pseudomonas aeruginosa
atggcacagaacgacaacaacggcggcaacctcggcttcgaagcggagctgttcaaggccgccgacaagctgcgcggcaacatggaacccagtgactacaagcacgttgcactgggcctgatcttcctcaagtacatctctgatgccttcgagtcccgtcatgctgaattgctggcagaggacgccgccgccgccgaggacaaggacgaatacctcgccgacaacatcttctgggtgcccaaggaagcgcgctggtcgcatctgcaagccaacgccaagcaaagcagcatcggcacgctgatcgatgacgccatgcgcgccatcgagaaagacaacgaatcgctgaaaggcgtgctgcccaaagactacgcccgccccgcgctcaacaaggtgatgctgggcgagttgatcgacctgatctccggcatcacgctgaacgagggtaacgacaaatcaaaagacgtactgggtcgcgtctatgaatacttccttggccaatttgcaggtgcggaaggcaagcgcggtggcgagttctacaccccacgttctgtggtacgcacgctggtggaaatgctggagccctataacgggcgcgtgtatgacccatgttgcggtagcggcggcatgttcgtgcagagcgaacggttcgtcaccgaacacggcgggcgcatcggcgacatcgccatttatggccaggaaagcaactacaccacttggcgcctcgccaagatgaacctggccgtgcgtggcatagacagcgacatccgctggaacaacgaaggcagcttccacaaggacgagctgcgcgacctcaaggccgacttcatcctcgccaatcctccgttcaatatctccgactggggcggcgagcgtctgcgtgaagacgtgcgctggcaattcggcactccgcccgtgggcaacgccaactacgcgtggttgcagcacatcttccatcaccttgcaccgcatggcgttgcaggcgtggtgctggccaatggctcgatgagctcgcagcagagcggcgaaggcgagatccgaaaagccatgcttgaagctgctgatggggcaggcgtggtggactgcatggtcgccatgcctggccaattgttctattccacgcagattccggcttgtctatggattttggcgaagggccgcagcaacggtttggtgaagaagaccaagctgcgtgaccggcgtggagaggtgctgttcatcgacgcacgcaagatgggcgtactggtggatcgcacgcggcgtgaactgaccgacgaagaaatttcccgcatcgcggccacataccatgcgtggcgtggtgaaaccgacgcgggtgaatattcggacattcccggcttctgcaaatccgccaccctcgaagaaatccgagaacatgactatgtattggcaccgggtcgctacgtcggcgcggaagcacaggaggataacgacgaagcttttgacgacaagatgcggcgcctgactgcacagttgtccaagcagacggagcgtggcaccgaactggattcactcatccgtgaaaagttggaggcgttgggctatggccaagctgtctga

SEQ ID NO: 345903 - DNA, 297 bp, Pseudomonas aeruginosa
atggtcaacagcgtcgctgatctcattcggaccgcccgcaatgggcgaacccaggcggagttcgccactgttctgggcgtttcgcagtcccagttgagccggtatgagcggggggagtacgacccgcccgccaaggtgatcaatgcctgtatgcgggaggcgcatatcggcaatgggatatcggcgccatcggctgacgacttggcccagagggtacgcacgacgttggccagcccagataaggagcaggcacgctccgccatcgccagcctgttagcggtgcttgctcatgaatag

SEQ ID NO: 345904 - DNA, 864 bp, Pseudomonas aeruginosa
atggacgatctgacctataccctgcgccagctctgcctgcgcaaccgcgacggcagccacgccacccaggccgaccggcaacggtcgctgagcctggccgctcgccaactgcgcgaggccggattccgccagatgcgggccacctcgctcaagggcaagcatgtcgaaaccctgttgcagcgctggcaggccgaaggcctgtcggctggcacgctcaagaaccgcatggcccacctgcgctggtgggcagagaaggtcggcaaggcaggcatcctgccagcggacaacaccaggctgggcatccctgaccgccgctatgtgaccaacgatagcaaggccaaggaactgggcgatgggctggccaggatcaccgatccctacgttcgcatgagcctgcacctacaagcggcctttggcctgcgacgggaggagtccatcaagttccaaccccactatgccgaccgtcgcgaccacatcgccatcaagggatcatgggccaagggtgggcgcgaccggacggtgccgatcacgacgccggaacagcgggcggtgctggacgaagcgcatcggttagcaggtttgggctcgctgatcccagcgaacaagacctacatccagcagcggcacgtctacgacgggcaatgcaaggcagcgggcctgagcaacatgcacgggctgcggcatcgctatgcccaagcgcgctatctggtgctgacaggctggaaggctccggcggcaggcggttcttcgacacaacaactgacacccgcacaacacagccaggaccaggttgcgcgacagacgatcagccgtgaattggggcatgagcgactgcaaatcacgatggtgtacctgggtcgatga

SEQ ID NO: 345905 - DNA, 2673 bp, Pseudomonas aeruginosa
atgagcgagatggattttgagccgctggccgaagagacgctgagcaccttttctgaaattgcagaaaatgcagctcagaaatcggctggtaacgaaggtgtttcagccggaagttttgccagcggtaataccctaactggaggtcaggccttccaaaatctcgagaacatcagtcaatccaatcgtgatgcgattgcagctctgctccgagagccctgtattgcccggctagtgctggaagatgacgtcggtcgtcaacgagttatttatatcgcccggaaaagcggtctgtcgttaaagtccggcaagcagcttgcgagctatcactccccaattgggcggcttgcggagctaccggtaggtgacgaaggcattgtgaccctaaaaggggagcagcatgccttcactctgatcgagaagactagctttattcctcagttcaaagacggcgagtgggactcctctggaaacctataccgccactttgagcagggtacttactcaattgaatccttgcgtgcactgctgcgtgctgaaggcattgatgcaggggacgaattggatcgcttgctcgagcaggctgcagaaaaaagtgggatacaggcgggtattagccaccaaactcgcacagcaatggggctacgcgatcagccgattctggatcagttccagggcgagattttccgtctaccactggatagccagctaattattctaggtcctccaggtacgggtaagaccacgacgttgatcaagcgcttggggcagaagttggatatagacaatctagaggaagccgaacgtcgtattgcttcagcatcaggtcaggtcgtgccgcacgaagccaactggttgatgtttactccttcggaactgctaaagcactacctgaaagaagctttcagccgcgagcaggtacccgcttccgacgcgcgcatcaagacctggacgtcttatcgtagcgatattgctcgcaacagtctgggtatcctgcggactgcaaacagtggcaaatacacactcaaacccgagcttgaaaacctgactgctgcagtgatcgtcgatcctcgggattggtacggcaccttcagtgcttttcatgatcagcgtttgagagcacagctgaaagatggtgcagcgattgctgcagagtctgcaccggttagtgatacaggtattgcccagcagttgctgcaattggctgaaactctggatggtcgcacgtggcccgatgtgtatcgggagcttggcagccgagaagagaatattcgttcagtactggatgattccaaatccattgccgacaagctgcttaaggatgaacgaaaccgcttattcaatgctgacaaggaggtttttaaccgcctgtcgcagttcttggtggggatacagttagacgatgagcctgatgatgaggctgagttcgacgaggacgaagctgaagctatggcccatcaggctgccaatgacatccagaatgcggtgaaggcttatctggcagccatcagagcgcttgcaaggaatcgctatcgcaagcgcagtatgccgaaagattctcgtgcagcacgagttgtcgaatggttaggtgatgcgttgcccgctgagcatgttttgcttgagatcggccagcgcatcagcttccagaatggtttgcgccgtttcgtgaatgcattcaagcgctatgtagcagacgtaccagacagctatcgggcctttcgcaaaggtagagctgacgatgcgcggttctattgtgggtccgtttccaatccatttcatctgtcagccaccgagctggacgcgatcattttgctgatgctgaggaatggcagggctcttttggcacagtctttcattgcgcgtgagctggatacccctcgtttcgaatccctgaataggttagccagcctgttcaggaatcagattatggtggatgaagccaccgacttctccgtgctgcagttagcttgcatggagagtctgacgtccctaaaaagccgctctttctttgcctgcggggacttcaatcaacgaatcactcatgttggcgtgcgctctatggagcaggttgaatgggtgtcaccgcatatttcaaatcgtgcgatcaccctcgtctaccgacaaagccgcattctcaacatgttttcgggggagctattactattactggatggtgacctgggggctcagggggaactgccgaaagagagcacgcacgaaggctttaagccgactctgctcgaaggtgcagatgaggatggagcggccaggtggattgcgcagcgtataactgaggtggagcgggcagtcaaacaaatgcctactatcgcggtgctggtcaacgctgaagaggacgtcaaacctatggcagagctgctcacgggctatctagaatccgtgagtctaaaagcggtggcctgcgaagaaggcaaagctctgggggaagggggagatgtccgagtttttgacattcagcacatcaaggggctcgagttcgaggctgtgttctttgctggcgttgaccgccttgcagagcagaagccagagttgtttgatcgctatttgtatgtcggtgcgacccgtgcggcgacctaccttggcatggtttgctatcaggagctcccaggcaaattgaaggggctacgttcaaaatttgcggacaactggcaggtatag

SEQ ID NO: 345906 - DNA, 459 bp, Pseudomonas aeruginosa
atgaccgaccacgcagagctgcggagggtggctgcgctggctcatccagacgccgaatggttcatcgcgcgaaaccttgaccacccgaatatcgacaagccggcagcgtcattcatcgccaccgccacccccaagaccgtcctcgccctgctggacgagatcgacaggctcaaggcggagaacgacaggctgcgtcaaggcatgaaaggcgactacgacattgacgcatggcttgactggtcgaaagagaaagagcggatcaaggcagagaacgatgcgctgcggggatcgctacaggccgttcaagctgaggtcgacgggaatctccgcccacttacccgcgacctcgtgaacatggtcagcggattaaagaacggcagccacccgaatgacatctacgaacactgcgacgagatcgaaaggatcatcggagcagccctggaaggaggcgtgagatga

SEQ ID NO: 345907 - DNA, 279 bp, Pseudomonas aeruginosa
gtgcctgacatgagagaagagtttgaagcgtggctactgcgcgagcatggccttgagtcggaatggcaggatgagcgcaactgcttcaaggactacccagcgcaccttgcgttcaaggcctggaaagccagccgcgcggctctgagggtggagttgccggataaggcggagttcgtggagtactacgaagacctagagggcgggacattcaactggcagcgatacatggtcgccattcaagaagccctccagcaagccggaatcgaggtgaagccatga

SEQ ID NO: 345908 - DNA, 1407 bp, Pseudomonas aeruginosa
atgagcgatacgctactttgctggcatgcggaacgaaccggtctggtggtactggaaggcgcgctcggcaagtttgccgagcttggcgtccggatcagccgggtcatttatctggtccatacgcacagcgctgccgacatcccgcgcagcatcgacggtgcgcacatcgaatcgatcaggatcgaactgcctgaccctactcagcaccaggccatccatgactcgatccagcgccaggtactacccaagttgaagcacgtcgaaggttgtctgcacctgaacctctcgccgggtactcctgcgatgcacagcgtctggttgattctgcatgccggcggggcatttgcacccggcacgcgcttatggtcatcccaacccggccggcttgatgccgtgcaatttgaggtcagcacctacctcgcagaggtacgtcggcaacagcggttgaagccgagcgtgccatcctacgatccagaagcacgttcgacagcacggcgcgaggcaatgaattgcctgttccgctatgcccgggtggcaggggctccgttgctgatactgggagagcgcggcactggcaagagccgtcttgtggaaacccaggtggcaacgctcaagcagcgacagggcaaagtagtcaccctcgcctgtggcggcctggaatcgagcctggcggaaagcatgttgtttggccacatcaagggcgcctttactggcgctgcgcaagcgcgcgatggcctgctcgcgcaggccagtggcggcattctgtttcttgatgaaatccaagatctaccacggcccgtgcagcgccagctggtgagggtgttccaagatcgtcagcgacgctaccgccccatcggcagtgacaatgagatcagcgtcgacttcgaactggtctgtgcctcgaacctgtctatgacccaactgcgcgagcggttggacgaggacctgtgtgatcgcctgagccacctttgcgtgtcgctgcccgccttacgcgaatgccgcgaagaccttcaggaagattggcaacgagtctgggcagattgccgcgttgacgtaaggcttccagcggtcgccccttggtcgcaggcactgcaaaagcggctggcggaacaccctctgactggcaatctgcgtgatttacaacgcttggcggcactctgcatggcctggttcgaacctggcaatccgacccactggctggacacagcgcttcaacagtggtcccttgccgaccaaagcccgccaacgcccgagccggttcggacaggcagccgtgaggaacaaaccaggcggtttcaggcggagctggcactacaaaccaaagccactaaaggaagttggaaggccgccgcgaaagcattaggctgcagcgtaaaaacgctgcagcgcgataccgagggatactga

SEQ ID NO: 345909 - DNA, 1509 bp, Pseudomonas aeruginosa
atgaacaccaagatgaccaacccctgggtacgcacccacaccgaagtgctcgaccaacgtgccttacccatgcctgcagcatggcaaggggcccgggcgcagcgcctgccaacctcggagataggccactcgatccacgtttccggcaaccagggcgcattgcgcgcagaactgatcgcactgctggatcaggcagtggacatggccgtgatctgcagcttcctgatcgcagaccccgtcttcgaggcagcgctgaaggccaccgccgagcgtggcgtacgagtgtatgtgatggtggcctcggaagcgcgcctgggcagggaaccgaacctgggcgagttcgaccagaagactcacgcgcaccacaaggcgatgctcaaggcattgggcaagtccgtgcttttccgtacggctgcgcactttcacgccaaggtcgtcctgatcgacccctacactcggccggccggcatcctgctcaccgccaacctcacggagggcgccctcacgcgcaacgaagaactcgcagtgcgcctgagtccgacacaagccgagggcatcgccgggtacctgcgctgggctatgtggcaaacggcggagcatgaattgctcgacggccacgacttcaaggctgccaaacccgtcaagggcgtgcagcacccagtaccccaggccggcatccgcgccaccacggccgagcacaaaggcatcgctgaacatctgctgtatgcgttgaacaacgccccaacccagatcatcatcagcagcttcggctgggacctgcgacatccggtggtcgaactactgtgccagcgcgcccgtgaagggctgaaggtgacggtgctagcacggatacgcccgtcggccatgccagcgctgttggcactcgccgaaagcggtgcgcaggttcacggtttcaagtggttgcatgccaaggcactgtggaccgatgccggagacgccatggtgatgtcggcaaacctggagccgcacggactggacgatagcttcgagcttggcgcgctgctggatgcgcaccagtccgaagagctcaagcagcgcctgctgcactggcaggccgtcgcgccctggcggttgttgccagctcccgtgctgggggacctcagtggggaggtgcaactgtggcgcaacggtcggctggaccagatacagatcgtgaccgtcgctgaagtcaatctgggcgaggtagttgccgagtccgcccatcgcctggaggcgccccgcccggaagtatccaagcctgagccagctcaccagttgaaatgcagctggacagtcaccgccccttacagcaacccgaaggccaaccctcacatgcgccccgcgcaaggcaaggaaaaacctcgcccatacacccccaacgtactgcgcgaaccaagcgggcgcctcacggtagcgatcagccaaccaagcgagctggactccgccgtccaactgctcggtgaaatcggtgctgccgccgtagtcatcgacagcaggtcacgccaatga

SEQ ID NO: 345910 - DNA, 1140 bp, Pseudomonas aeruginosa
atgaaaaacactgacgccgaacgcggcgatatcgtcctgagccgtcaggtgagcattttctgctggcacgtgatcggtgaggtggcgcgggccacccagcgcccggagttgctgccgctgctgcaacgggctggcgtgagggaggccatcgacgcccacgacatcgccgtgcacctgctctgcgagccctcccgccaggctgcggcccagcgcctgctggacatcgcctgcggactagggttgctgcaaccgttgccggagcccggcgcacagagccccaggcgtcgcagctacagcctgaccgaactcggccaggacgccttgcaacgccagcaagtgttcgtgcctgagtacgcctgctggcggctatgggccagtgatgaccccttgttggagtgcccggtgctgctggtcgaaccgttcgaggagccccgtgccaggcaggatgtctatagcaaagagcccccagcccacgagaaaatcccggcttggctgaaccaggccctgcgtaagaccatcacgcccccaggcaacaaggaagcgctgcgcatcgagcttctggaaaagaacctgcagccgcagaagaccgaggcgacgctagttgccacctgggacgtcgaccagagctgtttgcagttgcacggcaatctcggtgggacgcccatcgataccccctccgatgcgccgcaactgagcgcacaagccgtctggcaggggctgctgcagtcggccgggatgctggacgactgggatgatcaggcgcgggcattgaaaaggtctttcgacagcagctcggatgccgagcgcaacagcctgcgtggcgacctgcgcgtacccgcgccggagcttgccgagctaggtagtttcgatgacctgcgcatcgcccgcgtggcactgactccgcgctcgcacgacgatgcccagcgctgggcacgatggcgcctgctggagcacgtcaatcactatgccagcagcgaacgcttcaacacctggactgtgcaggcctacgcccccttcctcagcttcgagctgagcgccccccggcgcaaggatcttgccgagcagacctggcagcgacgagaaaacagccgcgccaccaccctctggcacctggttgccgctgaagattggggactgtga

SEQ ID NO: 345911 - DNA, 2544 bp, Pseudomonas aeruginosa
atggctttgctctactaccaaaaccttcaacaccaccgccccgacgttctcatgcgccgggtttttcatggcttcaaagacttcaacgagttccttcaggtctctgagaagcatctcagcagcgaccacgccgtcaagcggctgggctgggcggccgccttccggccggagggcctcgacgataaccccgcaggcttctggatcagcctggagccgcccgaagaccggcccagcgaaccggaagcgaccttccgcgcgtttctcgacgaagacgcgcgtgaggtctacgaatctgctgcgcccgatcgcctgggtgcgcagttcaggttcaatcgccagcgttccctgcgcatcctcgaccgcgaccccgccggccagcggctgctgctggagcgccaacctagcgagagccagttgttgctgcgccccaacaccaatacgctccggcgccagcaggaagccatcgcttgcctgcaggacaccccttcggtcgagcaccgtccattgctgcgcctgctggagagccacgaccatgctcgctggccagaactggctgcccccgccctggcgggcgacgcctggaagctgctgctggaccttgagcgccccggtaccgacgagcagcgccgcttcgtcgaacaggccttgcacaccactgacttcatgttgctggaaggcccgccaggctctggtaaaaccaccgcaatctgcgagctgatcctgcagatggccgaacagggcaagcgagtactgttgtgcgcttcgacccacgtggccgtcgacaatgtcctggaaaagctcatggacgcccgcaaccgccatcgcgaccagatcattcccatccgtatcggcgatacccgcaacgtttccgaaaaagcccgcaaatggcagctggagacttttcgcacaaccgagcgcaagcgcttgcaagcggcactgagccgtcaacaaaacccgagccaggcgcaacggacactgctcgatgcgctgcgccaggatgatcacatgatcactgaactggtcctgagcaccgccaacctgacctgcggcaccaccacaggcatcctgcagcacccggacctcaagcgccggcgcagcaaccaccctccgtacgacatgctgattctcgacgaggcttccaagaccacgttccacgaatttctcgtccccgccgtactggcaaagcgctgggtcatcgtcggcgatccgttgcagctcgcacctttcgtggatgaacaggccatggcagcgaaccttgacgcctgcctgcctaaggcatggctgcgcaacgcctgcgtcgatgcgttcatggcccgccataaagggcgtagctgcgtgatcgccaaccccgacgcacaggcgcgccaggcctatgtggctcaagccaactcgttgggggtaaagcttgcccaggcggaggagcccgcctcactggaggatgcctggatcgtactgggggcaggcgaaaccctcggcgcgcgcctggatgagctgccgttggataccacccttgtgcgcggccaagccccagccatgctcgagcgccgtgcggcggcggcccgccggcgggccccgcgcctgagtgccgcagagcccgtgccagactggagcatggaggttgcgtggcgcatcaatgccgagtacgagcaacgccacaccaaccagcaagacagctcagaacaggcgcgcatagctcgccagatcgaggccttgatgccggtcgagggttcgggagcgtcacccgatcctgtgagcaggaacgtcgatcgggtacgcaaggtggccctaccctcgatcctcgaatccctgcaggaaggttttggccgcaaccggcaagcgcgaaacggcaacgcgctgagcgatggcctgcccgaggcggtccgggcttcacggcaggtgcggctgagtcatcagcaccgcatgcaccccgatatcgcggagttttcgcaccagcatatctatcagggccaggcgctgctcagcccggtgcggataaccgccgagcggacctggaactacgaccggcatcccgccacctggcgccatgtcaaggcacgccccgacggccaaccgaacagcaatctggccgaggtcgaagaggtcatcgcagaactcaagcgcttcgagcgttgggctggtaaaaaccgcagggatgatggccatccctgggaggtcgcggtgctcacctattaccgcgggcaggagcgggcattgcgcaacgcgctacgcaagtggtctgccaacggccatgcccagcgccatttcgccaagggcccgaaaggcagcccgttcatcaccctggacctatgcaccgtcgatcgcttccaagggcacgaagccgacctggtgctgctgtcgctggtacgcaatcacatgacccccttcctgcgcagcccgaaccgcctgaatgtcgccctgaccagggcgcgctactgccggatcatcgtgggtgatcgccatgccctgggtaaagccaaggacagcctgctcggcaaactcgccgctgaaaagacctgggagacctcgctgcatgaaaaacactga

SEQ ID NO: 345912 - DNA, 1272 bp, Pseudomonas aeruginosa
atggtggctaaaagctataccctgtggcacctgcgcgaagaggacaaggagcgagacagggtgtcgaaccgtagccaactggggtgggtggacttttctaacgaagaccgtgatcgggtcaagcatgcgctcagtcagcttgcgcagcccggcacactggacgaattgggcatcggcggcttgcgcgatgcgttcgccgacttgatgttccccgggttctccaccctgcagacccgggccaagtatttcatcagcgtgccgcggattattcgcgactacttgcagctcagttgtgtgcgccagcgcaagcagccattcgctcactacctggaagaacaggaggcgcatctttctgaattgctcagggagcgccatcgtgactctgggcagaccggtatatccgggttttccctgcaaaaaggcgaacgggtatccaggcagccctcgtccatttactgggtcggcttgcgcacctggaagctgatcgatactcaagggtcgctgcgccagttcgcgcaggccatcggctcggcagaagagccctgggccggtcagccggaagaggtgggggatgacagcgacgtccacagcccgtcgcggctcgttcacctggatcgctatgagccggactggcttgccagcgtcagcatcgaactgaccgagtcggaggcgcgcttcttgagtgaaaaactcaaggcagggcccgaatacaacctcgccaccgagcttgagcgatccggtctgcgcgagcaggcgctggttaagggagggggcgggttccctgcgctggcagcctgggtgggcggccaggcgcagctgcctcgccagacccgcgacaatgtggccatggcgcaggcgttcagtgagctgatttatggtgcccatctgcgcttgaacatcctgctggtacgaaacggcgccgaataccgggccttgctgaacagctacagcgatgactgggacgcctggcgttcgcagatccatgcccagccgcaggagattgggcaatggctggcgcacacccaggttttgctacccgatcacaccagggcatttctcgataactgggcgcgggggattgccagcaatgcccgggaggctgagctggacagattgatcgaaacgcaagccagggccaacaagaaccagcgcagcatcctcaacaggcgcctgcccgaagacttcaaatggcatggcatggcgcggctggactaccgctgggcacaggtgcgcaacgtactgcgcgatattcaggagggcttggcatgctga

SEQ ID NO: 345913 - DNA, 1776 bp, Pseudomonas aeruginosa
atgctgaatccgcatgctgaccgcatcgactacggcgacaagctcgctgcgcctgaaggttttaccttgagccacgcggtggcaacgacctactcgctggatctcgagaccttgctttgccttccactggcgctgtcgttcagttgcacgcccgaaggcgacctgaaggccgacaagctggcgctgctcgaggcgatcagccagctcaagggcaagattaaggtgttcttccagcaaggctgcatcaagctgcctcgccagttcaacctgcttttttcgctgctcgaacccttgttggtgccccaggtaccagcgcaagcctttagtgcgttccaccccaagctgtggttgctgcgcttcatcgatcagggcaagagggtgcgttaccggttattggttatgtcacgaaacatgaccttcgaccgcagctgggacctggcagtggcgctggagggcgagctggctggtgcccgcagtgacgacaaccaagggctggtggcgctgctcaaggcattgatgcctggcgccgaggactttcgcagcgagctggcgttgctggccaaggagctggcgcgggtcacctgggacaggccggatggcttcagtgccttgggcaccttgcccgtgcagcccgggcagtcgcccctgctgtcatgcccgaacgctgacaccgtgatggtgatgtctccgtttctgcatgccgatgccctcgagcagcttggacagggccgcgcgcgtcgttggctattcagccgtgcacaggagctcgaccagctgggccaggagcggttgcaaggctgggagtgcttcgcgctcaaccccagactgatcgacgcagaagatgaactcagccacgcccgtgcgcaggatctgcacgccaagatggtactgctgcaggaggggccggtcagccactggcatgtgggctcggccaatgccacccgggcagcactgggtggcatcgatgcgcagccacgcaataccgagttcatgctgtgcctgtcgagcagcagtgcccggcaatcggcgcagcaactgcgtgccgaactgttgggtagcgagcaggaacccaatggggtctttgtgccccacggctttggtgcattgtcgttggagcccgagcaactagccggagcctgtctgcgcaggctgttgtaccggttgatcaaggccgactggtgcatgcgtgcggtagccgacgccaatggcacctacacctgcttcatcgagtgcccgccagaggtactggaagccgagggcaactgggtgatcgaggcgcagccgctggtcagtgggcagccccaggtgctagccccgcgcctgatgtgggagggcatggagctcgcccaggtcagcgctttcctgatactgcgggtgctcaccggggccgaggtggcgagtgaacagatgatcaagctgcgcttggagatcgacggtggcgacaatcgcgagcagcacatcaccaccaccctgatcgacagtccgcacaagctgctggcctaccttcacaggctgctcagccccacgcatgcccaccagttcgacacccgcgcgagggatggagcaggcaacggcagcgatgctgactcgctcatcggccagatgcttggcggcccgctgcatgaagcgctgctgcggtgtgctgctcgccagccgcaaaagctgcaacgcatcgacgatattctggcgaagctggccgacaccgagaacctgatccccccggagcttcacagtttgtgggcacagtaccaggcgttttctaggagcaaagcatga

SEQ ID NO: 345914 - DNA, 3171 bp, Pseudomonas aeruginosa
atgactgggtgtgtaacggatcgcgaaagcatcgagctggccctgcagcgcacctggtgcaaactcaaggattttcagcgcgccacggtcgagcgcatcagtgcgcagttcaatgacccgcaacatggcgggcgggtgctggtggccgatgaggtagggctgggcaagacgatcgtcgcaaagggcctgatcgtgtcgatgttgcgtgactggcgcaagcgcgagcccatgcgggtcacctatatctgttccaacctgagcctagccgccgagaaccttaccaagctggcggtatttcccagcaatagtggctgggttcgtcagccttcctatgaacgcctggcccacgtcgccctctgtcagcccgagcacgaagatgcggtgctggaaatatgcacgctcactccggccacgtcgtttgcgttgaccaagggcactggcaatcggcgtgaacggggcatcatcctggcggcgttgctgcgccacccgcagctgaaaggctcgcgtcgcagcttgacggcgctgtttcaggacagggtacaggatgccaaggggtgggaggatgagctgcgccagattgagcgacaaggcttgatcgagccgatcgtggacgccttccttgcgcagatcgactgcgcgcagccagacaaggggcagagcctgctggagcagttgcgcagcgttgccggcctgcgtgcccagcgccaccgcgccagcaagcgcgaggtgatgcgcacgctgcgagtgctgtttgcgcagtgctgcgccacccagctgcgtgccgacctgttcatcctcgacgagtttcagcgttttgaaagcttgctggatcaagccgaggacaacgagcagtcgctgatcgctcgggagatcttcagtcgggagcgcgagtgcaaggtgctgctgctctcggctacacccttcaaggccatgagcacggtggcggaagacgagaacgatgacagccatttgagcaaactgatgcagattctgacgtttctgagcctgtcaccgctgccggagtatgagccggcgcgcaaggcgttgcaggccgagctgctgcgcctgggcgccgacagcgtcaacgccagggccctggatgacgcgtccaggcgagcggtggagcgcctgttgcgcccgctgatctgccgcacggaacgcggccagatagcgcaggatgtcgatggcctgatcgatgcgcatcctgctcgacccgggcctgaactgcgggctgacgatatccgtgcctacgtggcactcgaccagctcgccgtactgctcgaaaacgacagcgcgcgacagctggccagccagctcatgcgctttttcaaatcggcggcctggccgttgtcgttcagtaccggctacaacatccagcagctgttgcagcgccattaccagcgctcgccgcaagcgctcaagcgcatcaacgccaacaagcagctctggctgccccgcgagcgggtgcacaagttcacgctcgacgttgcccgtgaagcacccaacccccaggttcgctggctgacaacccatctgttcgcacaggggtgcaaggccggcccggagatgctgctgtggctgccgcccagctggccgcactatccgctcgagggctttttcgcaggccatgaacaattcagcaaaacgctgttgttctcgtcttgggccatggtgccgcggatggtcagcggcctggtcagctacgaagcggagcggcgggtgcagcagcacctcaccgataaaaccgagtatttcagcaggcgccgcgcggggttgagccaggacgcgcaagacacccatgcccagcagaggcgcgcggtgatcaagctcgacagtggcgacctggctaactggtcattgatctaccccgcgcgctgcctgatcgacatacctgtccagcgctcgtcagccaccctgaagcagcggatcgatgaactgacccggcacttcaaacaacagctggcgccgttcaagcgcaggtacaggggagggcacaaaagccattactggtatctgttcgcgccgatgttgctggaccaggttcatggacgttggacgagcgattggctcgaagccctgtcgagcctggtgcccgggggcgtgcaacagcgtgcgggtgaagttaccgatcacttggacaagctggacgagctaggtgccatgccggccgacctggcggagcaccttgccaggctggcgctagggtcgccggcggtctgcgcgcaccgcgccctcaagcagtactacccacagcagggctgcttgcaagggcctgcaagccgggtggcgctggggttcgttagcctgttcaacggggtggccggcagtgcgatcgctagacggctggacgccgagcacccgtggcgcggcattgtccgatactgcgccgatggcggtatccaggctatgctggaggagtacatctatctgctggcccccgaccgctcacttgacggcgtcgtgtcgaccctggaaaacgtgctgcgtacctcgccgtcgagcgtgaaggtatggaagctcgaccgcgaccaggacgacacccacctgcgctgccattacgcggtgccgctaggcgcgcagaagtctacggacgatgccggccaggttcgcattgtcagcattcgggaaagcttcaactcgccgtttcgcccctttgtcctggcatcgacttccatcggccaggaggggttggactttcactggtactgcagtgaggtggtgcactggaacctgcccagcaaccccattgatctggaacaacgtgaaggacgggttaatcgctatcagtcactggtggtcaggcggcgggtggtacaggcagtgaccggggccgaaacgccttcgacaaattgggagtcgttatttaaggctgctgagagccctgcttggggaaccgatcttgtgccgtattggcactatccgcagggcgacgcgaagattcgtcgcttgattccaagcctagcctttagcgaggaggctcggcggtatcctaatatgcagaagatactatctctctatcgcctggcatttggccagcccgggcaaagcgagttgctcgagcatctgaaaagcttggatcttgatagcgatgcattggcctatctgaaacgtcagttgatgatccggttggcgccggttttgtaccagccggagctatcggaactctcatag

SEQ ID NO: 345915 - DNA, 669 bp, Pseudomonas aeruginosa
  misc_feature (51)..(51): n is a, c, g, or t
ttgcgcctgctcgacggctatcgcggctacctgatgaccgacgactatgcnggctacaatgccgtggccgcgcaagaaggcatcgaacgcctcggctgctgggcgcatgcgcggcgcaagttcgtcgaagcgcagaaagtgcaacccaagggcaaaaccggccgtgccgacatggcgctgaacctgatcaataggctctacggcatcgagcgtgacctgaaggacgcctgcgataccgagcgcctggtcgcccgtcagcaacgcagccagccgctgctcgaccagctcaaggcttggctggacaaaacccagccgcaggtcgccgggcagacggcgctgggcagggcggtgaattacctagccagcaactggagaaagctggtgcgctacgtcgaaggtggacatctaccgatcgacaacaaccgtgccgagaacgcaatccgccccttcgtcatcgggcgcaagaactggctgttcagcgacacgcccaagggggccacggccagcgcgcagatctacagcctgatcgaaaccgccaaggccaatggccaggagccttacgcctggctgcgccacatcctcgaacgcctgccaacagcacagaacgttgaggactacgaagcgctgctgccttggaactgctcgccggcttctgctcctgcttcctga

SEQ ID NO: 345916 - DNA, 159 bp, Pseudomonas aeruginosa
atggagcgcttacgcatcgaccgcattgactgctccaagggctacgtgcccggcaacgtgcgggcggtctgctgggctttcaatcagatgcgcggcgacttccccgacgaggtcatcgtgacgctagccaaggcgctgatcaacaccatcggcgcgtga

SEQ ID NO: 345917 - DNA, 309 bp, Pseudomonas aeruginosa
atgagcgcctcaatcaccatgctccgccagggtattcgggcagagcgcgacctgacctcgcacctctggacgatcctcaacgaaatgcggctacaaaggcaactgcccgagtgggccgagcgcgccatcgatggcaccacgcaacagtcagacgaaatcagcgcacatcgcaagcaggtcgacagggttctattcgagctggtccccgggctccgcgaggatgtcgaaaggactgatcgcgagagctacctcgaatggaaagcccgtgagcgcgaggttaaggacgcgctgggaggtggtcatgtctga

SEQ ID NO: 345918 - DNA, 186 bp, Pseudomonas aeruginosa
atgaagctcagagcaacgctgaaaactgaagttggcctcgagggagacggggtcctcattgttcaagaggacagtaatggcgagcagcagtacgtcgaactgtctgcgcgccaggcgcttcttgtgggagaggaactcctgcgcctcgcacgtgagcttgaagagggaagtgatgtcatttcctga

SEQ ID NO: 345919 - DNA, 450 bp, Pseudomonas aeruginosa
gtgacctggcggtcatggttggtggtcgctctggtagccgcgcttgtgttctggcgtatggatcacctggcacaggatcgcgaagctgagcaacgccgcgccgaagctgctgagaccgagcgtgaccgcaaccagcaactgattgacctacaggccggcgtcctcgctgaacagcaacgccaactcggccgcgtcgccgagatcgaacggcaaacccgccagctcggccaagccctggaggtccagggcgcgcgccatgctgcggcgttacgggagttgaaagagaatgaccaggctgttcgcgactggctgcgtgctggcatccctgctggccttggctggatgtacgcccgccccgaaaccactgaccccagcgcctaccgcgcagcagaccaagtgcccgctgacgccgtgtcggctccccggccgtccgccgctagcgaacggtga

SEQ ID NO: 345920 - DNA, 381 bp, Pseudomonas aeruginosa; identical to SEQ ID NO: 321248

SEQ ID NO: 345921 - DNA, 366 bp, Pseudomonas aeruginosa
atgttctttattttgccagtgaggcagaatcgcccctcccaaccgaacgacatccacgccctgatgaaattgctcaacacctacgaggaccgagacgaggccgaagcagccgctgaaaggctcagaggagaaaagcgtcttgccagcgaacgcgatgccactgtggtcatctacaacctgttcggcattcccagctggggcaatttccatcgcctcggcatgtacaaccttcgagaattgagaagcctgctggatcgccgtgagacctggcaacccaccgatcaagcaaaacacgcggagatcatcgctacgctggaaatcgtcgccaagaactacggagccgaaatccctgctcactggcagtag

SEQ ID NO: 345922 - DNA, 2082 bp, Pseudomonas aeruginosa
atggaatttcgcatcgccgacaccttcactacaagccttactcgcttgaccggtgacgagcagaaagcagtcaagactactgcattcgacttgcaggtggatcctgccggcaacggcatgagcttccataagctcgataaggctaaggatcagaatttctggtcggtgcgagtaagccgcgacattcggctaatcgttcataagaccgctggcagcttgttgctctgctatgtcgatcatcacgacaaggcctatcagtgggccgagcgtcgtaagttggaaacccaccccactaccggcgcagcacaactggtggaaatccgcgaacttgtgcgggaaatttctgttcccagatatgtggagacggccaagcctgcgtcgggggtactgtttggtagatacagcgacgagcaactcctggcttacggtataccgccggaatggctgatggacgtgcgtgcggcggatgaaaacagtctgttgcagttggtggatcatttgcctggcgaggcggcagaagctttgctcgagctggccactggcggcatgcctgccgcgtcgaaaccagcgggcaataccgaagacccgttccggcacccggacgcgcagcgtcgtttccgggttatgtctgacatggacgaactggcacgtgcgcttgaatatccatgggataagtggacggtattcctgcatccgggccagcggcatatggttgagcgcgattataacggccccgcgcgtgtttccggctccgccggcaccggcaagactgtcgtggccttgcatcgagcggtgcaactcgcccgcaaagacgaggatgcgcgcatcctgctttccacattttcggacaccttggccaacgtgctgcgatccaatctatttcggttggtctacaacacgccaaagctggctgagcgcatcgatgtggccgcgatggatgctgttggggtcaagctctattcggctgaatttggtaagccgatatttgccggccgagaggaagtttcgtcgatactgcgctctgctgctaagggtgttgatggactaaaggccagcgcggcctttctgctgtccgaatgggacgacgtggtggacacttggcagatcgaaagctgggaggcgtaccgggatgccaaacgactgggccgcaagacccgcctgccggagacacagcgcgctttgtattggcaggcattcgccaaggtgaaggagctattgcgccaggccgggaagattaccaaagccgaaatgtttggcaggctggctgaggtcatgccaaagcgcaagcacccggtattcgactacatcgtcgtcgacgaggcccaggacattggcgtgcagcaaatgcgcttccttgcttctgtagcaggcgagaagtccaatgcgttgttctttgctggcgaccttggccagcgcatcttccagcagccgttttcgtggagatcgctgggggtcgatgttcgtggccggtcacgcacgctgaacatcaattatcgaacttcgcaccagattcgttcgcgggctgacttgcttctcggcccggaagtgtccgatgtggacggtaacgtagaaaaccgtaagggcacgatttccgttttcaatggaccggagccagtcattcgtagctttggcgaccccgatctggaaagccaggctgtcgggcaatggctgagagagtgcagtgctagcggcgtgctgccgcatgaaattggagtcttcgttcgctcggaggaagagcttccgcgtgcgctagccgctattactaaatctggtctacaggctcgcgtgcttggtaaggaaatggctaccgaagagggcttcgtcagcatcaccactatgcatttggccaagggtatggagttccgcttggtggcagttatggcctgtgacgatgaaatcatcccctctcagacccgcatagacggagcctccgatgagtccgagttgactgaaatctataatactgagcgtcagttactgtatgtggcctgcacccgtgcccgcgacttgctctatgtttccgcagttgagccagagtcggagttcttgcaggacttggtacaaaaaatgggacatcgttag

SEQ ID NO: 345923 - DNA, 3072 bp, Pseudomonas aeruginosa
atgagcgaccagtttttcgcacaacccatactcaactccccctacgagtatcccgctcaacactgggagctggatgctaccgggcagccgactcagcagatcgcccagagccgtcgtcgggccgacttcatcactccgatcccaaggccgcgtaaggctcaaggctcgcaagcaagcttggtcttcgatgaaggcaagggtctgtccacggatgcacagtcctatgatcatacggccattatcaacgccgtacggaatgaggtagatgcttggcgtcgtctaccgcccagccagtggcgtgtcaccccggaaaccacccgcttgttggagcactggcgtaaccacaaattcacaggtgtacgtccgttcttctgccaagttgaagctgccgaaacggcgatctggctgactgaggttgccccgaaattggggaagaatggcgaacgtttcctcgaccatctcaagaaggccagcaacgacgctaatcccgatcttatgcgcttggctctcaagctcgccactggcgcgggtaagaccacagtgatggccatgctcatcgcctggcaaacagtcaatgctgtccgccgcccacaaagcaaaaaatttacccgtggtttcttactagtcgcccccggcttgaccatcaaggatcgcctgcgcgtgctgctgcccaacgatgcggacagttattacgctagtcgcgagattgtgccacgcgacatgctgcccgatttggacaaggcaaaaatcgtcatcaccaactaccacgccttcaagctgcgcgagcgtatggagctatccaagggggggcgtcgactgctacagggccgttctggcgcgagtctagaaacgctggaaaccgagggccaaatgttacagagggtgatgcctgaattgatgggtatgaagaatatcttggccatcaacgacgaagcacatcattgctaccgtgaaaagtcggcagaggacagcgacgaagatattgccgccgaagaaagggcagaggctgaggagaacaacgaggctgcacggttgtggatttccggccttgaggcggtgaatcgcaagctcggcctgcaacaggtaattgatctgtcggccacaccgttctttctcgccggctctggctatgttgaaggcacgctgtttccatggacgatgagcgatttctctctgatggacgccatcgaatgcggtatcgtcaaattgccgcgtgtaccggtagctgacaacatccccggtgctgagatgcccatctatcgcgagctgtggaagcacatcggcaagaagatgccgaagaaagggcgcggcaagaatgcccatctcgatccgctggccattccggtggaattgcagaccgcgctggaagcactgtacggccattacgtcaaaacctacgatgcctggaaacaggccggcgtccaagtgccgccgtgtttcatagttgtgtgcaacaacaccgctacgtccaaattggtgttcgattacatctccggtttcgatcgcgtcaatgacaatggtacgaccactcaggtaccagggcggttggcgttgtttcgcaaccatgatgagcatggcaacgcgctggcgcggcccaacaccttgctgatagatagcgagcagcttgaatccggtgaggcgctggacgataacttccgcagcatggctaacgatgaaatcgagcgattcaagcgtgagattatcgagcgcactggcgaccgacagcaggccgagagcctcagtgacagcgaattgttgcgcgaggtgatgaacactgtcggcaagcaaggccgtctcggggaacagattcgctgcgtggtgtcggtttccatgcttaccgagggctgggacgcgaataccgtcacccatatcctcggcgtgcgtgcttttggcacccagttgctgtgcgaacaggtgattggccgcgccctgcgccgccagtcctatgagttgaacgaacatggcctgttcgatgtggaatacgcggatgtgtttggcattcccttcgacttcaccgccaagccggtgattccgtcgccgccgaagccgcgtgaaagcattacggtcaaagcgcttagcccggagcgcgaccacctggaaatcgcgttcccccgagtgcagggctatcgcatcgaattgccggaagagcaactggaagccgagttcaaccttgaccaccatctgagtctgacaccggatatggttggtgcgacaaggacgcacaatgccggcatcatcggcgagtctgtagagttggacatccagcatttgggcgacgtgcgccaatcaacgcttctgatggaactgaccaagcacttgctgttccagcattggcgtgagccgggtgaggacgcgcctatcaacttgtttggtcagctcaagcgcattacccgccagtggctggacaactgtctggagtgcaagggcggtacttacccggcgcagctgatgtatcgcgagttggctgacatggcctgccatcgcatcaccaagggcatcactaacaaggaactagagaaaggtcgtcaagttaaggcgatcctcgatccgttcaacccgaccggcagcactgcgcacgtacgtttcaacacctcgcgcgacacccgctgggaaactctcggcccgccgccgaagaaccacgtcaactgggtgatgctggacagtggttgggaggcagaattttgccgcatcgctgaatcgcatcccaaggtggtggcttataccaagaaccataatctgggcctagaagtgccgtaccgcttcggctcgcataaccgcatttatgtcccggacttcatcgtcaaggtggatgacgggcacggaccggatgatctgctgagcctgatcgtggaaattaagggctaccggcgtgaggatgcgaaagagaagaagtccaccatggacacctactggattcccggcgtgaaccatcttggctcacatggccgctggaagtttgtggagttcggggatgtgtacgaaatgcaggaagacttcgccaagaagctcgagatgcagttcaacgagatgatcgaagcggctgcatctgcgccgggtaacaaggaatactga

SEQ ID NO: 345924 - DNA, 903 bp, Pseudomonas aeruginosa
atgtttgacagcgctgtatctgccggggttgctaatgtgggttcagtggttctgaaggatgatgggtttctggagttctataacgaattcgatagaaatctagatgatcttcaagcggcacttaagaagaccaagcaaaccaaagcactagctgagtcgctcaagtcgcgtggcacctttaagaatttcatgggtggattcactgggcgtaacgataaagagcttgcagagatgataggggaccttggcgctagcatggaggttacccaagttatcctgcaaatggttatgcaagttaataatactaagaatggatatttgcggcaatttcatcaggcgctggttgagaaaataaccagcctgacaagtgacacaaaaaccctcgattcaaaccaggaggctaccttggcggtggtttctgggctgtgtgatcaggtggtgtcgcaaatcgaacagcaagaaatggttgaacagcatcagaaaaagcttcaggagctagatggatttgtttccttgaaggactcgcttgatgctttgcagagcgaaaaaattcagcagcttgaattgcgggccctggagattattcgcgtagatgatgagcagcagcgtctcattgaggagttgaagagagctaatgctaacaaagatgagttggatcaaatacagacccagcggattgatttgttaatgaccgaggtggccaggttagagctggcgttcgctcggcaggagaaaacatctcagttgcttgaggggcagcaaggtatattgattgatcaagttaaatctctagagttggagagggctagatttaattctcttcaggcgcttctgctgcggaactttttacctttcacttcattgatagttgctggcataggtatttggtttggggctcaatag

SEQ ID NO: 345925 - DNA, 1470 bp, Pseudomonas aeruginosa
atgacaacgatagagactcatgagctttcacctcttgcaaatgcgatcgtggatcgtgcgatcgacaatgtgaatcgaaagttggttgcggggtatcgtaataagaataattctcgccctaatgcgaagtcgcctgatattaaagtcactgctagcgacgcactggaggccgtttctgcctccagtgtgatggaggtggctaatcgaggaattgcttggcgagaggtcatcaccaaaagcctcacgcgtggtatttcatcactcagcaccatggagttcgatggtgagtttcggattaaagatggtgtggccgaagggttagaaaaaatgcccaacatgccgggtgtctatgttgtgtataacgctgacaataaggcggtgtatgtaggggatagcgccaatctccaaaagcgctggcatgcaggacatatgaacgaatttcgccaaaagcaaaaggagggaaagactccctacaaaatggcggaggagtttcaggagggatgtactgttcgttttatagtgatggattcggcgactactgcagctgctctggaagctcatcttattcgcactgaaaaacctgttgtcaataagcgtgaggagctatcaacagaacagggtactcgatcgaatatagaagcaaaaaaaattaaagactcttcaggtgccacttcttcccttgttaagggtgctgcagctgaggcggccatgaatagcggctggttggtaatggaacagctttcagcggcgatcatgaaagcgttaaagaatgagctagtcgatgtgtttgccggtgggaaatcgaaactgctggaaagggttaaacgattctttcagcatatttgggatgtgctgaaacaaatcgtgacccagcccttgaaaatcttggaaggaatttttgagtttatagttaatgccctgtcaaaggctattagccagatatacatgatggcccggaacctcttggaactcgctaatagcgcttggcagctctacaagggcgctcagtcaatgagcaccgaggagctcatcaaaaagatcaccgaaactttaattataagtggctctgtcgtggtatgggacgctatggatcccatcattgaggcgcagttgcttcctgtagtggggccggtagccccttacttagccgctgctgttagtgctattggcttcggtatatccagtcactatctccagggtgttgttccccatgttgtggagtttcttatcagctgccgaagcttacacaaagaagcgttagaggcacgattaaaggcttgtgagcagttgatgttggtcgaggagcgtaattacgggctggtgcttgagttggaaggctatatgcaaagcactggcgagttgatttacgaaatgcgagagcaaactgcttctctctcagagcacaagcctatcgctgctcgtgatataaatcatcttcttgaacgtatttctaagaaaagggatgcatga

SEQ ID NO: 345926 - DNA, 1368 bp, Pseudomonas aeruginosa
atggaaaagagcacgtacttacagactcccgcggtagcgaatttcgtcaaatggatgagtgagagccttgacggcgataccttcgcgcatcagtacacgaaccgtcgttcgggatgtgtctggcattgcgatagcctttacgacgcttatgcccagtatcactggccgcacccaggcaatcagcgtctcggagagccgactggcaccactttcgaatccagcgcagccactcttcaggcgctcagtcaggatcttcggagcgctctgggatcccagggaagcgatcattcggttgtaactgctgcagtcgacgtcatgacatggggtggcgtacgtgctggcaacgtacgttggctgcatgcgaaccaagccaatctccctcaaattctatccagcaccaggcaagccttggatgcaggaagcactgatcatcctctgctagctgccaaagatctcaggttcaatgccgggatgaccaaggtctattcactcatttgcgatcgcttcgttatttatgacagccgtgttgctgcggcgttgggttgggccgtggtgaagttttgccaggctgctgagctatcggaggtgccgcaagagcttcgtttcccgtgggctcctgcaaagagcgcagccaaggaccccgccccaaagcggcgtaatgccggccaatcgggattcatcttcccaaagctaaagcctggggctaaccatgcagcttggaatctgaaggccagttggctgctcagtgacgtgctggaacagcctgcggcgcggaacagtcgattcaatcagattgagtgttttgatacttgtctaagggcgctcgaggctgcgcttttcatgattgggtatgacctggatgctactcagacaggcgcatccgcggcgatttccgagcaggtcatggaccgcgcccaagaagatgaggccgatagtttttggaacgactgtcagacgctaagcaaggggaatccctttcgctacaaactgacggacagtggcattgctatcgagggtggtccgacctttacgttggcggacatctcttcaaccttgatgcagctctggactgactttggctcgagtgcgttcccccttgcaaacagcgctaccgatgttcgtgatggcactgccccaaagggcatgggggtagcctactttcaggcgaccggcgccaatccacccaataccagtaagctcgctgctgtcttggaggagcttggggcgattgttcctacagcgggatattctgctcgatcgctgagctggacactcgatttgcgccggcttgggctcgatcagggcgcgcgtacgatcgatatcgattctttctgggctgaggtgctacgtgctgagcaggaagtctga

SEQ ID NO: 345927 - DNA, 879 bp, Pseudomonas aeruginosa
atgagcaaatcggtctgtgtgttcaatctgctggagcgattgctcccgatgcctgagcaagttgtggttgtcgagccgggtgaaatgcagcgtctctacagcggggttgggattccatccttgcgcaccgcggagctggcagggcaggccaggtttgccaatctgcatgaagtcaaagcggctaatccactgctgggattggttgacctgatcgagattcatcaaacatacgcttgcctgagggctgcggccgttgatggcgaccccgatgcaatgaatgatttgggctggttatggctcaatggaacgcgcttggcatctgacccgatattagccaggcggctgttcaagctagctgctgtcgagggcagcggcgaagcgtttttcaacctggctgagcaggcttactacggcaaggggatggtcacgaatcctgctcttgccatcgactactacgagcaagcattcgagcatggtgctccaggtgctgcgctggcgctgggagcaatctacgaagagggtgacgaaggtgtcatggtcgaccatggcagggccatgctctggtacaagcgggcggtcgaagagggggatgtgctggcaggtttttatcgtggacggctggcactgaatgagtcatcgacagagcacgacatggcctccggggtttactggttgcaatggtccgcaatgctcggtgagcggtgcgcgagcgaagcgcttgttgaactctacagttctccgttcaattcaccacctgatcccgagcgtcggctgtaccgcttctggcgtgattttgctatcgaccaggggagtagcacagcgatcgcgatgaggaatgcggatgaggtttctagcttgcgccttgctgaggacaattga

SEQ ID NO: 345928 - DNA, 993 bp, Pseudomonas aeruginosa
gtggatcagctatttcgccaggacctgattctgggaattcttcccggcaaggaaaacgcgttgggcagtacagccattcgcgagcgcgtagctcgacaaggtctgaatgtcgacctgaggacgatccagcgggacctgagcgatctgaaggaaaaataccctcatgtacacagcagaaaagacggacgctcgacgctgtggtgggcggaaaagtccctttcccgattgtcgatgcttcccacagatgccatgaacctgaccatgatcatggatcacgccacgcgttttgggatggctgcgcaagtcgaacgactggccccgcttcgtgattacgctgtttccctgctcaaaggcaaccggcccagtcaggatgtttccaataagatcaccagcaacacgcgcttcatcaccctgcagcccagcgtggtcaaacaagaggtgttggacgtcattcaacaagcgcttctggacggcatgtcaatcgaagcgctctaccagaagcgtggcgccgatgagcccaagctgctacaactgaaaccgcttgggctgtcctatcaagattcgaacatctatctctcgtgcgtattcaaggggttgccccaaggcagtattgctgcgctgcccctgcatcgtttcagaaccgcacgcacgatgttcgaggatatcgctgcgccagaggactacgacatcaattcagtccccgcaatgcgcagcctggtaggcctgagaacggattatcctgtccagatccgactccgcgtcagccacaccttgagcgagcgcctgcaggagaacccactcactgatgaccagactctggaaccggaaacgacggactggtggcttatgagcggcagcatacacctcagccagggtttggacctgtggctactaagccagggtgagcatctggaagttctcgagcccaccgccctgcgtgcgcaaatcgcagcgtcggctaagcgcatggcggctctttacgccggcgagtga

SEQ ID NO: 345929 - DNA, 831 bp, Pseudomonas aeruginosa
atgcatcaacgctccggtgcaagtccggtaactgttcccatcatgcggcctcgggactacctgttttacctgctgggcatcggtgatgacccgcaggtcgccgtgccactcgtttcgcagcagtcgtcgcccccgactcaagagggctgctacgaaattgccttgctcgccgctaccgaggaggaggcacttcgggcatgcagggaattccttgagagaggtagcagcccccacgaactccccaagcagaggcaatcgcgccacaacttccacgcaatcgctctggatgccacctggccaacgcagcgattccacgaggttcactggctatgcagccacagggcctcgccagccgatctgcagcgcctcaaggggatcgccgacatcatccatgtacattacctccgaccagctcctgtagcgaggccctccggcattcgcgtctatcagtggacgaaagagcaagacatgttcgacttctggcatgccctgtacactgcccgggacaacccaaatttacttgggttggactggaccagttatgccacctggaatccgcaacaactgatcggcaggtacgtctcagctcaagcgaaatccgcccttcaagcattgcagcatttacgaaaccgcgtgcgactgcaccagtcagatcgtgcacaggaggcactgctagtcgttgaaggcacgccaacgcttacgctcggcgagtacgcacagatagtcgacagtctggcggaagtactggggtgtgaaatcgccccagtgcttcatctcacggatctgcatgaagggtgcaaaatgaaactgctgatgttttctccgcagtga

SEQ ID NO: 345930 - DNA, 1644 bp, Pseudomonas aeruginosa
atgactgaaaatcttaaagaaaatttctcatcacccgcccttgagcagctcgaagcacagggcggctggccgcgttttcatgagcacagcttgttagaagcggctgtgacagaggctgtacgagagctacagatttccagagaaatggctctgatgagtgcctttggcgctatggccacggttagccaagggcatatcaacgtgcggatgcctacagggcatcaagtgccaacatcgctaatgctgctcactatcgcggaatctggtgagcgcaaaactacgacacagaatcatttctttaacgcaattagcgtgagaaatgacgaggcgcatactgcatatcagacagcgctagtagagcaaaaaattaagcatcaactatggagcacgcataaacgccaccttgaacgcgcatactcaaaactagctggccaggaagacgaagaagaacttctgactgctcaaaaaaatattgaagagcacttgcgagccgaaccgccacctccccgctctggcaaatttctctatgaagacacgacaccgcaagcgctcgtacagatgctgtacgaaaatacgcccaatggctgcctattaaccagcgaggctaacagtatcttcagcggaaaggccctaggagagttagataaactcaatactttgtgggatggcggcagcgtgattgtcgaccgtatttccagagagggttttattcttcaaaatgcacgactaacgttttctttaatggcgcagccaagcgtaatttctcgattcatgggaaaacgtggagaagaagcacgcggcacagggtttcttgctcgcttcttcgtagtgaaaccacaaccgatggcaggtcagcgagatactaaaccgctttcagaacttccacgaaggacagcctttaatgatcgtctacgccagatcctggataccccaacaccactaaatcgacaagtcttgcatttctctgaggcagcttccgaggcatggtacaaacacagccaatatcttgaaaaccagatgcaagaaaacggcctgtactactacctaaaagaccacgcttctaagctactggaaaacactagtcgtctagcggcagttctgcacacattcgaacgcacttcagaaagcgatattgaaatcaaacaggagacattagagttttgctgggaaatttcgaagcgctgctcaaagcactttattgaacacttggccaacgagccaaccgttgttaccgatgcgaatcagctagcgcattacttgctgcaaacggcctataaagacactagagtccccacaaacaacctcgacacaagccagtcgaatggaaggcctgcccacctgaagccgggagtgcaaacattctttacgctaactcaagtaaagcagtatggtcctggcagccttagaggacgtgcgagcgctgatcgattagaggcagccattgagttactgaccagacttggacacatacagaaagaaggatcgcgctacctattcaaagaaacaattatagaaaaaaatgaaatgaataacggagaaatcatcaccattaaagaattaccactttttagcgagcaagaactctgggagcctgagcgaaccacacaatggaacaaacctgagtactttataaaaataaagtga

SEQ ID NO: 345931 - DNA, 159 bp, Pseudomonas aeruginosa; identical to SEQ ID NO: 345916

SEQ ID NO: 345932 - DNA, 699 bp, Pseudomonas aeruginosa; identical to SEQ ID NO: 345553

SEQ ID NO: 345933 - DNA, 201 bp, Pseudomonas aeruginosa
atgagccagcccctgaccgtggagtgcccgacctgcggcgcgcccgtcgaatggaaaagcgacaacaagtaccgccccttctgctccgaccgctgcaagctgatcgatctcggcgcctgggccgccgaggaacatgcgatccccggcgataccctggaagacgacatcttctccgccgacctgccgcctcgcgagcattga

SEQ ID NO: 345934 - DNA, 210 bp, Pseudomonas aeruginosa
atgggtgtccatgaatgggcccgacagggcctgcgagagttgctgtcgaagagcgacgaggcggaccgggcaatgcgcctgcgcgcgttgctcagcgcaatcgtcgaactgaaccgggcggagcgcgatgctggcgacctggccagcgaactgcaatttcttgcggagaatctcgatgaccagcgcgactacgctttcatgcgtccctga

SEQ ID NO: 345935 - DNA, 690 bp, Pseudomonas aeruginosa
gtgatcgctgccgagttgctgtcggcggaaagcctggaactgggctgggccatctatgcgccgctgctgctgctcgccgcctggcgcgcgccctgggtcgagctggtcagcgatacccgccgccagcacctggtgttcggtaccatgctcgggctgttcctgctctggctggtgcgccgggacttcgaatcggggctgtccttccatttcatcggcatgaccgccgtcaccttgctgctcgactggccgctggcgatcgtggtggggctggtggcgcaactgggcttgtgcctgctcggccgccaggattggctggcgatcggcgtcaacggcgtgctgctggtggcgatccccgcgctgatcgcggagctggcggcgttgttcgtggaaaagcgccagccgcgcaacctgttcgtctacatcttctgctgcggtttcttcccggcggccctcaccgcggtggtggtcctgctgctcggccttggcgtggtctggatcgacggccttttcccgatgccgccctggctggaggacttcgccggttacctgtggctgatcatgttccccgaggccttcatcaacggcacggtgatcaccggcctggtggtctactacccggagtggctggaaaccttcaatcgcacgcgctacctgcaggcgccctggaaggacgaagagcgcaagccctga

SEQ ID NO: 345936 - DNA, 426 bp, Pseudomonas aeruginosa
atgcaacttcgcagcgtcatcgccgccgatcacccggcactcttcgcgctgtggtcgcgaacgccaggtatccgcctccgtgcggaggacgcctatcccttcttcctcgcctaccttcaacgcaaccccgggctgagcctgctggtcgaaaccgaaggggaggtgatcgcctgcctgatggccgggcatgacggtcgccgtggttacctccagcacctggtggtcgatcccggttatcgagggctggggctcgcgcggcggatgctcgacgaggtgttggcgcgtctggcgagggaggggatcggcaaatcccatgtcttcgtcctggatgccgccgaggaggcccaggcattctggcgagcccagtcggactgggagcggcgcaaggacatccaggtattttccactcgggagggacacgcgtga

SEQ ID NO: 345937 - DNA, 630 bp, Pseudomonas aeruginosa
atgaacgaagcggattatctgcgcctgctcacccgtcaggccgaacaagccaacgacttcctctccaacgcacgtaaatgggaccgcgagcgctgggtctgccagcgcttcctcgaagcccttaacgtgccctatcgccaggaggatttcgccgcccccggggaacagccgccggacgtcctgttcaagggtgccggcttcgaggtgttcttcgtcctcgatgaaggtcgccggctgaacgaggagtggcgcgaggaactgacccgtcgccgccaggccgtcagcctgcgccaactgatccgccgcgaagagcggccacaacggatcgccgccgccgagctgcaggcacggctggcgccaaccctgcgcaagaaggcgcacaactatagcgagcgcggcatcgaccacggcgaactggacctgctggccttcgtcaacctgaagcgcgcggtgcccgatttcaatacgcccttcccgccgcccaccgaatacctgcgccaaggctggcgctcgctgtcgatggtcggtccgacctttgcccgggtgctcttcgctcactccggcgcccccgaattcctgcgcgccaacctcggccgcagcatcctgttcgacgccggggtaggcctgtga

SEQ ID NO: 345938 - DNA, 450 bp, Pseudomonas aeruginosa
gtgagcgaagggcgggtgaagtggatcggcgtgcgctccggcagccgcgcgccgatccaggaactggaggcggtggaagcacggcgcggcctgggactgacgggcgaccacccgcacccgccgcgccaggtcaccctggtgcaatgggaacatatcgaggccctcggtaccctgctgggcaggccgctgttgcccaacgagatgcgccgcaacatcgccgtcgccggcatcaacctgctcagcctgaaggaccgtcgcttccgcctcggcggcgcgctgctggaaaccactggctggtaccaaccctgcggacgcctggaaaagcacatcgaccaccgcacactgaagagcgtgcgcgaacagggcggcatcaccgcgcgggtgatcggcagcggagtgattcgcctcgacgatccgctggtgatcgagccccctgtctgtctagaatga

SEQ ID NO: 345939 - DNA, 171 bp, Pseudomonas aeruginosa; identical to SEQ ID NO: 320798

SEQ ID NO: 345940 - DNA, 1308 bp, Pseudomonas aeruginosa
atgtcccatcgcatcgtgatcgtcggcggcggcgccggcgggctggagctcgccacccgtctcggccgcaccctgggtaaacgcggcaaggcccaggtcaccctggtcgacgccaacctcacccacatctggaaacccctgctgcacgaagtcgccgccggctcgctcaactcctccgaggacgagctgaactacgtcgcccaggcgaagtggaaccacttcgaattccagctcggccgcatgcagggcctggatcgcgccggcaagcgggtccgcctggccgcactggtggacgagaatggcgttgaactggttcccgagcgcgacatcgcctacgacaccctggtgatcgccgtcggcagcaccaccaacgacttcggcaccgagggcgctgcggaacactgcattttcctcgatacccgcgcccaggccgaacgcttccaccgacaactactcggccagtacctgcgtgcgcataccgggcacgacgcgaacaacaacgcagtgagtatcgccatcatcggcgccggcgccaccggcgtcgaattggctgcggaactgcaccacgccgcgcagatgctggccgcctacgggctcgaccggatccgcccggaagacctgcacatcagcctggtcgaagccggcccgcgggtgctgccggcgctgcccgagcgtatcagccagccggtacaccagaccctgagcaagctcggcgtacgggtgatgaccggctccgcggtgagcaaggtagatgcggacggcctctggaccggcgacggcgaattcgtcccggcgacgctcaaggtgtgggcggcgggcatccgggctccggccttcctcaaggaactcgacggcctggaaagcaaccgtatcaaccaactggtggtccgcccgaccctgcagaccacccgcgacgacgacatcttcgccttcggcgactgcgccgcctgtccccagccggcgcaaccgggagagcaaccgcgcaacgtgccgccacgcgcccaggccgcgcaccagcaggcctcgctgctggtgaaatcgctgcgtgcccgtctcgaaggcaagccgctgggcgaatatcactaccgcgactacggttcgctgatctcgctgtcgcgcttcagcgcggtcggcaacctgatgggcaatctgatgggtagcgtcatgctcgaaggctggctggcgcggatgttctacgtatcgctataccgcatgcaccagatggcgttgtacggtccgctgcgcaccgcgatgctgatgcttagcggccgcctgcgcagcaccgagccacgcctcaagctgcactga

SEQ ID NO: 345941 - DNA, 4254 bp, Pseudomonas aeruginosa
atgaacaagagctatacgctggtctggaaccaggccacaggctgttggaacgtcgcaagcgaaggtacccgtcggcgcagcaagagcggacgcggcaaggcgctcgtagtcgccggagcgtcactgctcggcctgttctgccaggcccccgccttcgccctgcccagcggcgccacggtcgtttcaggcgatgccggattccagacatccaccgatggccggcatatggtcatcgaccagcagagccacaagctgatcaccaattggaacgagttcagcgtccgtgccgatgagcgggtcagcttccaccagccgggccaggacgccgtcgccctgaaccgggtgatcggccgcaacggcagcgatatccaggggcggatagatgccaacggcaaggtcttcctggtcaatcccaacggcgtggtcttcggcaagtccgcccaggtcaacgtaggcggcctggtggcttccaccctggacctggccgacagggacttcctcgccggcaactaccagttctccggcgactccggcgcaaccgtaagcaatgccggcagcctgcaagccagcgaaggcggcagcatcgccctgctgggcgcccgggtcagcaacgacggcgtgatccaggcgcaactcggcgacgtggccctgggcgcaggccagggcatcaacctcaatttcgacggcgacggcctgctcaacctgcaggtggacaagggctcggtcgacgctctcgcacacaacggcggcctcatccgcgccgatggcggccaggtgctgatgagcgcccgcagcgccgacagcctgctcaagaccgtcgtcaacaaccagggcactctcgaggccaggacgctacgcagcgcggaaggacgcatcgtcctcgacggcggcgaacagggtaccgtgcgggtggccggcaagcaggacgccagcgccatcggcggaggcaatggcggcctggtgctgaaccagggcgcgaacgtcgagatacagcgaaccgcgcaggtggacacccatgccgaccagggcgcaaccggcacctggaggattctctcgcacgaggtcagcgtagccgctgtcggccaggcaaacgctgccggtgatggttccggccaggtccatgtagcgcagggcccagccggggccaatgcgtccgatagcaacggcgtgaccatcgttcagcagcagccggccgtcgacctcgccgccggcgccaacggtacctccgcagtgcagagccagagcggcgccaacatcggctccggcgccaatggcatcagcgtcgtgcaaagccagaacagccccaatatcggctcgggcgccaatggcatcagcgtcgtgcaaagccagaatggcgccaatatcggcgccggcgcgagtggcatcagcgtcgtgcagagccagaacagccccaacatcggctcgggcgtcaatggcgtgactgtcgtgcagagccagaacggtgccaatatcggttcgggcgcaagtggcatcaccgttgtgcaaagccagaatggcgcaaatatcggttcaggcgcgagtggcatcagcgtcgtgcagagccagagcggccccagcatcggctcgggcgtcaatggcgtcacaatcgtgcagagccagagcggtgccaacatcggccccggcgtcagcggaatcgatgtcgtccagacccagactctccccaacctgagcccaggcgccaatggctccagcatcgtccaggtccagacgctacccgatatcgccgccgacgccggcaatgtgcatgtcgtgcaggtccagaccggcggtaacaaggtcttcggcaactccgccaccaacgtcaggtcacgtaccgttcaggcccggagcaacgagaatgtcggttccggcctggcgaatccaagcagcgcgggaaaaggcccgacgttgcatgccgataccctggcccgcaacctttccacaagcaacgtcgaagtggtcgccacccggggcaacgcgcatgtcggcgcgccgctgtcctgggacagcggcaacggcctgacgctaaccgccgagcgcggggacctcaggatcaatggcgcgctgacggcccagggggaaaacgccagccttactctcaatgccgggcagcgccctctccgtatcgacgacagcctctctctcactggccagggagcccgggtcgaattcaattcggacaagggttatgccctggccgaaggcacccggatcaccctgtccggcaagaacgcaggattccgcgccaatgggcgggactacagcgtgatccaggacctgcagcagttgcgcggcatcgatagggacctgggcggcagctatgtcctcggcaatcgaatcgcaggcggcaactccagcttcctgtcgataggcaacgcgagcgccttcggcggtaccttcgacggcctgggcaacaccatcgataatctcgccgtctacggcaccggcgcctactccggcctgttcagcgtcaaccggggcaccctccgcaacctgaacctggaacgcatttccgccgatggagcacaggccacccactacaacgtccaggtcggtagcctggccgccgtcaacctcggtcgcatcgacaatgtgaacgccagcgacatccgtatcgccgcggcctcgaagctgaacagcctcggcgggctggtcgcactgaacctgggtagtatcgacaacgccagcgccagcggcacgctggtcggcaaccgccacacctatgctctgggcggactcgcagccgaaaacatcagcacagccaggggcgtggccagcatctccaacagccgggccgattttgccatctccggccagttgaaggaccatgccagccactacggcgcggggggcctggtaggcaggaaccgcggcggcctcatccgcagcagcggcagtcagggaacgctgtcgctgagcggtcacggaatgaacctgggaggactggtcggatacagctccgccggcggactggcggacgtttccgcctccgtcgacgtctcaggcaacggacagcgcggcctgtacggtgggctcatcggcctcaacgtaaacagtggtattgcccacgccacggccagcggcaaggtccggggcacagacgcggaagcactgggcgggctgatcggccggaacctgaacgcggccatcaacaacgccagcgcccatggcgatgtcagcctgcaagccggtcgctacctgggaggcctgatcggccacaaccaggcaggcaacctggccaacgtcagtgccagcggcaacctgagtggtgggtcgctgctccaggccggcggcctgatcggtctcaacgccaatgcctcgctggtcaatgcctccgccaagggcaatgtcgctacccgcggagcagaagcggttggcggtctgctcggcgaaaacctgtacggctccgtcatcaacggttccgccagtggcgaagtcaccgacggcagcggcaaaaccctgggtggcctgatagggtccaacctcggcggcaatcattccaacctgaaggcctccgggtgggtaaacgcaggggcgaacagtgacgtgggagggctgatcggccacaaccggggcggcaaccacagcaccctggcggcatccggcaatgtcaccgggggcaagggcagtcgcgtcggcggactcgtcggctataacgatgccgcctcgctgacgaacgtctcggcttcgggcaacgtcagcgccagtggttccagggccatcggcgggttgatcggcagtgacctgcgaggttcgctgatgctcgccagcagtcatggaatcgtgaacgacaagaccggccacaacctgggagggttggtcggccgcggtgaaaacacctcgatccgctccgccaaggccagcggtgcggtgagcggaggcgccgggatcagggccggcggactggtcggctccctggagggctggcaggctctcatcctgggggcctcggccggcggcgatgtgacggcgggctacgatagctatattggcgggctggtgggcttcagcaccgccaccatcagcggcgcttccgcttccggcaaggtcggaggctcgggcctgctgggcggcctggtcgcctggaaccaggggaatgtcatgggttcttcggccagcggcaggctggagccacaaatccccaaccagatccatggcggactgatcggcatcaattttggctggcagtcctggaactcggtatacggggctgcggcggccgttccaatgataggtcgccactacaacctgtga

SEQ ID NO: 345942 - DNA, 867 bp, Pseudomonas aeruginosa
atgaatgcgaaagcgacttcggttgtatccaccaagggtggtgtagggaaatccaccaccgccgccaacctcggtgcattttgcgccgatgctggcctgaagaccctcctcatcgacctggaccccgtccagccctccctatcttcgtactacgagcttcctgaagtcgcccagggcggcatctacgacctgctcgccgccaacataactgacccagcgaggatcatctccaggacgattatccccaacctggacgtcgtgatttccaacgaccagaacaaccagctcaacaacctactgctccaggcgcccgatggccggctccggctggcaaacctcatgccgtccctgaaacagggctacgacctagtgctgatcgacacacaaggtgcgcgctccgctttactagaaatggtcgtgctcgcatcggatctggttgtttcccccctgcagcccaacatgctcactgcccgcgagttcaaccgcggcaccatgcaaatgctcgatggactgcgtccctacgagcgcctcggcatgcggatccccaaggttcagatcgtcatcaactgcctggaccagaccaatgactcccgggcgattcacgagaatgtgcgcgccatcttcgatgagcatcaggacatttctgtgctcgaaacgactgtcccggatgccgtcgtgtttcgcaacgcagcatcgcgcgggctaccagcgcaccgcctcgaaacgcggcaaccctccaatcgcacatcagcgcccgcgctggaaatcatccgtaacctggccatcgaggtctttcccgagtggactgaccgcttcctcgcgctgacgccggaggcggtagcagcactggtcaagggagggcgctga

SEQ ID NO: 345943 - DNA, 738 bp, Pseudomonas aeruginosa; identical to SEQ ID NO: 326415

SEQ ID NO: 345944 - DNA, 498 bp, Pseudomonas aeruginosa; identical to SEQ ID NO: 326416

SEQ ID NO: 345945 - DNA, 126 bp, Pseudomonas aeruginosa; identical to SEQ ID NO: 326417

SEQ ID NO: 345946 - DNA, 243 bp, Pseudomonas aeruginosa
atgaaggtaaaagatctgatcgaccaactctcgaagctggacccagagctgctcttggtaggctattcggaggatgaagacgtgcgcgaggtcggccatctcgttcggcttttcgatatacgggccgtcaccgccgaacagtgcaaccgcagtcgtgatgagagcgggaaagcgaggatcgagcttaccgggagcggcgcaggccacccggttgccctgctggaactgacgacagacatttga

SEQ ID NO: 345947 - DNA, 1188 bp, Pseudomonas aeruginosa
atgaaagccaagataacgcaggccctcgtcgagagggcaccatatgccgagcgcggcaagcccgtgctgtacgccgaccccgaactcaggggcttctacctcatcgtcaccgcgaccaagagggcctactacgtccagtccctggtcaacggcaagcaagttcgcgcgaagctgggcgaccatcccgcgctcgacgccaagcaagcccgcgatgccgctcggcagaccctcgttggcatgcgcggcggtaccaacccgaacgaggagcgccgcaaggcgcgggcgcagggcatcacgctcaggcaggcactcgacctgcacctcgcggccaagccattggctcaacgcaccaaggaggactaccgctattgctgcgatcagtacctatccgactggctcgacacaccgctggccgaactcggcgcggaccgtgccggcgtgcgcgagcgccacgtccgcatcaccgcaaagcatggcgcgcccacagcagataccgttttccgcatcctgcgtgccgtctacaaccgcgggttgcgcgagcaccccgacctacccgcgaatccaaccgccaacgtcgattaccacggtctcaagcgccgcaaggtcgatgccaacgccgagaagctgaaggcgtggggcaaggcggtggtcgcgctgggcagcccagtgcgccgagacctccatcttttcatgatcctgaccggcatgcgccgcaccgccgcctgcgaggcgagggccgagcaactgaaccagacgggcgacgccctgcatgtgccgaaacccaagggcggggccgcccgcgccttcgacctgcctctgtccggcccactgcaagacctcgtagcccacaggtccgagcagaacaagctggcctatcggcactcgccttggttgttccctgccgactcgaagtcgggccatgtcgccgaggtggcgcagtacgagctgggcgacttgatcggccatgccctccgccatacctacgcaacgctggcccttgaatcgggcgtgcccattgccgagctgaagttcctgctgaaccacgccgcgggcaacgtcacgatgggctacctgaaccccagcctgcaccacctgcggacgtggcaggagaaggcgtcggccaaggtgctggacgcactcggtctgacctggacgcccggagagtggccgccgcagccccaggaatag

SEQ ID NO: 345948 - DNA, 294 bp, Pseudomonas aeruginosa
atgacgaatcccacccgcttgacggtgacgctcgccgagctgcgcgaacttcatgcgctgcccgacgaggcgctgctcaacgtccacgaggccgccgccttcctgcgcctcagccccaacgccctgaactggtatcgcagccagcgccgcggcccgacctaccagcgcgtcggcccaaaggtcatccgctatcgcgtcggcgacctgcgcgcctacatggtcgaggtccagccgctgtcccgctcctacgagtcgcgcaaggcccgtgccgatcacgcgaacgtggagggctga

SEQ ID NO: 345949 - DNA, 2076 bp, Pseudomonas aeruginosa
atgagcgcacaaaagaaaacgcccacgggggacgagtccgtgggcgccaatagtcaacaacctggagaggtgagcaagctcaccggatcaaatgatgccgggatgcgccaagcgcctacaccatcgttcgatgacgtgcggccgtaccgcagtgcccgccttgaactgatcccgctgcactgctggaatgcgatcagccgtgatgggcgtgaactcggcaaggcccccgccgacggccgctggacaacccggcagtacgaccacgccgaaacgctcgaacgggcgcagcgcgaacgtctgaatctgggtgtccgcctgcccgccgacgtggtcgtgctggacgttgacccgcgccacttccccgacggcacgaacagcctcgacaagctggtggccgacacgggcatcgacctgtcagcagcgccccacgttctcaccggcaacctgaatacaccggggcaccactactacttcaggaaacctgcgggtgcggtgctgctggaaagcatcgagggctatgcggggctggagttcaagtcgctcggccgccaggtggtcgctgccggctccgtccacccaacaggcggtcgctacgaatgggccaccgactcgccgccgctggccgacatgcctgacttgccatcgaacgtgctgaagatggctcgcaggccggagcgcgttgccgcggcatcatcatcggacgctggcgaactcacgcctgagctgctggcgaaaacactggaacagctcgacccgtgcgactacggcaagaagcagcacgagcgctggaaggaactgatgatggcctgccactacgccaccgacggcgaagggaggcaggagttcatcgactggtgcatgggcgatcccgagtacgccgaccaggactggatcgtcggccgccgctgggactcgcttcacgtcaaccgtgaccagaagatcacgacggccacgctgcgcatgtacctgcaagaggtcggcggtgacatcgcatcaccggacccggaagatgacttcgacgtgtgggaggacgacggcaccgtcgaagccgaatccagccgctggcgcttcctgagtatcgatgaggtggagaagctaccgccgccgaagtggctggttcaaggtgtcctggtcgaggccagcatcgcggcgatctacggtccacccgaatcgtgcaagtcgttccttgcggtggacatggcgatggccgtcgcgggtggcatggactggcacggtcggcctgtcgagcgcggcggcgtcctgtacatcgctgcggaaggcgcgccgggtctcggcaagcgcatgcgggcctggaaggtaaatcgtggggcacaaggccgtgcgttccagcttcatttgatgcgcgacgagctcaacctcgcagccgagaaggatggcggtgtgcgcgccttcgtccaagctgtgaccgatgagctcgggccgctgcgcctgatcgtcatcgacaccctgaatcagaccgccgcaggcgccgacgagaactcggcgaaggacatggggcgctacatcgccagcatgaagaagctgcgcgacgcgactggcgccgccgtggtcgtggtccaccactcgggcaaggacgtgagcaaaggcatgcgcggcagcacagcgctgctaggcgcgatggacacgaccgtcgaggtggagcgctccaccgacggtcactcgatcaaggtcgccgtgcacaagcagaaggacgccgagcgcgaagggcctatgcgcttcaacttggagaaggcagccgactcccttgttctcaagccgactgtgatggtcgatgcgggtggtgactttgatggcaggacggacctgatcgtggagctggcgcgccagatggcgagcgagcgcggtggcagcgtgccgttgaaggaattggccgaagccgtgtgcgagcgcgatggggtggcggacaagacggcgcgccgcaggattgaggaagcgatccccaagcactgcacccgtgacaacgccaagcagtcagcagacggcgggctggtgtggcaggaacccgcagacccgcgcaacccgaagctcggaatcctggtcaggacggaggggtga

SEQ ID NO: 345950 - DNA, 513 bp, Pseudomonas aeruginosa
gtgagccgcccatctatccccaacaccttcacaccggagaggaaggcaatcttccttgcggtgctggaagacacggcgagccccaaggctgcggcggccgctgcggggatcgtgcgctcgacggccttctatcacaaggccaacgacttggagttccgctcgcagtgggaagccgccgttgaggtggccctcgacagcctgctcgaagaagcctatcggcgtgctgccgtgggtgtcgatgagcctgtcatccatcagggccgcgtttcaaccgtggccgaccccgagaccggcgacgagcgtccgctcacggtgcgcaagtacagcgacaggctgatggaggtcctgctcaagtggcgctacggcgaccagatggcggaccgcctgcgcgtcaaggtggactccacaggcctcgacgccgaggcgctgctgcgcatgtcggccgacgagcgcaaggcgctgacggggctgctctccaagtaccacgcgaacaaggaacaagacgatgagtga

SEQ ID NO: 345951 - DNA, 246 bp, Pseudomonas aeruginosa
atgagtgagaagctgacagtcgccgaggccctgcaacaagccgagatgatcgaccgcaacctggatgccttcgacgagacggccccgcagacgattgcagcaatgggtgggcgcgatgccctctcacgtagttgcgagatgacctgcatcggtccgatcccgcgcatcgacgctgacgcatggcaggccatgtcgaacgagtacgaggcaggccgccagcatggcagcgtcaaccgcggcgcctag

SEQ ID NO: 345952 - DNA, 447 bp, Pseudomonas aeruginosa
atggcagcgtcaaccgcggcgcctagcgggcacgccgttgccgtcgaggtcgatggggtgcgataccccagcgcccgacaggcggccttcgcgctagagctacccatctcgaccgtccagcagcggatcaacaatccgaacttccccgcctaccgctggctcggcgcgacgcccggcaagcggcaggtgaggacacccgaggactgcgaggtcgcgaagccactggtggagccgacgcgctgggcgctcgacggcggcgtgcgacgcgccaacgtcatcgaccccaacgtgcagccgccccgcgtggtgcgcacggtgggctggcgcaggtgcatgtgctgcggccgcttccacttctccgatgacgtgtgccgcgcccgtctgtgcctgaactgcgggggcgctggcggcctgcccgttggcgcagaccccgacgaagacgcctga

SEQ ID NO: 345953 - DNA, 717 bp, Pseudomonas aeruginosa
atgaacctgaatcaagtatccccgctgctcagcccgcaacagatcggcgagctcgcgtccaacctggacgccatccacacccgcgccctcaaggccattcagcgccttcagtccgacatcgacgcgcgcaaggcagagattgccaaccgctggaagtcagccggcatcgacgccgccgacaaggcccgcatctcgcagagcgagaccgcggccgtcgtccgccagatcaaggacaactccgtcaaggagctcgacaagctgctgaaggacgcgggcgccccgcatgctcagctcgtctcgcagcgcgacttctactccagccccgccaaggtactgagccgtgctgcccttggtgaccccaagcgcaccgagtacatcaaccaactcgcctacgctggccccgctgagcttggccacatggcccaggtcgccgtcgcaacgcagaacgtcccgctcgccgccgccgtcctctcgctgctcgaccgcatgcccagcaaggaccgtccgtttggtcctgtcgagctggcctccgcgatgaagctggatgactacctgaaggtgcaggaatacatcaagctgggcgacgcgcgcttgcagggcatcttggtcgccatccgcacctggaatcaaggcaagtccaacccgctgaacactgtgcagctcgccctgcgcgagcaggccatcgaccacgacctgatcgggggcggcgatgaataa

SEQ ID NO: 345954 - DNA, 261 bp, Pseudomonas aeruginosa
atgaataagctggatcactaccccgcgcgccaccccgtagccgttgccctcggcggcatggctcgcgcgctgcgctccggcgcggacctcctcgactcgctggccgagcaggccaccagcgtcggcgtgaaacctttctcggatgagttcgacgaggctgcggcgctggctggcatgccatacagccgtgcgtgggatgcctacctcgaccgcgacacctgggcggaggccgagcgtcggccccttgcccatatgccctga

SEQ ID NO: 345955 - DNA, 471 bp, Pseudomonas aeruginosa
atgaacctgcaagagatgagcaccaaggacctgctggccctgcacaaccagatcgccgacaaggctgctggacccaagaccttcgcgacccgaggcaagctgctcgaccgcatcgagtcgatcgcagcagccaagaacatcgacgtcgcgtcgttcgggcagccgcaggccgccgaggtgaccgagccgcgcgcacagccgcaggccgacgtcaccgaagcgaccaaggccccgacagagaccgagaagaagcccagcggcctcggcatcggccggctcgcccgcgagctcctcctcgatcccgcgggctacccccacgccgagattgccgcccgcgtgaacgccgccatcccgggcgcgaaggcatctgccaagtcggtcaggtggtacgcccatgacatgcgcaagaagggagccgctgtgcctgagcgtcagcgcgtggccgaatccgagggcggtgaggcatgctga

SEQ ID NO: 345956 - DNA, 219 bp, Pseudomonas aeruginosa
gtgcccgacctgatcgacgaggagggaccgttctcgcttgtcgtcgagtcgtgcacggcggcggtcccgctggaactcgcccgtgagcgcgagcttcacgacccgctcatgcggccgacgctggtgaagaacgacctcaccctcggccagctcggcggcgccgtcctgcgctaccttggcagagcccgcgagccgctggccgtggacatcccgctatga

SEQ ID NO: 345957 - DNA, 447 bp, Pseudomonas aeruginosa
atgacgacgataatggagagcgccacccggcacatggccgcgggcgtggaggacctcgacgagctcgcccggctcgtcgagggcgatgtcggcaagctgcccggccggaaggtgctgacacagtaccgctcgtacttcagacggtacggcgaggcgtgggttaaggtccctcgtgcggtgacccggcagtggaaggccgacaaccccgaaaagatggatgacgccaaccgtcgctggaaggcgggcaaccgggcgaggtacctcctcaaccaatgccggggctctgccaagaagcgcaggcaggaatgcgccatcactgccgacgacatcgagaagatgctagccccgatggtatgcgcagccactggcctgccgctgacgtgggagcatggcggtggctctgcccgcaatccgtgggcgccgagcatcgacgtatccgctccataa

SEQ ID NO: 345958 - DNA, 1200 bp, Pseudomonas aeruginosa
atgagctttccgggcaggaccggcgagctgctcgacctgcgcgaactggagcaactggtcgaccagttgagtcgcctgccgtcgcgccaggcgcaactggagctggtgcccggcagcgaggtcggcggcagccgggtgcgtctcaagggcgagcgcgacaagccctggcgggtctccgccacgcgcaacaacgacggcgacgtcagcaccggcgagcagcagatgggcctgggtctggactgggacagcccgctgggcctggccgaccagctcaacctgcgcgccaaccgcgacgcggtgaccgaccgctggcgccattccgacagccagagcctgttctacaccctgccctggggctggtggaccttcacctacggctacagccagagcgactaccgcacgcgcaacgaggccagcggcttccccttcaagctcgatggcgacagccgcagccaccagttccgcgccgaacgcgtgctgcaccgagacggtgtgagcaagaccgccatgagcctggggctcagccaccagcgcaccaacaactatgtcgaagacacccgcctggaagaccagagcacgcggatcaccgagacccagctcggcttaaaccacggtcggcggatcggcagcggtttcgtcaacctcgacctcggctggcagcagggcatcggcgcccttggcgcgcagggtcgcggccacccgcaggcgggcgatccgcatgcgcgctacgacaagtacagcctgaccctcagctacctgcagccgttccagctatggggcgagcgcttcagcttcgacagcctggccaccgggcaaaggagcgaggacgtgctgttcagcccgcagcgcatcagcctcggcggcaacagctcggtgcgcggcttcaaggaccagaccctgaccggcgacagcggcggctactggcgcaaccagttgcgctggcggcgcgcggtggaatgggcgccgctgcggccctggctgcaggaatacggcgtggccttcgcctacgacgtcggcgtgatccgccacgaccgctacaacgacggcgccagcgggcgcatgagcggcaacgccatcgaactggatgcccggggccgctatttcgccgccagcgtcggcttcgcccgctcgctggagcggcccagcgccatcgagcggcgcgagcacccgatctatttccgggtcgacgcgttcttctga

SEQ ID NO: 345959 - DNA, 1074 bp, Pseudomonas aeruginosa
atgcgccgcctccagcacgatgcgttcgcgcgccgccaggctctgccggttgaccagttcctccgcgctgcggatctcggcgctgccgccggcgtaggtcttgccattcagctccacggcctgggccgcgatcttcaggtcgccctggctggaggcctgggccaggctcagcttgccgctggcgtcgatgcggatgtcgccgccgctggcggccatgtcgccggccagccgcacccccacgccctgctcggtgccgaccaggcggatcgccccggcgtacatcccgcccagcgccgagctgtcgatcgccagttgtggcttctcgctgccatcggcggcgcgcggcgtggcctgcaggctgtcggcctggacgtcgttgcggccggtgacgatgttgaggttcttcgcgtagagcttggcgttgagcttggcgctgcgggtgatcaggtcgaactgttcgaggttgccgacgttcagttcggcgccttcgacgacgatgtcgccgccgtccacctggaagcgctccaggcgctggccgtccatgatcggcttgccggtggtgagggtcgcgcgcggcgtgttgatgaagccgcagccctggcaggtgatgccgtgcgggttggcgacgatcacccgcgccgactgcccggccacctcggtgtagccggccagggtgctgcggttgccgccggtgacctggttgaggatcacctgcgccgcctggcccttgaggttggggttgccgaggatgatcccgccgagctgggtaccctgggtcttgccggtggcgttgttgaggatcagcccgttggcgccgacgttgtagtcgcggaaatggttgttcgacagtccggcgccgttgggcgtggcgatattgacgatgggcacgccgttgcccgcctggcccaggccggtgttgccgccggcggccttgtccagcgccagccccgccgccgcggcgacgatcgggttgaggaacaggatgccggccagggacagggcgatgcactggttcagcgggctgcggatgtccatatcgttactccttggcgggtaggggcccggcgaggttaa

SEQ ID NO: 345960 - DNA, 147 bp, Pseudomonas aeruginosa
atgtctgttctctataggaacagatcatgccagccttttggcatcagcgacaactgcctccagttccgcgaggcgctgttccagcaccttcagacgtttcttttcctcaacagcaacctgtatttctcgctgctcgccctcgtctag

SEQ ID NO: 345961 - DNA, 993 bp, Pseudomonas aeruginosa
atgcatagaactgctactttttacgacattaaaattactgctagtgggaagtcaagggcgcaaggtaatgaggctgacttcgtaactgatccgaagccgctatcggagatgtatggttttattgatcggttatttaaaggtggagatcgaatactaaaaaaaggcagaagtgagaaatctgcaaaatattatatatctgatatggatgttcgtgatgggaggctgattcttctcataaatagaagtgatccaaacgcccctgatgcggtctctactgatccagagaataaaaatagagtagtgcatgaaaaacctccggggcacggcggagatagctcggcacatgtggttatcaacctggtaccaagtaagggagataactattatgtatgtgtgattgagacagtatacgggtcagggctccatgcgagcagcgtctctgactatctgaggtttgtttttcggcattgtaggttacagttcccgaaggagtttttgattcccaactgtaatggagcaagagatgctgatggtaatcctcttttggtgcgtcattatcattcgatagaactgcaggggcatccatcgagcgagtttgaaaaagatttagaaacagggactctgtccgggatagagttgcttgacttctctgaaagaggcgctgtgtgggacgacaaagggggagtctatgagaatagtcgagcggtcatattgaaacctgaacataagctgatgacgaagttatcagttgctgttaaacaggttcgcaataaagttattaagaatggcgaaaactatcctcaaatgcgcctccggtttaagaatgaaaaaggtgagccgcgtgatgcgacaatcgagacggacagtgggaatcttattgatgagcataagtacgttaagcgacatattatctctgcgccgcttgtgaatactgctagtctagaatttataaataatggtatagttaaggaagtcttcgcccttatggagtga

SEQ ID NO: 345962 - DNA, 735 bp, Pseudomonas aeruginosa
ttgcgtattttcagttcgtggaaagaaaaaggtctcattctcttagctctagcctcgtttattgcgttgttaatctccgcctaccgtctagaattatggagttttctagatggaacgaatgtgggtgagtttttggttgctaaggggactggcgatctcgttttccaagtgtctggtgggattgtttctgcatatgttttttatgtgctgatagacttggttccgcgtgcgaggagagaagcttcagcttttgaagttttagactcccttgtttctgccattcttgaaggcttgctggaaggaagcgcatttcagcatgaaaaagggattttggccgttgattactctctttctcgtaaaaaggaaggcttggttacacttgctgaggagcttaaaaattttaaaatcggatatctgaaactaaagtctgcagcgcaaaccgctgacactcgatatgaagactttaagggtgttttactattggcggcttcaatttcgcctcctcatgccagagtttggttggagctcacggacaaagtaaggctcctaaaagaacaacttgagaagaagcctcaagattttgatttttctgtttctttagaatcttcaggtgcaggttcggaagacttgagtcataatttgtcaaagctttatctgcatgggttatattttcgggtggcagagtttgtagatctttgcattgagtggcgaaactcaactgctggtagagtttaa

SEQ ID NO: 345963 - DNA, 684 bp, Pseudomonas aeruginosa
atggttcacctcccccgcacagtcgaactctggtacgccgccctcaacgacaaccaggcccgtatgacggcgcccgaatggcattgcgaaattctgcgcagagcagccgcggagctactggcggcaggaggcgtggaccagactggctacctcgacatgctcgatctggccacaggtgcgcaagcacacgcccttgaggaacgagcagcacagtggttccggccgaaccgaacgtaccgggtcttgctcgagggacgcgaggtaggccagatcgcgcgcggttcgttcagcccatcagtaccagggctgagtgatggcctagtgcgatacgacaagcgtggcgagttggtgatgctttatcagcgcacgatctacgcgggagacattcgcggacgccgctgggcatgcacggacgggcaaacttacacgctcaccgtcattggctgcagctggcaggggcgggaatggcgggcgttcaacgagccggacgagtatcgcgtggcactcagtatggctgaactggccgaagaggctggggatatagggaatgctgcgctgtggcgcgaccgactggaagcctgtgagcttcagttgtgcggttattgccagtcgcgctttgatctggttgatgaatgccatacctgtgtagggagaggtataactgcagttgccactattccctag

SEQ ID NO: 345964 - DNA, 669 bp, Pseudomonas aeruginosa
atgggaactgacaatatctttagaaaacggcaaggtaaaagaagaaacgagttagaacgtcgaaaagccgttaaagaaacaaaacctctataccttatagtttgtgaaggaaaaaaaagtgagcctctatattttgaggaaatgagaaaccatgaaaggatatctactgttaagatcagagttactggcgagtgcggctctgctcctatttcagtagtcaatcatgcactagagctatactccaacctcctaagtgacggagaacaggtggaggtagtctactgtgtttttgatagagacaaccatgaaagttattacagggcccttgcgttagtttctcaaaaaaacaaagaaggtgtccctcttgtttcaatagcctcaatcccttgctttgagtattgggtcattctccactatagataccatagatctccatatgagagaaaggataaaagttcagtttccgcagatctatgcaaagagattcagcagtacatgccttacaagaaaggaggaaaagggctttatgagtcacttaaatccaaacaaggcgacgctttaaaaaatgcaaaaaaagcagtagaagactacggagctacaggccaagagaaccctgtaacttatgtgcacgaactagttgaggagctaattaagtattctagtatataa

SEQ ID NO: 345965 - DNA, 1275 bp, Pseudomonas aeruginosa
atgctagttcagttcagtgtgaaaaactttcgttccatcaaggagctttgtgagctcagcatggtggcctctaattactacaaggaaaatgaagtaaccaatactattgatactggacttgaagattgccctagactgctgaaatccattgtcatttatggggcaaatgctgctggcaaaagcacaattttagacgcaatgtcctttgttgaaagctttgttattcactcagcaaaaaatattaatgcgggagatgaaattcaagtttcgccttataagctctcagaggagagtagacagcaagactctgaatttgaaacaacactaattagtgaaggcattcgctatgattatgggatttgtgttaacgagaagagagttactgaagagtggttaattgcttaccctaaaggctccccgcaaaaatggtaccaccgagtatatgatcctcagaccgaggaatactactacaaattctcaaaatactttgaaggaggaagactaagaggagactggagaagacagaccagagataacgcggcgtttctttctgttgcgattcaatttaataacacgcaactacttccggtttacaactggttcctagcaagagtagcacagctacgcccagagaatctaagcagtcagttttctgctgagcaatgcctagataagaagattaaaaagtcagtcattgactttattgcaagcgcagatattcagattgctgatatcaaaattaaaaagagaaagcttggagacccatcttttattgaaaactttccgctcagtctacgcgaagacttaaagaaatccttaaaagacaaagattactttgaagttagttttttaagagaagacgactcaggaaatttaatctcctttgaccttgaggaggaatcgaagggaactatagggctctttagttttgccggcccttggattgatgttatccacaacgacttagttctttgtgttgatgaactagacagtagcttgcacccattaatcgttcatcatttgatagaagtccttcatcgctccgaaactaaagcgcagattatctttacgactcatgacacaaccattctctctaaaaaaattcttcgtcgagaccaagtctggttagtttctaaggataagaggcgaggcactctcctttaccctgtttccgattacaaagttagggagggggaggctctggagaaaggttatctatctggcaggtatggtgcaatcccattcatcaaggatctggcaatagatgggaactga

SEQ ID NO: 345966 - DNA, 1545 bp, Pseudomonas aeruginosa
atgaaaaaccttgaaagactcgtagaatacttccctacaggaacagcagaaggcgagcgccatattctcaggcaagcttttgtccaggcagaggagtaccctgaccttattactccacccccatacagcccaagaatattggtcggaaaaaaaggtagtggaaaaagtgctcttgtagagttttctatgagcttcttggaacgagcagagatcccagcgctcattctaaaaccgatggatatagattacgctgattttaaagatgacgcttcagtaggtgaactcacaagcttggcattcaaagccctgctctcagcgatagcggcaaagctaggtacaacaacaaccggattggtaacaggaagtgacaaggcgctttacgaagctgccatagaaaaaggcgagctctcacgagataaaatagaacgactcgctatcttccttcctaaaatagcgaagttatttggcggcgcagacctaagctcactactacctggcacaccaaaacttacaaaaaacgagcttgagggagcgataaagagaaacttggaacagtccaatggcggattctatctatttatcgatgacacagatcaaacagccgctccagacaagccagggcatttaaatagaatatgggctttcctgctggctgctcgtgagctatgtagtcgagtaggacaactgcgctgcatcattactgttcgcgaagagatctggcgccgccttgaaagtgataaggcggggcagagagatcaaacagaccatttcacggggctaatcagacgcctcagtcctactagggaacatatccgtagaataatagataggcgcatggcacttgctgctgctgacatcacaccagtatacaccagcccttggagtctattttttgaaggcacgatgccacacatgcccggaagcgaagtaactacagggtggccagatttaatagtgattcgttcaagagagcgtccacgagatgcagttcagttaattagtggatgcgcgcaacgagctctgagctcaggcctggatttaattaatgaggatgtttttgcatctgaaatgcaggaattctcgagagttcgcgcaagactcttagaacaagaggtagaatatgaatgcccagagatggagcaaataataagaacccttgccgacattgagtatgatcagtcttcattcaaagcaactgcggaagtaatcaggcaacactttagccgccttggctcttcattttcaattcatctttttggaataacattaaatctacaggcgaatgaagaccacctcttttcactttggaaattcttgtactcaataggacttctaaatgcacgaatttcagactccagagaaaaggatggctatcgccacatcttcccatcagaagacccaacattagtttcaaaggcaagatggaatgagatgcaagcaatcgtttgggaggttagtcctgcataccgagatcacttgatcaatattaagctacaaaagaaaaatcaattcgggctgccgccacaaggaagaagacgacgctaa

SEQ ID NO: 345967 - DNA, 2361 bp, Pseudomonas aeruginosa
atgtatatatctattgagcaatctaggattgttgatagggtaattaaagatagtgaggtagctcttcgtggttttgtctctgaggtgttgtgctcggcgtatcctgtgcatgatgattttttaaaggcactaaggtcaatatcaatatctgaagagttgatatattctaagagatttaatgttaagctgaaaggctatgtgagccggtctcgtgaggtatatagtttaattgtagaaagtaagcggacccttgaggcacgctgttttaatggtgatgttccttacgtgtcagagttaattgatcttcttcttattctatttaatgctcatttcgcagataaggaatttgttaagaactttagttctgtagaagagttccatttttgctgtgcgatttatcatcaaactagaaattatttatcccatccggcgtccaagccggtttctatccaagatgcaaacaaggctctatattttatagaaaatatcattgctgcgttagatgataaatatttctggtattcgagtcgggagagtataagggtcggaataaagcaatacctctcatctgaagatgtagttaaattaaaatttcagaatttaaaatttgcaacatccacgcataaaagcctcctctgtcgcgatgcgatagttgatcgtctttatgcttcactgctggggaacgatgttaggtatagattggctggctccgttgttctttatggatatggaggggttggtaagacggctatcactacagagtttttgtataggttggttagagataagaaagatggaaaatatccagatttgaactatcttttgttcttttcgagtaaggatgagtatctgcgggagaataagtctactggtgagctgtatattgatatggcgcgaccggagttttcaaattttgaagagcttaaacaacttatttgtagtgctctaaaaatagatgatgttgcatctatctcagaggatctgggaaggggtattattgcgatagacaatatagagaatattgaggagggcgaaaagtcaaaaattcttgaatttataagatttttgccaagaagtgttcagtttatcgtgacttcgagaaatgaggaggcttgtgaagaaaaaattcatgtggaagagtttcgaaatgatgatactggggttcaatttgtacaggagattgttgagtctgagggatttaacttagatgtaaataggaaaatggctgaaaggttattattcacaacgaaagggaatgcgctaattatagttcaggctcttaatattattgatcgaggggtttcaacttttgatcagataaccgcatcgctggaaagtatgaggtcacgtaattcagaaatgattgcgagcttcatgtacaagaatactttcgatggtgcgctgaagtacttgcgagagtcagcgtttcctgttgatgaaattatgagaataatctcactctatgatgagaggatcgaactatattcaattagtcgtcttgcggatttggatgtttatgaggccgagaaattttgtaattacttgttggagaggttgattttaaagaaagttggcgaatactatgagctaaatgagtttgcgaaaaggtttgtgtttataaaaatgcttcctgataaaattgagttaggtaaggtcagggacagaattaaagctcataaagagcgtatgaataaaaagcttcatgagctcgaagttgctctgggtagtaatacgattcttgcaaaaaatgtaaatgaatggcagcctagaaactatatagataaaatagttattgcggagctattttctttatatggtgaaggtgtaaaggctttggctagaaaaaataagtttgcatatgagaagtacctaaaagaatttgatgagcacttcttcattactaaacatccgtatattccactgcaaaaggcaaggttactaaaagaaggaatgaaaagattttatagaaatgataattctatagctactcaagttgagcacttgtatgaggaggcgatagaatcgattgaatttgactatagatatttaattggtggtgctgctcatgcatctttgctgatgttttttggcgtttttctatgtcagcatttaaaacagtatagccgtgctattaggttcttagaggatgctaaggaatactatggtagtgagaaagagaaggggtggttcacagtctgcaactatttatctattgcatatcgaggtatgcttataagtacaagagatgaagcttatagtgtgaaactcagaagtgttgttagggaggttgcagcgttcgacagttttgatgggtttgatattcctaggtttaagaaagaatttgtacggtatataaactga

SEQ ID NO: 345968 - DNA, 159 bp, Pseudomonas aeruginosa
atgcaagtcacttctggcatgcagtgcttcgacctcggcgatgaaaccctgttccagcatctggcgaaaacgctgcgcaatccgcgcgtgcaacacctggcgctgctcgggagcaatcgccagctgagcgacagtatacggcaattgattcctgcctga

SEQ ID NO: 345969 - DNA, 240 bp, Pseudomonas aeruginosa; identical to SEQ ID NO: 333079

SEQ ID NO: 345970 - DNA, 534 bp, Pseudomonas aeruginosa
atgcactacggcgacgcggaggcggcggtcagttgggtcggtcagattggcgacgtggactggccgacggtggacagttgccgaatcacgtgtgtgtcggaagatgagctgatggatcagcccggtctgatcgacacctattgccgtacctgcacggcggtcctgggtgatcaccgctgcaaggtgaacttggtcccgcatcgggtgacgctgacgccgcagagcgtgtcggactggatgatttccagcggcgtggtcgccggctacgccgacggctggttcacggctggctatgtcgagtggcaggtggacggtgacaactacgaccgccgacacatcgagcggcacgccggggcggacctctacattctgggcggtacccaaggcatcccggccggggcacaactgcgggtctatcccggctgcgacttcctcgctgaaacgtgcgatgcgaagttcgacaaccttctgaacttccggggcatcaacaagctgcaaggcaagtcgccgttcgatggcgaccaggtctggtga

SEQ ID NO: 345971 - DNA, 690 bp, Pseudomonas aeruginosa
atggcaaccccatcggcttccgagaaatctgttgcgcccatcgtcgtccccggccagctcacgctgcgtaccatccgcggcaagaacggcccgttcacggttggccgcctcgcgacgcacctcggtactttcgaggtcaaagacccggagctggagcagtaccccgaaggcaagtacgacggggaattcatcatcaggtacatcttcccgaagtcctatccggtcggcggcggcatgcggttcgagatccgtgccagcctcgacggcatgacgctcaacggcatcgacaaactcagccgcgacgaagcccgcagcttcgccacccaggacgtcgatccgctcgatgaagagcaaggggcgcagcctgcggcaacgccggccaagcccaccaaagcgtccaggcccgccaagcccgcacccgtgcaggcgtccgcggacccgctggtcgataccacgcccttcggcgtggatgcgccaccgcctgctacggccgctgcccccggcagcaccgaagacggtgacgccgcgctcttcggcctgctgtggccgctgggcgagtccgtgaaactggattcgaccatcgaccgccgcaccctgcgcgcgcagatcgcccgcctgggcgagctgggctacgcgctggacttcaagacgcaggagtggagccgccaggccgaaccaaaacctgcgtga

SEQ ID NO: 345972 - DNA, 1152 bp, Pseudomonas aeruginosa
atgaccgcgaaaaccctgcgcacctggtacctggtgcacaaatggaccagcctgatctccacgatcttcctgctgatgctttgcctcaccgggttgccgctgatcttccacgaggagatcgagcactacttcgagccgcatccgcagctcgagccgctcactgccgagtcgccgcgcatcgactacgacgacgtgatcgcccgcgccctggccgcccggccgggcgaagtggtgcgcttcctggtattcgaaaaggacgacccgctgggcctggtgatcagcgcgccgagcctggtaccgccgccggagaacggtcacatgcagccgttcgacgcgcgcaccggggaattcttcgacgcgctgccgccgccgggcggcttcatgtacctgatgctgaagctgcacaccgacctgttcctcggcctgcccggctacctgttcctcggcctgatgggcctgctgctggtggcctcgctggtgtccggggtggtggtatacacgccgttcatgcgcaagctggacttcgccacggtacgcgccgaacgcagccgtcgtctgaagtggctggacctgcacaacctgctgggcatcgtcaccctgtcctgggtactggtggtcggcgtgaccggggtgatcaacaccctggccctgccgatcctgatgctctggcaaggcgggcagttggcggaaatgaccgcgccctacaaggacgcgccgccgttacagcgcctcggctcgctcgacgcggccctggccacggcacgccgggcggcgccggacatggaggtcagcttcgtcggcttccccggcacccagttcagcagccagcatcactatgcggtgttcatgcgcggcaacacaccgctcaccgagcgcctgctgaagccggcactgatcgacgcgcagagcggcgaactcaccgacatgcgcgagatgccgctgtacgtgaagacgctcctgctgtcgcagccgctgcacttcggcgactacggcggcatgccgctgaagatcgtctgggcgctgctcgacctcgtcagcatcgtcatcctcgccagcggtctctacctctggctcggccgacgcaagacgccattggagaagcgcctggcggaactgccggacggcagcctggcgacggagggcaaggcatga

SEQ ID NO: 345973 - DNA, 795 bp, Pseudomonas aeruginosa
atgaaagagctcagccagcaaggtgagcctgcgctttccggcactccgcagcagtggcacgacatcgattggtgtcgggttcagcggaacgtccggggaatgcaggtgcgaattgcgaaggcttgtcgggaaggcaaatggcgcagggttaaatccctgcaacggatgctcacccgctcgaagtcagccagatacttggctgtacggagagtcacggaaaatcagggaagccgcacgacgggagtcgataagcaactctgggatacacccaacgcgaaatggaatgcggttggtttgttgaaggtgcggggatacaaggcacggccactacggcgcgtctacatcccgaagtcggatggacgggagcgccctctgggcataccgaccatgacggatagggccatgcaagcgctgtacatgctggccctgtctcccatcgccgaaacccgaggcgatccgaatagctacggcttcaggatcgaacgttgtacggcagatgcgatggcgcaattgttcgtatgcctatcccagaaagcctcggcccaatgggtgctggacgcagacatcgaagggttcttcgacaacatcaaccacgaatggctgctaaggagtgctcctacggatacacggatgcttcagcaatggttaaaagctggggtcgtccacaaggggcagttacacgcaacggacgcaggtacgccacaagggggaattatctcccccgtgttagcgaatctggcactggatggtctggaaacactcctcaagcaacacctagcagcttgtcggacttga

SEQ ID NO: 345974 - DNA, 369 bp, Pseudomonas aeruginosa; identical to SEQ ID NO: 330169

SEQ ID NO: 345975 - DNA, 468 bp, Pseudomonas aeruginosa
atgctcgcaaaactcgaacgactcatcagcgaaatcggcgacctcaacagcaagttgatcttgctggtcggtcccagccgcagcggcaagacccaactgctgcgccagctcagcgccaggctcaacatcgagccgctcaacgttggcctggaactggggcgccgattggccgccacgccgaacaacaagcgcggcttctccgcaggcgaactgctgcgtgagattgcgctgcttgaagcattcggggaacgaggcgaagccccgctgctgctcgacaatcttgagttgctgttcgagcccagcttgcagatcaacccgcttgacctcgtcaggcggctggctcactccaggcgcgtcgtggccgtttggcctggcgagctgcgcggtgatcggctgatttatgccgacatgagccatccagaacatcgtgactacagccaggacggcgtggtcgtactcgaaatttga

SEQ ID NO: 345976 - DNA, 1371 bp, Pseudomonas aeruginosa
atgagcaacacgctaaaagtccgggatgaccaggcccctatctgctttgaagcaagcgccgaggatgtcggcaagttcaagctttgcgaaggcgcagaagcctcctggctaacccaaggccaagctttcggcaccaaggagttgcgaagccgtgtagagccttggctgaccgccttattccagtcggagcatctttcgctgcttgctggctcaggattgacacatgccgtgcactatctggcggcagggaagcctgcggctggaatgaacgaagtagccctgaccagctacaaggacgaaatcgagaaagcagcgaaagaagccgcgcaaaaatcaggccgggaaacaggcaatctggaagatcaactgcgcgttgccaacgaattgctgcgagggctggaaatactgggcaactcagcagaagccgaaacgctacgggctgagctgaccagcgcgctggaagatttcgccaagtccatcctcgaaagtgaagccggtattgccgaggcgaatgaagacaagcgtgagcaggcgctcaatgtgctggtcaccttcctgatgagcttcgccagccgcaccggcgtgcgcgaccggctgaacatcttcacaaccaactacgaccggctgatcgaagccggggccgaactggcgggcctgcacctgttggatcgtttcctcggcaacctcatgccgatcttccgctcatcgcggctggatctggacatgcactacaacccgccaggcattcgcggcgaaccgcgctacctggagggagtcgcccgctttaccaagcttcacggctcggtggattggttgcaggttgatagagatattcgccgcgtcgggctgccgttcggcgccgatgaggtcgcgccctatctgcaagcgcccggactcaagggttccactgctcacaagctgatgatctaccccaatgccgccaaggaccgggaaacttcggattacccctatgtggaactgttccgagacctcgccgccgccgtgtgccgccctaacagcacgctgattacctatggctacagctttggcgacgagcacatcaaccgcgtcatccgcgacatgctcaccgtgccatccactcatctggtgatcattgcctataacgatccgcttggccgcatcatgcagacctaccaagagttggggcggccatcgcaaatcagcctgctgatcggcccggctctggcagatttgcaaattctgactgaaagcttcctgcccaaggcagccatcgacaagaccaccttccgcatgagcgaactgctcaaacagcgtttcggcactgaaacccatccaggcccggcagcagcgaaacctgggagcgattttgatggggcggctctggtatga

SEQ ID NO: 345977 - DNA, 2130 bp, Pseudomonas aeruginosa
atgactttctcgcccctggcctacgccgattcgctacgtattggcagcgtcgattttgtctcgcccgacgaaatcaaggttctgctggacatcgaagcacccgacaaccttgctctgaacacaggcactccacggccattcccgcgtatcaacggttatgtgctcgtgcctggcgaggcgggctacctggtcgcacaggtggagtggatcaccatcgagcggtctcagtaccccaagcgcaagggcatgcaggatttcggcctggtcgatttgccttatcccctgcgcaagatgagcctcaatcctctgggtgccctggtttacgaaggtcagatcgctggaaaggaacactacgccttccgccgcggggtggaagcctacccaacggtaggcgaccccgtactgctacccacccaaacccagctccgcgccatcgtcgaatccggcgataaccgccgggtgaagattggtgtcagcccgctggccgccaatgcggaggtcaagatcgaccctgatcgcctgttcggtcgtcatctggccgtgctgggtaacaccggcagcggcaaatcctgctcggtttccggtttgattcgctggtcgatggaggaagcccgaaaagaacgtggcggaacagaccccaatgctcgtttcatcgtgctcgaccccaacggcgaatacgccaaggcatttgagggtttgggtaaggtgcgcgtattcgctgttgagccgaaacctgacagtggcatcgagcagctacaggttccactctggttttggaacagtgccgagtggagtgcatttactcaagccagcgccaaggcgcaacggccgacattgatccaggcactgcgcgccgtgcgcgacggtgcggtggaaaccaccgtcacaccaagccacgacatgcgtcgtttcctgcgaacgctggtcagcgtgattcagatcgagcgcgctgccggacgcccctgggctaatttcccgcaccccaagaacttctttgaaaaaaccaggaagtggcaggaaggcttggggaacgatgcttcattcactgtggatgagaatgcggtactagatgcaatacgaggcaagattaccgccttcgccaacgcgcgttcaggccagtacccaaactacgatttcactgcaccagagatcgacgagtttttgggcctggtcaaggccgctcatgcggcctttggcggcagtgacaccgatattttgccgatcgatgcggacgtaccccgcgcttttaccggcgaccaactgctgcgcagtgttgaagccaatgctgaactgctaggagtctctgagtacgttgaaacaatgctcatgcgcattcgaacaattctgtccgatagtcgcatgaaaaccattgccggcaataccgatggtgtgacgctgcatcactggctagccaacaccatcggcgacaaccaagcgtccaacggtacggtaaccgtcatcgacctatcgctggttcccgctgaagtggtgcatatcgtcaccgccgttattgcccgtatgacgctggaggccatgcagcgctaccgcaagctcaaccacggcaaaacgctgcctaccgttctggtgatggaagaagcgcacacattcatcaaacgctaccacgacgatgctgagaaccagaactcagccgccatttgttgtcaggtgttcgagaaaatcgcccgcgaagggcgcaagttcggattgggtttggtgctgtcatcccagcgccccagcgagttatcacccacagtgctatctcaatgcaacagctacctgttgcaccgcatcagcaacgatcgcgatcaggaattggtgcacaagctagttcctgacaacctgcggggtctgctgcgcgatcttccttcgctcccatcacgccacgccatcctgctgggctgggcctctgagctgcccgtgctggtgcagatgaacgccctgcctgaaggccaacgacccaaatccgacgacccggacttttggtcggtatggtcgggcaagaaggaaaacgaaataggcgatgtggaagctgtcgagcggatcgtggattggacggcgattgcagaggactggcaacaagtggcacctgcgccagccccggatgcttccgatgaaggtggggcttgctaa

SEQ ID NO: 345978 - DNA, 1344 bp, Pseudomonas aeruginosa
atggccaaggcaaacggcttcgccgtactcctcacgaaagatcggatggacacattcctcggatgtgtggccggggagcggacgtttgccgaacctgtcgccgactttcaacacagccgaacagcacctttggtctgcttcgtggtcgatgcgggaaagttgacgcacattggtttggggcgtcgcggcgtgcgcgctggtacgggcttgagccgactgaacatcgacaaagcggaagaactgtcggagccaatatcagttcggaagctgctcaaccgcctgccgaagcgaaacgctgcatccatccgcaagcggttccagtcaggcggcttgttgaccgagaaaggcttctccgctgttgtcgaaaccctccgccaacttgcgccccaagccagcaccttgttggatcggttcagtgaaaccagaactgcccgcatccggcgattgcccgacaaggcaagggagaacctggcacagcagaaagaagctgtgctgacggcgctatcgattgccggactcagccgcgacccggttcaggaatgggcaccatcggacgaaacgccggtctcctttctggacggcttgcccagcgttcggctgcgcgaagacccgatggtggtcaacgacctgcaaaacctgccgggctttgaggtagtcaagacctacccctatggcgcagcggtattcgagtcggaggaaacgtcggaacgcctcaccatcatccttgccaatcgccttccgctcgaagagcaaaccggcaccgatctcatctacttcaacgaaacctaccagagctttgtcatggttcagtacaaggcgatggagcgtgaagacaggcgcaacaggccagccgaagccgtctatcgtttgcccgacgcgcagttgaaggaagaaatcgaccgcatggatgccgtgctcggcacgttgaaggcatgtgcgcccaacaccgacattggcggctaccggctgaccgaaaacccgttcttcctcaagctctgctcccggcttgtattcaacccggatgacgtgggcttggtgcccggcatgtacctgccgctggattactggaagctattggagaacgaccccggcatccaggggccgaggggtggtctgcggatcacctacgaaaacgcaaagcgtcatttcgacaacaccgcatttaccaccgtggtgtccaaggcgtgggtgggtacgacgcccagccagtcgcaggtgcttcgagacgtcattcgagtaactctggaaacgggtaaagcggtagccattgcgatcaagccgaaaaagcccgacgaaccccgagacgatgatcaagaagtagaagaggaaacactcaatgaatga

SEQ ID NO: 345979 - DNA, 660 bp, Pseudomonas aeruginosa
atgaatgatgtcgcctcattaatgatgcctgcgaacttgccggagtggctgacactggtcaacgtcctgttgaccgcgatatttgcaggactcacgttttttatcctgcgcgccaaccgcgcggcagttggtgccatgcgtgagcagatggcagatcagaatcgtccatttgtcgccgtgactgtgcaggtgcgcatgggcacacctgtcatccagttgctgatcaagaatgtgggacgctcgcctgcgcagaatcttcggctacgcctggatcgagatttctttcagtttggcgagcgagttgaccgtcgcaacctcgccaagcaatctgccttttcacaatctatcgactgcctgccgccaatgtcggagctgctgttcgatcttggaatgggcttcgatatatttgcaaacggagctgatcccgcgatttgcccgcatacgttccaagtatctgccgaatacgagtatgggaaaaacaagtacagcgaaaagacccacgtagatctgcgcccctacatcggcaccagcgtgcccaagcatcctgtggtggaagaactggaacgggttcggcagtccatcgacaaactgaccgccacagtcaagcagtctgcgaatgcggcaatcaaggcccaaagcgccgaggaaaaaaatgactga

SEQ ID NO: 345980 - DNA, 2796 bp, Pseudomonas aeruginosa
atgactgatctatttagcactacacaaaaaaaaactggcccggtggaatgtcttgggcagacgttcccgagcgatgaggctcgccgcgagcattacctaaagctgcttgcagagaagctcaaagatcctgagttccggaagattgaagggtttcctatcggatcggatgaagacattctggcgctttctgacccgccgtactacacggcatgtccgaatccattcataaacaaatttgtcgaggagcatatcacccactatgactcatcgattcactataagacggagcctttcttaaccgacgttagtgaagggaagaacgatccgatctataacgcacacagctaccacaccaaagttccccacaaggcgatcatgcggttcattctgcactatacgcagccgggtgaagtcgtgcttgattccttctgcggcacaggaatgaccggcgtcgcggcacagctttgcggggatcggaaagttgtcgagtcacttggatatcgggtggagtcagacggaacaatccttaaaaatctggatatttatgggaaaaatgaatggactccgttttctaaacttggagcgcgagttgcactcctaaatgaaatttctcctgcggcatccttcattgcgtcgaactataacgctgagcttgacgtcaacaaatttcatctagaggcaaaaagaatacttcaagatgtgatcgaccaatgtggctggatgtacgagacgtcacattccgatggcaggacggtaggtcgcataaatttcacactttggtccgatgttttcagttgccctaattgcgctgatgagatcgttttttgggacgtggcggcagacaaggaggcaggaaaggtccttgataagttttcgtgccctcattgcgcaacggttcttggcaagaaaggacttgatcgcgcttggacgtcattcattgatagttcgacagggctaactgttcgccaagcaaaacaagttccagtcctcatcaactactcagttggcaaatcaagatttgagaaaaaaccagatcaacaagatttggacttgatagagcgtatcctgacagagccggtaaaagattggtttccttctgatcggatgatcgaaggaggagagactcggcgaaatgactctgctggtatcacccatgtccaccatttctatacccggaggaatctgatagttctcgctcgattccgggagcggatattctccatgcgaggcaccgaggccagccctggattaggtctgtggttcacgtctagccacgtttgggccactcgcctgaatcgactactagcctccaattatttcggaggcggcggcggtgtcatcgggcaaacattacaaggaactctgtacgttagctccttagcagttgaaacgaactgcattgagaggttttctcttaggattagttcggttccgttcaccgctcacggtggttcctctctggtctccaccggcagtgccgaacgcattccggggcctgacaactccgttgactatgtttttgttgatcctccttttggggcaaatatcatgtattcggagctcaactcgctatgggaggcttggctaaaggtcagaaccaatccgtcgtcagaggccattgagagtcccgcgcagaagaagtcacttgatgactatcgggcattgatgacaaagagctttcgcgaggctttcagattattgaaaccaggtcgatggatgacggtggagttctctaatacgaaagcagccgtatggaatggaatccaaactgctcttcaggaggccgggtttgtggtggcaaacgttgctgcgctcgaaaaatcccataaaggttatagggcagtcactacaacaactgcggtcaagcaggatctagtcatatctgcatacaagccaaatggcgggcttgaagagcgattcaaggaaatagggggaacagatgattcagtttgggatttcgttaggacgcaccttggctatctgccgtcggtaaaaataagggcgggtgaactcgattttgtgtcggagcgtgacccgagaattatctttgatcgaatggttgcgtggtttgtgcgtcatggcacggcggtaccaatgtcatcgcatgagttccaagccggtctgttgcagcgattcgttgaacgcgacgggatgttctttttaccagagcaggttacggagtacgacaagaagcgtatgcaggttgctattgctcctcaaatggagatgtttgtttccgatgagcgcagcgcgattgattggctatccgactttctgaaacggcgcccctctacctatcaggagatcgggcctgaattcatggggcagcttggtgctggttggaagaaacacgagacaaagccagagcttttggccttgctagaggataactttctgaagtacggcggcacaggtgaggtgccgagccagatccacagctacctttcgaccaaccacaaggatttgcggggtttggagaagaacgacccagcccttgtggccaaagccaaggatcgctggtatgtgcctgatccgaacaaggcgcaagacttggagaaaaagcgcgagaaggccttgcttaaggagttcgatcagtaccgcgccttcactggccgtcgcctgaaggagttccgcttggaggcgctgcgggctggcttcagaacggcatggggcaataaggactatcagacgatcatcgacatcgccgccaaagtgcccgacgcagcactgcaagaggacgaaaagctgctcaccctgtatgacctcgccctgactcgtaccgaggatggtatttga

SEQ ID NO: 345981 - DNA, 1791 bp, Pseudomonas aeruginosa
atgaatcaggatgaactgcaggcacgacttaatggcatcgaatggaacgatttcgagtgcaagaaggcgcagcgggccgtgccggaagatgcctacaaaaccgtttcggcctttgccaatacggcaggcggctggctggtgtttggcgtcagtgaggtcaatggccggctggaagtgaccggcgttgaagagccggacaaggttcagaatgattttctggcggtgctgcgtggtgggcaaaagctcaatcgggtgatcagggtaacgccccatcgctttgaactggacggcaagcatgtgtttgtcttccacatcccggaaatgccgcgcctggagaagccggtgtatctcaagggcgacccgcgccagagttatttgcgacgtggcgcgggcgacgagcagttcacccagagcgaactggagcgttttttacgtgacgcggcgcaagagcggtatgacggcacagtgctgaccgagcttgatgcggacgcctgcttcgatctggataccgtcaagtggtatcaggcccagtttgcccggcgcaaccctgaacatgccgagatcaccgacccgatcgccttcctgctgaactggaactttgtggtcgagcaaggcggcaaattgcaccccactcgtgcgggcgtgctgctgtttggcacgggccgttttgttcgccagattctgcccaggcccgtgctggactaccagcgtatcgacacggcttttgaccagtggtctgctgaacagcgctggcatgaccgctatgtgttcgaggagaacatctttcagacctggcagggcctggtggcgcgctacatgcgtattgccgagcatccgttctcgctcgacccgacgacgctgcgccgcaacgatgatccgccggactatgtggccttccgtgaagcggccatcaacctgctgattcaccaggactatggtgaccacgggcgcaaggcctccatcaagttgtttaccgaccgcacggtgttctggaaccccggcgatgcctttgcgaccgaagccgagttgttggaccccactgaaaaggaagtgcgcaacccggccatcgtgaaggcgtttcgccgtattggtttgtcggatcaggcgggcaccggcattcgcgccattttccgcaactggcacgaactggggcgcaccccgccccagttgaaaaacaacaaggcgcccaaggattttgagctggtgctgatcaacaagcccctggtaaccgaggccatgcagcgcttgcgccaaaccctgggggcgaacttgacgcccgagcaggcgggtgtactggcgttggcgctgtcattaccagagagcgagccgctcaccctcacggcgatccgcggtctgggtatcagcaccacccagcaagcccgcgcggtggctgaccatctggtgcggcagcagttgctcgacccgctcagcgagacccagtttcaggcccgcgaggcgattcgtcagcgctttgcccaagaggcgcaagcgcaggccggggaccaagccggggccaagtcgggaccaagttgggaccaagttgggcctaagtcgggactcagtgccgagcagcaagcgttgttggctcagatgaccgacgaacacgatgttgccacattgatgcagtgggttggccgcagcaacaggagcaagttccgcgaggtggtgctgacacctttgttggcattggcactcgtcgaaatgaccatccctgacaagcccaacagcagcaagcagcgctatcgcctgactgcgcaaggcagagcgctgcgcgatgaggtgggccaatga

SEQ ID NO: 345982 - DNA, 1014 bp, Pseudomonas aeruginosa
atggacagaataggaatcgacacttgggcggacatcagcgcggaaagttggagctccctccttctgggtaacggcgccagcatcgccatccacaaggagtttgcatatccaacactccacagcgttgccgacgcaaaagggttgctcgcaaccactgcgccaatattcgccaagctcggaacgactgactttgagcatgtgttgctcgcatgctggtatgcggagcacgtcaacgccgccctgggatctccgtctgccgatatctctgcggcttatgcggaagtgcgcacggcattgatcgaagcggtgcacagtgtgcatccgatacatgccgatgtcgccgccgacctacaacgggtgggtgcgtttgccagcgtttttccgacagtcgttagcctgaactacgatctcaccctgtactgggccatgctgctgttcaatgcggcaaatggcagttggttcaaggacgccttccacggcggcgagttccagacagactgggaatatctgcggcggccctatgggcctgctggaggagcaacattggttttctatcctcacggcagtctcgcagttgcacgtgactaccttggagatgagacaaaactcgcggttggggcaggatctgcaggtgacttgcttgacacgattacccgcaagtgggcgtccgggcactatgtgccggtgttcgttagcgaaggaaccagcaaggaaaaagtcgctgcgatccgccggagtcactatctgacgaatgtgtatgaggaggtgctgccggcgctcggggagagtctggtcgtctatggctggagctttgacgaacgagaccaacacgtgcttgatgccatcgcggcgaataagccaaagcgaatggccgtctcggttttcactggtcagccagatggagatcagcaagcgttctgccaccaggttctgaaggctgcgggccgatccttgcctgccacagatgtgacgttcttcgattcgcagagcccgggttgctggaacaatccatga

SEQ ID NO: 345983 - DNA, 372 bp, Pseudomonas aeruginosa
gtgaacacgacaacccgcaccagaaccgcagaacgcctcggccgcaactttgggcgtggttggcgtgcctatgcacgtggcgaacggcaggcttcgcactggttggtatccaagggcttgccgatggctggggccaccacgctactgtggatggtcaagctggttgtgttgggattgctgttttatgtggctttctggatgacgctgttgttggtgggcttgctacttgtctctcgcggttttcgcaaaagcagtgatgatttttcgcaaccacgcgacgaactgcgtcatggtgaagcaggattcggcttgtactcgctggacgggtatcgcctcgacccgcatgaccccaacaatccgtatgacgactaa

SEQ ID NO: 345984 - DNA, 3960 bp, Pseudomonas aeruginosa
atgaatttgtatattgcgcttgacctaaataacagaggaattaatcgagctatcgccgacattcagcgccgccatcaggcgttcaaaaatgggtgcaacggtcgcgatggagcggaagttttgtatgagttgcttttcccaaacaacatgccggtcgcgggctatgtctccaatcggcagcgggacaagcaaaatccacgatacgcacagatggcgattcgggttaacgccgctgggcgggactggcctttcccggacggctgcgccttcatcgctacgggaagttggcccaccgactcctcttcgccgctctttctcattaacggcttcatcgagaccgccgacctgcctgcgcgctctttcgagcgcgaagtcactgcatttgccgtgcatgacagtctgcaattcacgccgggccagcagcgcattcagcgcgtcaataacctgctcacgccgcaactgctggccgacttgccgccaattacgcagcaaaccgaaaagcagttgaccgagtggactgaatttcttcgatggaaagaaagcctcatccgccacaaggcgcgcggcttgcgctacatcagccgtggatggcgcgacgagcagttggttttttccttggtcgcgcagagcgcacaggctttgcaaaaagaccgcaaggctttggggcgggatgatcttgtggcgtttcaggttggacaatccaaagaaccgtgggtgttcggattgcctgaaagggaggagcgccgccttcctcggctagggcaagctggcaaactctcggagcctgcatcggtgccgaaagatcggcaattacccaaggacgacaacttgccggaatgtccttggcctacgcccgtatttgccgagctgaccgtctcactgaccgaagacgacgcgaatgatctcgccaatgccgaggagccggatgccctgcgccagcgcatcctgagtcaaattccggagtccggttttctgtccatttcaacggcaggcgacatgagcctgatcaagcgccatcaacaggcgttgcggcagctgcaggagcaaggcggctatgcgccgtatctgactgattatctgttcgaagctgcacaggtttccgtaccgcagcgtctggagccagttacgcagtgggccaatgacaagctcaacccggcccagaaagaagccgtggtcaagattctgtctgcaccggatttatgcttggttcaagggccaccgggcacgggtaagactacggtgatcgcagaagccatcgtccaactggcgcggcgcgggcagcgggtactactggcatctcaggcgcataccgcagtggacaatgcgctggataggttggggcatgacggttccttgcgcgtagtgcggttggcacgaaatgaacgcaaggtgacagaagatggagcagccttcgcggggcaagcatccttgcagcgttactacaaggccttggccgggcaaaccgaagaccgtcttgtggtgtggaagcgtgctgacgaagacttgcgtctcttgctggagtggcatgaccgcgcggcttttgtgttgcacgacgagaaggagctgaccagtaggcgcgggcagcttgaagcggactttgcatcggcccgcagccagacaacgcagacacagcaggcgtatgacgctgcctgcgcgctgctggatgaggacaaggccaaacgtcagcgcctgcaaagcattcaggccttgctgcatggcgaagccgaaacgttgcatggcgacttgcgggatgtggaagcgcctgccagaaatctggtgcaaggccttgcttcctgcgaggctgcaggattgctcgtgaaattttctatggacgattggctggccgatgcaagcagtcgtggcgcaatgctggcgcatatgttggccgcgtggcggcgtttcacgaatgcgcgagaagctattgctgcggacatccgtcgtcttcgcgaagcagcgggcgccccgattcaggatgccagcacccgattacgtattgaatcgctccgaagcgaggtcaaagccttggaggagcagatggagaaggacgatgcttacgtagatgattggagagccgcgcgcaagaagctcaaagagttggagcaggctggtgtgggcttggagcgcagccgttatgacggtctgtttcgccaaacgtccgaatggtgcgctccgattaagaacgctactcaactggcagacgaaatggatgccagcctaactgcattggagaggacgcggccggtcatcgatcaggccatcgaaatcgtgaagcaatccacgcaggctcaattgtcgcaacccgcacctgaagccccgaacgatggccttgtgcgagccgcgcggaaccaggagcgcaacgcccaaagcaagatcgatgactgggtcgagcagcgcagacagcatgagcagaaggttcaggctctgttgcaggatgattcaatcacgcaaggcaaccgcttgccgctggaacctgctgcgaccttgtcgcagcgcgtcgaaactgttgcccaagtcatcaaggtcttggagcaacgtcaggccagccagcaacatcaacgccagacatgggggccgttgctggatgattggaaacgcgatttgaaccgcaacaacgccgcagaagaagactggaagcacctggaggcggattttctggcgagctgcaatgtggtggctattacctgcaacgaaaacgagcgcacgctggactatgtcgggcagacgagttttgatgtcgccatcattgacgaagtgagcaaggcgactccgctggaattgctgatgcccttgatgcgcgcacgccgcgctgtgctggtgggcgaccaccgtcagttgccgccgctgtttcaggaaggcgacgaagcccgcagcttcatggatgaagttgaagaaaacgaagcggccaacactgaggaaaacagcacaggtcaccctgccgaagcgcagaccttgctgacccgcgacaacctacgccgcttcgagagaatggtcacagcctcgttgttcaagtcgcatttcgagatggcggacgatgcgatccgcgcacgactcagtgtgcagttccgaatgcacccgcaaatcatggcgatggtgaaccacttttacgaaggtcagttggaatgcggcctccttcggcctgacgacgatccagacccgaagcttcgccgtgttcacggactgacggtgaagaatgtgaacggtggctcacccttactcactccggatgaccatgcgttgtgggtggacacaacctacaacctgcacaaccagattcaccgtgaagacatggacggcaaccagccacggcgcaccaataagctggaagcggagttgattgcagagacgctagagcaaattgagcggcaatctgctgcacagggctactcccggtcaaacaagcgcaaagtcggcgtggtgtctttctatgctaatcaatgccgagaaattcgcgctgctattcgccgccgccgcccacagggtaccaatggtcgatttgaatgtctcgatgttgaagtcaataccgtgattcgctatcagggcaaggaaaagtcgatcgtgctggtcagcatggtgcgacacgatggatacgaccctttgcgctcgggcaatcaaccccggcgtcgctccagcaaggccaatgtcgcccggttcgaatttattaatgtggccttttctcgcgcgcaggcgctgctggtcgtcttcggcgcgaaaagcatgtatgcgtcctacgaggtggatttgccgcgtatggacagcgcaggcagcgtgaagcgagccgtttacaaggacattctggatcaactggagcgcgatgcacggctggttccggcaaggcagttgatgtcaccggatatgctgccccagcagccacaacagcaacgtggcaggttcaatgccccacccaaccgggcggctacgcccctgggcgacaagggcggtaatcggggggcgcgcgtatga

SEQ ID NO: 345985 - DNA, 2400 bp, Pseudomonas aeruginosa
atgaagctggcagaaatttccgttcccttgcccttgtatcgcattgaatccgaggtgacctatcacaccgagcgcaaacccacggtgtttgaacggatggtattgcgactgtgtgatcctgggctccatttacctgataaacagagcctgtccttgcttggtgttttccgggatcaattgggcgcaggtgatgtgcgtgaactgctggaaggctgcgtatctgaactttccgctttgggagcactgcccaagcgttacgctcttgatacgctcgaggtgcctctaactgagcttgaattgactgccgatggcttgcaatttttgcgtagcgacagcctgccggtgcgctcgcgcacgatcaaagtcagtcatcactacgatcctatcggtgatgagatcaaaccgaccaagagggatggtgggctgcagaaccaaggcaacatgagccgcatgagctccgtcgacaacgctttgaggccgcaaaatccgttgccgcaagtcgaacgcgccatagcgcaggaaacgtatgactggaaaaaccctgcgacagttgtagaccgcattgcgcccgtggttcagctatctggatggggagagcgcaggctcgaaatctcgtgcagcgaggatggtgtgctgtccgcgagtgctccgcgtgatgccgcattgcagcgctggctggagcaagcacaatccgaactggcatgggaaattctgcttgctggcgcactgacaagcgaaccgaatgcttctctgcccgtcattgactcttctgttttgcgcgatgcccgtactgtccgtcccattacagcaactaataggggtgcagtcagagcgcggttgtgcatcgttgcgcaaggcgttgcggcggatgcggcaacacccaccattgttttatcgtctgaagtgaacgcaccggaactggttgccaatggcaaacaaccgacagtattcacactgcttgtgccacctcccgcaggaatgatcacgggatttcgtagcttgtctctgccacagatcggcggagcgagcgctcaagcagaagtagccggtaacctccgcctctattgggccgggcagccgcgcctgtgtggcctggcggtaactttgaacgaccaggctgcaaccgagctttgggccaagctgcgcagagatttagaaggggcttgcgagcactctgatgacccacgcattgccttcatgcccgtggcatggcgggatgtcgatgcactcggcgaaacggtgtggccgtggcttgccacacgtgctaaacagccactgggcgatctgattgcattggtcgaacccgctacacaagcaattggtttgtggtggcccggcagaaaagactggagatctgcgtgggaaggatctctggaaaaagccattcatgagtcgttgaggcatacgcccaatcagctggaacctgaaaaagtcgtttctcttttgacccaggtggctcagatgttgtctgcagacaaggctgtgcctctgcaagccgcgctactgcatcatgcggcgcccattcgcgccgtggagtcattggcaaagctgcgatctgccttgccttccaccactgcgattccagaagaattgctctccatcgaattgcggcaagtgtggctggaacacgcattggagcgcaaagagttgaagctgtatggcccgcacgccatacagcagccgatgcaagatattcagaaagccgttcaggacgtttatcggagtattggcgaacaggcgttgaaagcggctggtaatagccaaatggatgtgcgcaccttgacccctcatgccttggatgctgttcgcacttggcgcaaagctgcgggaaatctccacactctaaacgtatcgtcactccactggggtgcgttgaatgaagaggtagaaagctggggccttctggcgcaagagaagctggctcctgtcgagattgggcatcgtatcgtcgtagtggataccagcgctctgatggagcatcctgagcttctgcatggtctgatctccaacgatattttggtggtgcctcttcgcgttctgagcgagctggatggtttgaagagcagcgaggatgagactcgcgcggccaaggcacgctcggccattcgtcagttggatgcaaactcgtcccgtatccgccatgaaaaagaccacacagccctactacctgccgaatggggtgccagagagtccgatcatgccattctttcaacggcgctgtttttccggctgaatgcagttttgtttgtgagtaatgacattaatctgcgcaataaagcgaagtctcttggtttgaatacgcaagattccaagtcatatgcgtcttcgcgccttgtgccagctgtcgcgtcagaagcgcacgttcagataaaaaacaaacaaaaaaacaaaaggagataa

SEQ ID NO: 345986 - DNA, 1146 bp, Pseudomonas aeruginosa
atgagtcgagctgatgagtaccgcaatcgaattgaacgccagcgtaaacaagagcttgatcggcagcgtgtgcgtgaaacaacacgcccttttgtggagcgctatcgaagcctattgaatgatgttgttagtcaagggctgagtgacgtgattccagcagagtttcgtgagctgagttctgaactcaggcgcatggaggctttgctggattccgacccgtttgccgccagagatatgagccgttccctgggtggtcgattccacgggttaccacgttttgcgcgtgagcagcgccgttcccgtcaagaagcggagctggccgcagtcgaggcattccgcaaagcacagcaagctgaggtcgaacgacagttgcagctgaaggcagaacttgaggcagcatggcgcgaaggcttgagcggttggagcacaccagtcgcactcaatgctgcgttcggtgagttgcagcaactacgcgggcgactacttggtaatgctggcaacaacatgaccccggcgcaaatttcatccgctttgcgcgaagttcagcaacgatatgaagaggacgctgaacgccagttactggaaatgaaaaagcgtgcgcagcgcgaggccgtgaccgatgtgctgacgctgcaaagacagcagttggaacatgaagcgaataagggcgctggtgagcgcgctgccaagttgcgcgaggcgttggctcatgcgacaggactggctcctgaagaacaggccgaagctttgaaccaactggcgcaagaacaggatgaagcagccgtggacgaaagccagcgtcgtgaagttgtgcgggcggtgtatcagtctctgcaacaagctggttttgtcgtggatggccccgaacatctcacatcacaagggcaagatgaagtactgattcgcgcccgtcgtcctgctggcgcgcaggcggatttccgcgtcaacttgagcggccatctcagctacaagtttcatcagtacaaaggtaaaacgtgcgagaaagatgtcgcccctgtcatggcaacgctacaagatgcttacgggattagcctgagcgacaagcgcgtgatatgggtcaatccagatgatctggatcaagatgctcgcccttaccctgatgcgacagaggagagaagcaaatga

SEQ ID NO: 345987 - DNA, 1863 bp, Pseudomonas aeruginosa
atgagttcaactttgttgacttggcaggaagactttcgtcgcgaatgcggcatacgacgcggtgtgatattgcatggcaacacgggtgatttgacatccgatcccgaagcgccagggcaatggattgctttgccgaccgcgttgatgaacctgctccgtcagcgcgggtaccagcatgtggttttctggaaccgcatcaacggtgtcagtggcgttgatgcgagaacctggggagaattgcaaagctccgttacgccacatgcagtgagagacagcaagtccgaggggagcgcctatgacatgggcgaattgccacctacatctgtgccgaatcccgcatccagcggcatttcggcaggcgcagatgacttgctggctgttgctgcgcaatggctgcgacaaccacgtaccgaaaagccagtcgcttttgtgctggactggacgcaatacttgtttggtagcgtcaactcgctgagtgagaacgagcgcggctggctgctgcgtctggggcaagcgactcgtgatgccgccgtggttcgcaatgctgaaagcattggccaaccgcaatcactgctggtgctgctgtgcgggggcttgaatgtgttgcctccatcgctctatctgaacaatccactatttagggaaatagcaattcccttgccgacaaggcagattcgcgagtctgctgtattgggattgaaagaagtgtttcggctgcagcccattttgcagcaaggcgggcgggagctggctgacttcgtggatggactggaaggccagagtattcgcgacattcacaatctcgcacgactttctcgacaagagactgaggtctcaagtgcgctgtccctactcaatttgtatcgccacggccgcaggcacagtccttgggagcaactggatcacaaaaaacttcagaccattgtcgaaacgctggggcggcgcgtcaaaggtcaaaatgaggccattgagtcggtacgccgcatcctcgtgcgcgccttcacaggactatcgggacttcaacactcatacaggcaacgcactcccaagggcgtattgttttttgttggcccaacgggcgtcggtaaaactgaactagcaaagtctattgccgaatttctctttggcgatgaagaagcctgtcttcgcttcgatatgtcggagttcaaccacgagcatgctgaccagcgattggttggggcaccgccaggttacgtgggctatgaggctggtgggcaactgactaacgcggtcaaacaaagaccattttctctgttgttgttcgatgaaattgagaaggcgcatccgcgtatcctcgacaagtttttacaaatcctagaagacgggcgcttgacggatggtaagggtgaaacggtgatgttttcggacaccgtcatcgtattcacctcaaacatcggtgcagccgaagtgagccatgaaagccaggatgtacgcaatgaattcatccaaaaggtgcgacagcatttcgtgcacgaattaaagcgccctgaattgctagggcgcattggcgaagccaacatcattcctttcaacttcatgcgtgatgatggcttcttaattgacattgcccgcgccaagctggagccattgcgcaaaggcctgaaagacaaatggggtgtttcggatttgaggctagttaaggaggccgagatactggccttgctggtcagggaagtggatcgaggaacgggtggtcgcggcgtccctaacgcactgaccaataagctgattgatccattggccgatttcctatttgcacaaatggccgcccctgatcagatccggggaaaggcaattgaagttcatattgccggtggaaaattgttattcgagctggagtga

SEQ ID NO: 345988 - DNA, 1032 bp, Pseudomonas aeruginosa
atggagcagttctatttcgttatcacggaacgctgcaacctaacgtgttcgcattgcattcgcgactcatctccttaccgcgacgaaactgcggaaactggcatgatcaaaaatgcgctaacgcagattgcgcgcagccatccagacagcctggtgttgctgagcggcggagaaccgacgctgcatcgtcatttcctggagctactcgatttcgggctgcagctcggactgaccatcaccatcaatacgaatggcgtgacttcgtttttcaatgaggccacgctgaaagagctggcacagcacgcccgtctgtccgtgcaggtatccctggacggcgacgaggcaatgcatgacgcgattcgcgggcccgattcctatcgcaaggcagtgcgaactctgagaaagctcgtggagcacggcattcgttgcagtgtctcgacgacggtcgtggatatcgacttcatggcacgtgctgatactttcatcgcctcgttggacacgctcggattggcccacattgccatcaaacgggcgacttatgcgggcagagcggcgagtggtatcgacgtagacggggaagagtggaacgaacacgtgtaccgtttgcgagcgctgccaactaagacgcgtctgaaaatgatgccgatgtacgactttgatcgcctcgacgcactttccgacgacgtactgagcgaacttgaattgcctccgtcggcaacgaattgtggagcaggcacggcgaaagtctatatctataccaatggagacgtgtgcccgtgcacttgcttcaaggatcggccaatgggaaatctgtgcctatcagatctcgacgcaattcttgccaggccgccaactattcaggtcgagcatcctgcttgcaacgcgtgtcgctatttcgggctgtgtcgtggcggttgcctgggaagcggttatcaaactaccgggacaatcggagcacccgatccgcgctgccccaaggttgccagcacgggcggtaagcgagaaaggatccttcattttcaacgcccttaa

SEQ ID NO: 345989 - DNA, 906 bp, Pseudomonas aeruginosa
atgagtgaagaaaccgattccacccttcagttcctgctgggcgatataccgacgccacgcttttttagcgagtcttatggtaagcgcacgctgcacatcacaggttcgccagacaagtttgcgcatctatttgcgctgagtgatctcaatgccatcctcaacttttcgtcgctactgtacccccgcgtccgagtcaccgatcatcgcaacacgatccacaaatatgatctgatcgacgacaaggatcggtacagcaacaacctcaacaacgaactgaatcggaagaagattctgctggccatcgcccgtggaggcaccctcgtctatgatcgcatccaggagtgtcacccgccgctcgagtcatttgtcgaccagctcagtgaagagactcaaacccgcgtaagcgtcaacggttactacactgcgcggcgtacgcagggggttaacgttcatttcgaccggcacgatgtttttgccatccagatccatggcagcaagcgttggttttatcgcgaggactcgcatgtgctgtctcgcgcgatgcgccaccagtctgtaccgccggtggatgaaaaattcactggctggcagtccgtgctcttgaagcagggcgacgtgttctattgcccgcgagggatctggcactttacgcagacagaggaaaatcattccgcccatctggcgctcggttggtatccgttgacgctcggggattggatcaagaaattagagtcgcatccggagattggggagctgctggaggagtatgtgcagcagccatgcctgaaaggcgcttcaaggcaaaacaccgccgcgctcgacaacctgattgatgcgttgcgtaaggaagccagccgcccatttcccccgctcacgcggccacgaccatatctcgagctggaatga

SEQ ID NO: 345990 - DNA, 1311 bp, Pseudomonas aeruginosa
atgctcaatcagtgtctgatttgtcggccatgttcggcatgtggaaagaggctgaccactgcgacaaggactttagctgatctttgctcgcgatttcgcatgaatgaatccttgcagctcgtttcggggctgcccaaggagacagagggggaagctttactcgtcgaggccctgagcgctcagggcgccaagcctcatcttagccggctgtccgatcacgagcttgcaaagcgcgatggtgctagccatccggttgttgtgctgctgttgccgatttttggcgacaacgatcttacggacaaagtacgcattcgcctcgcccgcctagcgtcgtgcgatagttatcgagaatgcgccattgtggtggtcgcgcacggcgatcgtcatgcatcagacgaattcgtcactcccgaaacgccattcagcatcaaagtccgtcgtctattcagcggtgccggcatctttgagatgctggagaccaagctcgatcggttcaccgctgccaccttggctcgcgaaattttgaatctagccgatgcgacgagttttagtgatgtcttcgaattgaactgcattgctcgcctcttgccgcgagcaccccagtggaatgcgcgcaagcgtatgcttgacttctacgactccagcgccggaagcagccttttgaaacctgccgagcgtgcgactcggaagcgtatcgcaagccatattcaagtaatcgctccacgcatcttgaagatgactcacgccggtctcggtgatgatgcgctagccgatttgggggcgacgcttcatgctgaagtgatcgattttggcagtaatgctttttcatgggaggggcttgcgtcgaagttgggcatttgtcggtggctgggcttggcggcaaacggcctcaagcagatgcccctcaggcagctgcctcaaggactagagtatctctatctgcaaaaaaatgatcttcatgagtttgcagcgatgccagtggaagtggcacgaattaagtcgctcagcctttatcgaaatcgactgactacatttaattggcccgcagggcaatcggccctttctcgactcaaccttggtgcgaatccgctcgtatccctgcccgagacgctaagtgagtgtgccgcactggagtatcttggcttggccagaacgcagatctcgcgtttgcctgagtgggtcttttctattcagaagctgcgcgaactagatatcagctacatcgaagaccggattccgccagcacagatcgcgcacttgcgcgcacggcgcgttgcgttaattacacggcccggattggtaatgccatga

SEQ ID NO: 345991 - DNA, 210 bp, Pseudomonas aeruginosa
gtgaaccacgaaagcgacacgctcgaccaggagatccgcaatctcaagaccgaattggagctgcgccgcgagctggcgaacaactcgcccatggccatcatccagcgccacggcacgcgcgcggctggctcgcgtggcatctacgaaggcgatcccattcccgaccgcctcgaccggctccagaagggcaatccgggaggcaacccatga

SEQ ID NO: 345992 - DNA, 384 bp, Pseudomonas aeruginosa
atgttggctccgatcaggctgcgcgccgcgcatcgcggcgtgcccacttttctcgtgacggccctactgatggggcagtcttcgatggcgttggccgaatccccgatgcagcgtcaggagctggttgccgcgctgcgtcagctcgacgcgctggagcgcaccgtcgcagatagcgcgacgcatacccccatcacaccgggcgagcgctaccacttcgattacccgcgactactggctgaccttgagcgtgtgcgcgctggcatcctggcccatctcacaccgtcgcgcgcccagccgcgcgacctctccgaactgactggcgagtaccgcactgagcgtgctgccccgccatcgctgccgacgactgcgcagggcagaccatga

SEQ ID NO: 345993 - DNA, 1893 bp, Pseudomonas aeruginosa
atgctttccctgttccagcgaaaacggcccgcggtcgctaccgctccaacgccaccacccgcatccgacctcccgaaagggttgatgcggcccgagtcggccgcatcgctgctggccaccccgcgtcggcagaagctgctggagcacatctggcagcgcacgtctctgtcgcgcaagcagttcgccgtcctgtaccgcgcgccgctggagcgctacgccgaactggttcaggccttcccggcttccgaatcgcatcatcatgcgtacccgggcgggatgctcgaccatggcctggagatcgttgcctatgccctcaagctgcggcagtcccatctgcttcccatcggcgcaagccccgaggaccaagctgcgcaggctgaagcctggactgctgcggtcgcctatgccgcgttgttgcacgacatcggcaagatcgccgtcgatctgcacgtcgaactggccgatggctcgctgtggcacccgtggtacggtccgctgcaccagccgtaccgcttccgctaccgcgacgatcgcgaataccgcctgcacagcgcggcgacgggcttgctctaccgccaactgctggacacccaactcctggactggctcagtgactatcgcgacctgtggggaccgctgctctacgtcctggccggccagtacgagcatgccggtgtgctgggcgaactcgtggtgcaggccgaccgcgcctccgtggcccaggaactgggcggcgatccggcgcgcgccatggccgcgcccaagcacgcgctgcaacgcaagctgcttgacgggttgcgctacctgctcaaggaagagttgaagttgaatcagcccgaggcctccgatggctggctcaccgaggatgccttgtggctggtgagcaagacggtctcggacaagctgcgcgcgcacctgttatcgcagggcatcgatggcatccctgcgaacaacaccgccgtcttcaacgtgctgcaggaccacggcatgttgcagcccacactggacgggaaggcggtctggcgggcgaccgtgaccagcaacgccggctggacccactcattcacgctgctgcgcctcgcacctgcgctgatctgggaggctggcgagcgaccggcgccgttcgccgggacggtagcgatcgacacgtcacctgtcgagaagcacgccgctgcggcatcgtcgccggaggtcgcggcgaaaccgaccccaggaggtcaggaatcgccgccatgggaaggcggcagcgctgctgacccaattatcgcccccctggctgaggccatgcccgacgtcatggaggatctgctgacgatggtaggaatgggcgattcgtccgccacacagcaggatgagtcaaccatccccaccgaactctctgccacacgccctgaagcaccaccaccatcgatcgtggcatcttcaccctcatcaccggcgcccgcggccacaccagcagcgacaacggtgcagccatctggcgagcacttcatggcatggctgaaacaggggattgcctcgcgtcggctcatcatcaatgacgcgaaggcactcgtgcataccgtcagcgataccgcatacttggtcagcccaggagtgttccagcgatacgctcaagagcatccgcagttggcagccattgcccgccaggaaaaactggagccgtggcagtgggcacaaaagcgcttcgagaagctggccgcgcaccgcaagcaggccagcggcctgaacatctggacttgtcacgtctcagggccgcgcaaatcgcggcagttgcacggctacctgttgacgcagcccggtgcgttgttcgagcgagtgccgcccaacaacccctacttgtgcctcttcaacgaggaggcggggcgtgaagtctcgctggctgcgaaatga

SEQ ID NO: 345994 - DNA, 594 bp, Pseudomonas aeruginosa
gtgtcgcacggaatgcccagcgacccggccgccagcggctggtggagcagctggatatcaggccagatcggcagcgcccaaatgcgcgcgccccagccgaacagcgtcatgtccagcagctgccgctcgcgatccaccgcgtacatgttcgcgtcgaactctcggcgcggcgccaggcgcatggctcggcgctgggtcacggccgattcgctttgcaggatatttgtcgatgcgctcaggcgttcgacgatgctgtcgccccagtccggtgcgaacgtccaggcgatgatgcgattgccagtgatgaccaggaccaggttcggctcgccctggagtctccagacgatcctcgcattgacgacgggcgggccgtccgtgccaatgctgacggtccaggtgcgttcctccagggcggcgaaacccagcggcggcgacgcctggccagacagcgtgatgccgtctgcggcttcgcggtcgattgcggtcagcgtgcgcggactgaaatatgcgttccagactgatgccggtcgtatctgggtgctgacgacgttgcccagttccattgcggtcggaatcaaccagaggcggttgtag

SEQ ID NO: 345995 - DNA, 924 bp, Pseudomonas aeruginosa; identical to SEQ ID NO: 325920

SEQ ID NO: 345996 - DNA, 1239 bp, Pseudomonas aeruginosa
atgagcatcactgaacaggtcgacgtcgccatcgtcggcagcggtcccgccggattggcggccgccatcgaactacgccgccagggcgtcgcccgggtctgcgtgctggagcgcgacggcgaggccggcggtataccccggcattgcgcgcatccgccgttcggcctgcgcgagcacggccgcctgttgaccggcccggcctacgcgctgcgtaacgtcgaacaggctgaacgggccggggtggatatccgcctgcgccatagcgtggtcgctctcgccgccgccggtctgctgcaactggccacccccgaaggcccgcgcagtctgcgcgcgacacgcgtgctgctggccaccggcgcacgcgagacgccgcgctcggcgcgcctgttgggcggcgaccggccgctgggcgtgatcaataccggcgcgctgcaagcctacctccatctgcaaggcctgaagccgttcgaacggccgctgatcgtcggcaccgagctggtcagcctgtccgccgtgatgagctgccggcgtgccggcatccgcccggtggccatgctcgaacgcaacgcacgggccaccgcgcgttggccgctatcgctgtttcccaggctgtgcggagtgccgatgcacttctccagcgagctgctggagatcgaaggccgcggccgggtcgaggcggcgcgggtacgcctgggcgacgggcgcgttgaacggatcgcctgcgacggcatccttctcagcggacgcttcgttcccgaatcgagcctggtccgcctcagccacctggaactggacccggccagcggcggcccgcgcatcgatcagttcggccgctgctccgaccccgcctatttcgccgccggcaacctgctccggccgatcgaaaccgccggctggtcgttccgcgagggacgaaggatcgccggcctgctggccgccgacctgcgggccgaactgccggtcgccgcgcccggtatcgccatcgattgcagcggtccgctcaagctgtgcgtgccgcagcggctgctggccgacccgacacccggcctggcgcatctacagctacgcgtaagcgaggccgccagcggccgcctgcggatcctggccgatggtcgcccggtgtgggagcgcgccctgtcctgcctgccggagcgccgcctgctggtgccgctggccgccctgcgcctaccgccggacacccgacgcctggaagtcgccttcctcacctccggccactga

SEQ ID NO: 345997 - DNA, 816 bp, Pseudomonas aeruginosa
atgactctctatatggggcctaacaccggcctgctgatcaacggcttgccgggagaagggcattacagcgatctgattcggatgtggcgctgggatgactttctgaggcagccggtcgtcaaggggcgcgtcgccgcgctcccgaccagcggccaggccgagggggacacgtacattttcactggctccggctccaatcagaaccgcctagcgcgctggtgggcaacgggcgccaccacggcaatttgggagtacatgccgccacggctgggctggcgtgtccaggtcgcaaacgagacgacgccgagcggccaggtcaagacgtatgagttcgggcagtggctggacggaactggtgggcgggatggccgacgcgccgagcgacggaaaggcatatgcccgcgaaagcggcgcctggacggagctgggatcggcagcgaaatcggcgctcaacgttctgccgttcatgaacctgatgcccgacatgggccgcttcgcgggaaccgcagccaaccctctggctacgatgttcacaacgtcatggactccaagcaccttcatcaatggctggaacggcgccaccctcgcagatgggggcaagtttgtgttcgacaacagcacgaacggcggggcggggccggcgctcaatgcgcgggtgcaggcgcttctcgcggcaatgggccggacgtggacgtcagtgtcccgatacggggtcgagttcttcaccacggtgctgacagcgggatcgcagacaactaccggctcggccggcgcggatggggttacgcggtatctgtgctgctccaacggcagtaa

SEQ ID NO: 345998 - DNA, 534 bp, Pseudomonas aeruginosa
atgcactacggcgacaccgaggcagcggtttcctgggtaggccagattggcgatgtggactggccgaccatggatagctgccgcataacgtgcgtgtccgaagacgagctgatggaccagccgggcttgatcgacacctactgccgcacctgcacggccatcgttggcgaccaccgttgcaaggtcaacctcgtcccgtatcgcgtgacgctgacgccgcagagcatcagcggctgggtgatctccagcggcgtggtcgccggctacgccgatgggtggtttaccgggggctatgtggagtggcaggtggacggcgataactacgaccgccgcttcatcgagcagcacgccggggccgatctgcacatcctgggcggcaccgagggcattccggctgggagccagctgcgagtttatccgggttgcgacgggctcgcggaaacctgcgacagcaaattcggcaacatcctgaacttccggggcttcaacaagctgcaaggcaagtcgccgttcgacggcgaccaagtctggtga

SEQ ID NO: 345999 - DNA, 1308 bp, Pseudomonas aeruginosa
atgacaaagacctccaaaaaccgacatcacgtcgtcattatcggagcgggcttcggcgggatcgaggttgccaaccagcttgctggtgccgaggtcgatgtgacgatcatcgaccggcgcaatcatcacctgttccagccgctgctttaccaggtcgcaggggcatctctctcgacatccgagatcgcctggcctattcgctatctattccgaaatcgcccggaagtgaacaccttgatggcggaagtggaaggtatcgaccaggacgcgcgtcaggtcattctcaacaatggctcgcgccaaacctacgacacgctcgtactcgcgacaggtgctacccatgcctatttcggacacgacgaatggggggctttcgcgccggggttgaagacgctggaagatgccacgaccattcgaggccgaatcctcgcggctttcgaggaggccgagcgcacgagcgatcctcagcagcgtgccgcgctgcagacgttcgtcatcatcggtggtggtcccaccggggttgaattggccgggaccatcgccgagcttgcacgagacacgctggcgcgtgacttccgctcgatcgacccgagcacgtcccgggttgtactgatcgaggcgggcccgcgtctgttgtccgtctttccagaggatctttcggcctatacgcgccaggcactcgaaaagctcggggtcgaggtcgtgctgggtacgccggtcaccgaatgctcggccgacggcgtggtgtatggcggcaagcctctttcggccaagaccatcgtttgggccgccggcgtccaggcgtctcccgcggctcgctggttgggtgctgcgtctgatcgtgcgggtcgagtggtcgttggtcccgacctgacggtggccggtcgcccggaggtcttcgccatcggcgataccgcctcgtgcaccatggctgatgggaagcccgtaccgggcatcgcccccgccgccaaacagcaaggcaagtacgtcgccaacctcattggacggcgtttgaaaggcaagcccgctgacgggcctttcaaataccggcatcaggggaacctggccaccatcggccgcagcctggccgtaattgacatggggcgggttaagctgcgtggagcctttgcgtggtggatctggaagctcgcgcatatctactttctgatcggtacgcgaaatcgtctcagcgtcgcgttgagctgggtatggaaccatagcatcggctaccgcggctctcgcatcatcatgcatgcgattagcgacaaagagcccacggcgttggataaatccggctctctggattga

SEQ ID NO: 346000 - DNA, 297 bp, Pseudomonas aeruginosa; identical to SEQ ID NO: 324251

SEQ ID NO: 346001 - DNA, 510 bp, Pseudomonas aeruginosa
gtgccgcccgaatcggtctatgcgttcacgttctacgtgttccagacgctgaaccgctggccgaccaatggcgaagaagactactcgcgcaacctccacacgctctcgccgtacctcaccccgtcctgccaggccttccttcgcgcggactacgactaccgccgctccaccggcgagctacgccagcgcgtgcgcggcatctacgagattcccggccgcggctatggcgacgaccccacggcgcgcgtgcgcaccgtgtccgatcgcgactgggtggtgacgctggacatcacggcggacgagtactacggcgccgagcaggtcaagcgcgccctggtgcgttatccgatcaaggtcacgcgggtggacgtcgatcccgcccgcaacccgttcggcctggcgctggactgctacgaaggcgcgccccagcgcatcagtgcaccggagccggcgcgcccggcgtcgagtggcctgtctccgcaagcgcctcaaggaggaaacaccccatga

SEQ ID NO: 346002 - DNA, 912 bp, Pseudomonas aeruginosa
atgaagcatcctgtactcgcgctgctggggctactggccgtggccgcggcacccgtcgcccaggcggtggagatcctgcgttgggaacgcatgccactggcagtgccgctgaaggtcggtcaggaacgcatcgtgttcatcgaccggaacgtgcgcgtgggcgtgcccgcgggcgtgggcgaacgcctgcgcgtgcagagtgcgggtggcgcggtgtacctgcgcgccagcgagccgatcgagcccacgcggttgcaactgcaggacgccgacacgggcgcgctgatcctgctggacatcgcagccgaaccgcccaaggacggggaagccgagctggagccggtgcgcatcgtcgagggtgacagcgcaccgggacgctatggcgagcaggccgacagtgccgaggccccggcacgcgcccagggccaggcaggtgcgcggaccgcgcggcgcgaaactccggtccctgtcgtgctgacgcgcttcgccgcgcagaacctctacgcaccgctgcgcaccgtcgagccgcttccgggcgtcatgcgggtcaacctgccccgcgacctcgacctggacacactgatgccaacgctgccggtgcgcgcggtcgcgctcgcgtcgtggcgcctggaagaccaatgggtgactgccgtgcgccttaccaacaccggcgccgactgggtcgcgctcgacccgcgcgtgctgcaaggcgatttcctcaccgccaccttccagcacgaggcgctgggcccgcgcggcacgcccgaggacacgaccgtcctctacctggtcacgggcggccgcggcctcgcgcagtcgctgctgccggcgattcaccgcttcgaccctgccgtgcatctgccgcagccggacggcgacgagaacgccaaggaggcccgccatgcgcagtaa

SEQ ID NO: 346003 - DNA, 750 bp, Pseudomonas aeruginosa
gtgaaggacgccgcctcgaccgcgcagcgggagcagaatcagcgccagggcctgatcgtcggcaccatcaccttgccgtttcgcttgcttggagtgctgatcggctcgctgctgttctcgatcgtggtggagtgcgtcggcatgcacctgttctggaaggaccagggctggcgccattcccagcagatgttgcagtacgagcttgggcatctgtccaaccacttcacgcgcagcgtggtcgtgcaggagccggggcgcacggcgcacgagttggtggatacaggctacgaatgggtgtttgttcgctccgggctgctggcgcgcatgagccagaccgccgagcgcgtccgcgcgcccagccacgagcaggcgcgcaacttccgctactacatcagccaagcctatgtctgggccgagagctacctgatcgccgcggccttcacgacgctgaccttcctagtgcgcctgctggtcctggtgctcacgctgccactgatcttcacggctgctttcgtcggtctgattgacggtctggtgcgacgtgacgtgcgcaggttcggcgcgggccgcgaatccgggttcatctaccaccgcgcgaaagccagccttatgcccctggccgtgctgccgtggatcacgtacctggcactgccgatctcggtgcatccattgctgatcctgttgccgagcgccgccttgctgggactggccgtgagcctgactgcgggcagcttcaagaagtacctctag

SEQ ID NO: 346004 - DNA, 399 bp, Pseudomonas aeruginosa; identical to SEQ ID NO: 338988

SEQ ID NO: 346005 - DNA, 918 bp, Pseudomonas aeruginosa; identical to SEQ ID NO: 339004

SEQ ID NO: 346006 - DNA, 813 bp, Pseudomonas aeruginosa; identical to SEQ ID NO: 339006

SEQ ID NO: 346007 - DNA, 927 bp, Pseudomonas aeruginosa; identical to SEQ ID NO: 338987

SEQ ID NO: 346008 - DNA, 441 bp, Pseudomonas aeruginosa; identical to SEQ ID NO: 338985

SEQ ID NO: 346009 - DNA, 363 bp, Pseudomonas aeruginosa
atgggatggcttttctcacatcagacgaaggaagacctgctgcgtgagctgctggccccaaccagtactttcgcaggcagcaccaaggtgctggcacacgcagtctccggcaatgaactttggactgtcgtaaaacgaacctttcaccttgccggattctatttcggcaagccggccggtcactcgatcaccatgatcgagttgcacttgctggactgctcggccgggcaatggggctacaagaccattccggagaaagccggcccgttctactacggctgtccgctggagttcctggacctggctcacgatgagaccaaccaggagtggcgagaccgtctgacgcaagaacaccaagcctga

SEQ ID NO: 346010 - DNA, 276 bp, Pseudomonas aeruginosa
atgaaatcgatctacaacaccccaggcttcagcgaggagttgttactggtttgcgcctcgctgcgcgaggtcggactggacaatctggctgaccagttccgcgatgcagtgttcgaccgatccgtcgtcgaccaggccatcatcgcactgcgtgagcgggtgaagaccccttcgccggagcatgcggccgacaacgagccatggctgtactgcgactggcaggccaggcaaacagcttaccggctcctccagcgccttgagcgcgcaacacgctga

SEQ ID NO: 346011 - DNA, 1626 bp, Pseudomonas aeruginosa
atggtgctgacactcgaccaggtcctcccctggcacgataacccccggaccactcgaaacccgaaatacgatgagctgaaagaatcgatccggcatcgaggtctcgatacgccgccaccagtaactcgacgccctggcgaagacaaataccgcattcgcaacggcggaaacactcgcctggaaattctcaacgagctctacaaagagaccggcgacgagcgttacttccgtttcaactgcctgttcaggccctgggacaagcagcgcggcgaaatcatcgcgctgaccggtcacttggccgaaaacgatttgaagggtgacctcaagttcattgagcgagctatcggagtaaaaaaagcgaaagtcctttatgagcaggaaagcggcggtgaaaacatttcccagcgtgagctggcacgtcggctaaaagcggatggctacccagtatctcagtcccacataagcaaaatgctggataccgttgaggtcctgcttccagccattccaagcatgctgtactcgggcctgggagttgatcgtgtctctcgcattctctcactacgaaaggcttccctgggctgctggaaacgcctttactccggcgagggtatcgacttcgagatgctgttccaggacaccctggcgatcttcgacagtagccctgacgagttcattttcgagcgtttccaggacgaactcatcgaccagatgaagcgtcccttgggccttcgctatgatcaaatcctgctcgagatcaccaacggccagcaggagcagcgccgcggcactctggtcgacctgcccgcacctgccgcaccacctggaatcccagccgtagggcaggaaaatcctgctgcgtcgactactggacaagcacaatcacagagccccgctgccggcctccaaacgtccaagaccaatagcctcccgggtaatccctctaccccgccaactccgccactacctgtacaacagcagcaactgaccgacgaggagcgtgctgaactcttggcaggtcatatcgtgagcccggtatccaccaagattcagcagactcgccaacggctggccgctctcgagggtgaacatctacctgtcttcgaggaaacagctctgcaggcaatcccggtgcaagtcggcggcctgcacccgatcaccgacctctggtacatcgagcggtcgatcgacacccccgaaatcctgcgacagcacatcgctgacttggtggaagaaattgccgttatcgtcggcgcccccggaacgatcgagaggattcaaggtggtgtgggctactcgtaccgggagccagcagaagattgcgaactttctgaggcagccctgcacctgatcaccttgtttcagtctctcagtggccaggtccaggtaatcctggacaaggtcgactcgcaaacttgtcgtgatgctctgggtgaattccagttctcagctggcctcgctcagttgctgctgggccaacccaccacaggcgatcagccatccagccaggcaggccgtcttaatgacgaagccctggtgaaactgttccggatcattcgtcttgcccggcgcctggttgaccttgagctgccgccggccacctccgagcaagcagctaccgaccagtga

SEQ ID NO: 346012 - DNA, 321 bp, Pseudomonas aeruginosa; identical to SEQ ID NO: 333149

SEQ ID NO: 346013 - DNA, 1110 bp, Pseudomonas aeruginosa; identical to SEQ ID NO: 333148

SEQ ID NO: 346014 - DNA, 225 bp, Pseudomonas aeruginosa
gtggtgccgtgcgccatctatgcgttcggcgctcagcagcgctcgcggtatgtgggcgaggtgccggacttcgggctgtgcaacatggccttcctcgcgcctggcgatccgttggtggtcggcagcgacacctggcgcgtgtacccgctgctccagcgcggaaccgctaccgatttcggcaacaccagcgcctgggtcggctactgcttccgagtgcttgagtaa

SEQ ID NO: 346015 - DNA, 594 bp, Pseudomonas aeruginosa
gtgccgcacggaatgttcagcgagccggccgccagcggttcctggagcagttggatatcatgccagataggcagcgcccaaatgcgtgcgccccagccgaacagcgtcatgtccagcagctgccgctcgcggtccaccgcgtacatgttcgcttcgaactcccggcgcggcgccaggcgcatggctcggcgctgggtcacggctgattcgctttgcaggatatttgtcgaggcgctcaggcgctcgacgatgctgtcgccccagtccggcgcgaacgtccaagcgatgatgcgattgccggtgatgaccaggaccaggtccggctcgccctggagcctccagacgatccgcgcattgacgacgggcgggccgtccgtgccaatgctgaccgtccaagtgcgttcttccagggcggcaaaacccagcggcggcgacgcctggccggatagcgtgatgccgtctgcatcttcccgctcgatggcggtcagcgtgcgcggactgaaatatgcgttccagactgatgccggtcgtacctgggtgctgacgacgttgcccagctccattgtggtcggaatcagccacaagcggttgtag

SEQ ID NO: 346016 - DNA, 480 bp, Pseudomonas aeruginosa
atgagcaacaacacccaagcccaagaagccaaatatttcgacctgcacaccaccggtatcggctacctcaatcgcatccgcgaagtaccgatccgccgaggtgaaccgttcctcgccgtaaccgtcgcagccctccatggcgcggcagacagcgtggaatactcctacatcgactgcaaagtggtcggcgcccaggctgaaaagcttgtccgccgttgcaaggaagcagtcgaggccaagaagaaggttctgatttccttccgtatcggcgatatctgggcggatcccttcatccaccagaaaggcgagaaacaaggcaggcccgacgcaagtctcaaaggccggctgctcttcatctcctggatcaaagtagatggcaccaccgtctacgatgcgaaggaagaagctgaaaaagcccagcaaggccaaggcgaaccgcaaggtgaacccgcagcccctgctgaacaagccgctgcttga

SEQ ID NO: 346017 - DNA, 1356 bp, Pseudomonas aeruginosa
atgagccgttttgtcccagttgaccgtgacaccgcgtacctgctgccgccctcggtagacgaatggttgccgaatgatcacttggcgcgattcgtggttgaggtcatcgagcaactcgatctgcgcgaactgaccggccaatacgccggccgggggtcggccgcacaccatccggccgtgctgcttggcctgctgatctacggctacgccaacggcgtgcactccagccgcaagatcgagcgcgcgacctacgactcggtggcgtttcgctatgtggcggccaacactcaccccgaccacgacaccctggccacgttccgtcggcgcttcctgacggcggtcgaatcgctgttcgtccaggtgctgctgctggcacgtgagatgaagctgctcaagcttggccacattgcgctcgacggcaccaagatcgatgccaacgccagtaagcacaaagccttgtcctggggctatgccaacaggatcgaggtgcagttacgcgaggaagtccagcagttgttgacgctggccgagaacagtgaccgtgccgccgtgcccgatggcatggatgtaccggccgagattgcccggcgtgaagatcggctcagcgccattgcccaggccaaggccaagatcgagcagcgcgcggctgagcgacacgccgtcgagcagcaggaattcgaggtcaagacggccaagcgtcaggcccaacgcaaggccggcaagaagccgcggggcaaggatcccgaaccacctgcggccggccccaaagacagcgatcaagtcaatctaaccgatgaagaatcgcgcatcatgcccgcctcaagcggcggcttcgagcagagctacaacgctcaggccggggtggatgtcgagacgatgctggtcatcacacagcatgtcacccaggccagcaacgacaagcgcgaagtggtccctacgctgcagcgcattgcggccttgcccgccgcgctgggcgaggtgcaaacgctgattgcggacaacggcttcttcagccaagccaacgtgagcgcctgccacgcagccgagatcgaaccgctgctggcgctcaagcgcgaatcgcatcatttgcccgtgctggagcgctttgccgccgactcgccgtcaccgcagacgagcgacccggtcgagcagatggcccattgcctgagcacgcaaagtggccgagcgctgtacaaactgcgcaagcagacggttgagccggtgttcggcatcatcaagcgggtgatgggctggcggcaaatgagcatgcgcggactcgccaaggctcaaggtgaatggagcttggtgaccatggcctggaacatcaagcgcctgcatgtactgcgtgccgcgtaa

SEQ ID NO: 346018 - DNA, 198 bp, Pseudomonas aeruginosa
atgcctgctccgggcctgggtgctgcgcgcctgcaggagccgtccaggaacttcagtacctcggtcgccaactcgatctacctgcacgccgttcaagacacggatcagatggcggccgaaatgtgggccggcaaaggcggcgaacacttcctggtctggctgaacaagaaccgccaggccgtcaagcagattatctag

SEQ ID NO: 346019 - DNA, 351 bp, Pseudomonas aeruginosa
atgacctctctcaacaaccactccagcgcaggccacactgctgcgtacctcaaactcccgatcgttctcaccaacgcggcctggctgcgcctggtctatctcgcaaaccctgccagggtcgacgagatgggcacccggctggccagtgtcgttcaaaccgcctggcaggagctttcgctccagccgaccgcgaagcacatccaattccacctgtaccacaaggaggaagaggggcaggaccgcgcgctcgcgctgctggtcctctcgatagtcgagccgtccgatgagccttcctacctgcgcatcgagctgcaggaagaaagcctcccgggcaacccggataccgagtag

SEQ ID NO: 346020 - DNA, 570 bp, Pseudomonas aeruginosa
  misc_feature (95)..(95): n is a, c, g, or t
gtgcgccgcttcgcggataccgtcgaaatccgggatgcgccggctttcgcggccgagttgcaggcgttcgtccacgagcgtgtggaagcggtganactgcccgccaacttggagggggagaccgttgggcaggcccttgcacgcaaggcggccgcgctgcgcaccgaaacgcgctgggcaccgactgaaaccgacgtccagcgaggccgcgccgtgttgctggaagccttcaaccagccgcataacctgccgatccccgagtacgccaagctggcggacaagtcgcgccagcagatctacaaggacatcctcgcgcgtcggctgctggcgctgaacgtggggccgcgcggtcagaagctgcccgactggcagctcgacccggtgaaacagcagttgacccaaaccgtgcttcaggaggtcgagggtatcgatcactggacgatctaccgcgcactgtccgaaccgctcgaaggcttgggcggccgctcgccggtggatgcggtgacgcacagcacgatcgatgacgtggccgatgccgtgttcaacgtactgggcgttcaggtgcattga

SEQ ID NO: 346021 - DNA, 186 bp, Pseudomonas aeruginosa
atgaacacttcccagcacctggtcacccacgagtgcatgaattgcggtcagcaccaccctctccacctggtgcgccaaatcctccccgcagagaacaccccggaaggtgaagccgaggtcttggtctgcccctgctgcgggagctacgacgtccatcagttggaggctgtccgtgatgaacactga

SEQ ID NO: 346022 - DNA, 249 bp, Pseudomonas aeruginosa
atgggcttgcagacggaaccagaggggttcaagaggcaggtgggaaagctggagagagaatcgaacgtagcgtgtaaaaaggagggcgcgcagccctctcttttactaaatgactcagtccctgtgctctatatctctatattcaactctgtgcccgagccaatcgagcttgtagccaaatacatctcggccatgcggagcctttggcgtatcagaggagttactcagtcgggcagtgtccacttttga

SEQ ID NO: 346023 - DNA, 294 bp, Pseudomonas aeruginosa
atgaagacgccggtatacaacggtgccctggccgagaactcgtcgctcaaagccaagcctgccgcaccgcgcgcgcaagcaaagaccgagccccaacgctcaccagcgcccgtgccggctttgcagccggctcctggcgtgaacccgaaggtctggttgagccggatgatcgccgcccaggcgctgctggccgcgcagacggccaggctcgctcgcgagctaggtgtcagcgatgccgagctgcgccggctgggtcgtcggcatggcatggaggtgttccatggcactcgctag

SEQ ID NO: 346024 - DNA, 195 bp, Pseudomonas aeruginosa; identical to SEQ ID NO: 344396

SEQ ID NO: 346025 - DNA, 195 bp, Pseudomonas aeruginosa
atgggcttctcgatcaccaccagcaagttgccccaggacgcctgtatcacgctggccaccaagatcgcgaagaacacattcgagcagaccaagatcaacagcggatccgcgatcactggtgaagtgaccaccgcagcggcgacccaggcctgcagcagcgacagcaacagcattacctggacctacagttcgtga

SEQ ID NO: 346026 - DNA, 1122 bp, Pseudomonas aeruginosa
atggccaccgtcggcagcctggccatcaccctcgccggcatcctcggcccgatgatcgcggtccgtttcatgctcagcaccatcggcattcgcctgcccggtctgatcggcctgctgaaattgctgttcgcaccgatccgcatgctggccggcctgttgatcggcccactggtgaccgccctgcgcgtcgtgagcatcgcgctgtggggcctggccgccaacccggtggtcctggcaattgccgccgtcgtcgcggtgctggccggcgccgcgtacctgatctatcgcaactgggacgccgtcaaggcgtacctactggggctgtgggaagagatcaaggcaggtttcgacggcggcatcgggggcattctttcaaccctgatgaatttcagccccctcggtctgatctaccgtgcgttctccggcgtcctgggctacctgggcatcgatctaccggcacgcttcaccgatttcggcaacatgatcgtccagggcctggtgaacggcctgctcgccggcatcgggcagatcaagcgcgcggtccagcgcgtcggtggcgccgcgatcgactggttcaaggacaagctcggcatccattcaccgtcgcgggtgttcgccgatctgggcgggttcaccatggctggactggcccagggcctcggcaccggccaggccggcccgctgagcgtgattgcacgtatcggccagggcctggtcaacgcagggcgccaggctgttgccggcctggacagtggcacccgctctacgatcaccccgccggcagtggtgaccgaactggtcgcggcccagcggcaacgctcgccgatgttcgagcagccgttgctggccatgctgggcgacctgggcaagagcgccggcgccatcggtgccctggtgctcggcgccagcgccccagcgcaggccatcacaatcgacaaccgtcccccggtcagctcggcgccagcggcagtcagcatcggcggcgacacctactacatcaccatccaggccggcgcgggcagcgacgccgcagacctgaaacgcacgctcagccaactgctggacgagcgcgaacgcaacaaggcggcgcgcctgcgcgcccgcctgcaggaccgggagtaa

SEQ ID NO: 346027 - DNA, 180 bp, Pseudomonas aeruginosa
atgctcgccgaggttgtgcgtgctgatgccggcgttgctgaggcgcgtgcgcagttgctgcagggcttggctctgctgcaggtgctgctgcttgaggaaaccggcttcacggatggcccggttgtagtcgcgggtgagcgcacgggtggggttgccggcggcagccatctgctgggctag

SEQ ID NO: 346028 - DNA, 465 bp, Pseudomonas aeruginosa
atgagcgctagctatgttttctcgccgtccacgagggtcttctaccccgtgtccttgcgcgaggtctacgaggccgggatcggctggccggatgacggcgtccccgtcagcgatgaagtacacgcccgcattctgctagaacaggagtctggccgtgtgatctgcgcggacgccggtggacagccagcaacgaaagaaccaccgccgcccacagaggaggtgcaagccgcgattgagcgcaactggcgcgaccgccagctcgtcgacaccgacgccctggtcgcccgtcaccgcgacgagctcgaggttggtaccacgacgctcaacgcggagcagtaccaggcgctgcaggcctaccgccgccaactgcgcgactggccggagctcggcgcgtttccgctcgctgagcacaggccgaccgcaccggactggctctatcaccagatcgaagacggcgtcttgtag

SEQ ID NO: 346029 - DNA, 357 bp, Pseudomonas aeruginosa; identical to SEQ ID NO: 328645

SEQ ID NO: 346030 - DNA, 1182 bp, Pseudomonas aeruginosa
atgctgctcaacctgttcaacgaaatgcgcgcagccaaggtgccggtgtcggtgcgcgagctgctcgacctgatcgatgccctgaagcaccgcgtggtgttcgccgacatggacgagttctactacctggcgcgtaccatcatggtcaaggacgagcgccacttcgacaagttcgaccgggccttcggcgcctacttcaagggcctggagaagctcgacgaccacctcaaggcgctgatccccgaggaatggctgcgcaaggagttcgagcgcctgctgaccgacgaggaaaaggcgcagatccagtccctcggcggcctggacaagctgatcgaggagttcaagaaacgcctcgaggaacagaaggagcgccatgccggcggtaacaagtggatcggtaccggcggtaccagtccgttcggctccggcggtttcaacccggagggcatccgcgtcggcgacgccggcaagcgccagggcaaggcggccaaggtctgggaccagcgcgaatacaagaacctcgacgaccaggtcgaactgggtacgcgcaacatcaagatcgccctgcggcgcctgcgcaagttcgcccgtgagggtgcggcggaggagctggacatcgacggcaccatcgaccacaccgcgaaggacgccgggctgctcaacatccagatgcgcccggagcggcgcaacacggtgaagctgttgctgctgctggacatcggcggctcgatggacgcccacgtcaaggtctgcgaggagctgttctcggcctgcaagaccgagttcaagcacctggagtatttctacttccacaacttcatctacgagtcggtgtggaagaacaacctgcgccgcagcagcgaacgcaccgccaccttcgacctgctgcacaagtacggtccggactacaaggtggtgttcgtcggcgacgcggcgatggcgccctacgaaatcacccaggccggcggcagcgtcgagcactggaacgaggaagccggttacgtctggatgcagcgcttcatggagaagtacaagaagctcatctggatcaacccctatccgaaggacacctggaactacacggcgtccaccggcctggtccgcgaactggtcaaggaacagatgtatccgttgaccctgagcggcctggaggagggcatgcgcttcctctcgcgcggttga

SEQ ID NO: 346031 - DNA, 675 bp, Pseudomonas aeruginosa
atgggctggggatgctacgtcgagattcttgaagggatttacagccagctcactaatctacaatcgcacgacagtcgaattgtagtcatccgattcgagattcgactaccgcatcgaaaagtccatgacgttaaagcggaaaacagggagctacgatcattcttcaaaagcgtgaaggaaaatctatctctgcaacgctggggcgcacacaaacgtgtaatccacggatgggttagagagatcggcaatactaaccggggacactaccatgtattcatggcatttaaacggcttacggtgcattttgggacgttttccggcgaaaggtataccggactatggggtcttctgaaaagctgctcaaaacgcattgcaggggcaagcctttggttcaacaaaaaaatccatattcttgaacgtggtgacaacgaagcattgaatacctgcttctatcacctcagttacctcgcaaaactacgaagcaaagaatttgcagcagggaacggacataaagtctgcgatttttctcgactcaaacataaagacccattggaaaattacgatcagaaaaaaccccgcgatcttgcggggctttgggattactgcatcaatggcgcaccatgtctttcattctccaatgacacggattttattatatcgaacccagtctgctga

SEQ ID NO: 346032 - DNA, 543 bp, Pseudomonas aeruginosa
atggcaaacgtcggctacatccgagttagcactacggatcagaacactgaacgccaattagacggcgtacaactcgacaaggtattcaccgacaaggtttccggtgcgaccaccgagcgcccggaacttcagaacatgcttgggtatgtgcgggaaggtgatgttatccacgtacattccatcgaccgccttgcccgttcgctggttgacctgctggcgctggtccgcgatttgacagcgaagggtgtacacgtccagttccacaaggaaagtctgctattcaccggagaatcgaatccggtccaagaactgatgctgtcgatcatgggatcggtcgccgaattcgagagagctatgattcgcgaacgtcagcgcgaaggtatcgcgaaagccaagcaaaaaggcgtctacaagggccgtagcaagacgattgacgatgaaaccatccgaacccacgtcgcagcgggaaactcgtacagagcgactgccaagacccttgggattggtgtttcgacagtacagcgcgcgatggagggagtatga

SEQ ID NO: 346033 - DNA, 1773 bp, Pseudomonas aeruginosa
atgaatccgtctgcatacgcctatgtccgatattcgtcggtgatgcaagcaactggtggttcggttgatcgtcagatcgacactcttaaagaattcactgaacaaaccggcgtccagatcaaagaaattattagggatgatggggtctcgtcgttcaaaggccgaaatgtgaacaggggacaattcaagaaaattctggataggattgactcagggattattaaaaagggtgattatatagttgtagagtcaattgaccgtatcacgcgccagcgcgttctggacggagtttcgctacttcagaatatcattcagtcagggataagaatttatacaacatccgacaggatatgttattcgcgggatgatgagtcagatgacttcaataccataatgatgatcacgcttattgcaaagcgtgcaaacgaagaatcggcaacaaagtcgtggcgacggaagaaggcgtgggacaaagacaaggcattggccaacgaaggcgttcgaaagataaacataaaaaatgccccgtacggactggagtatgaccctgtacttggcaagtttgtagttgttgagtcgcaagcgaaggaagtcagaaggatttttgaacttctgaagtatatgggggtttcgaatgctatccgggaagtgaacaaggattctggaaggaaatgggccaatcgccatgttgcccacatgatttccagccagtatccggtcggtgtattacgttctcagaagcgtgatggtgaaggtaggaaggaatttgttgggtacatcgaaggatactatccggagatagtcagtcagacagcttttaatgaagctgttgcagccatgaaaggccgtcgggacaggaaggactatgggactagatcatcggatgaagtcaacatattccgtggggttgtgaagtgcggaaagtgcggtgcaagtctgatgttcgagaagcaaaaaaatcagaaaggtgtaccgtacttgtatctgcactgttattcgaggaaagaactgaagggtgcctgtgatcaacggttcaggtttgatctggcatttgggatgttgttaatgtttattcagttggccttgaacagtaataaacctgcaaggtatgtggaaagatcgtcaggggagggcggctttttttacaaggtttctatcggatcacctgcgctgattggtgccggtatacgccagttgaacgatggcgtgaagttttccgaagaaatggaacgtgaaaaatcagattttgattctgcgctacgtgaaacgcagaatgaattggttgagttgttttcagggccaactcggggtgatgttgagttagaagaagaatttactagggttaaagatgatcttgaaggcgcccaggcgaaatatgaacgactcgaaaagtcaatcgaatattccgacggcaacgtatccagacttatgatgaagaagatcaaggaggccgaagacctcattgacgataagcttagggaattggatgagcttgaccggaaaatttcggcgtccaaggttagtattccaattcatggaattcaagatgtaattgatatgttcaaaactaaagaagggcgtttggatttgaacagattcttcatttccaagaaaataaagttcagttttgaatatgatgcaaaacttcgtcggctgaaaatgaatgtttcaagggatggggtgacgcttctggagctaccgtgctcgttccccttacataatccattgaaattatttgacttgccgaatctggcagagttttgtgatgtgtga

SEQ ID NO: 346034 - DNA, 1086 bp, Pseudomonas aeruginosa
atgactaatttactgctggaagaagaaatcgccgcagcagttggcgaggttcggacagattcctttgatatgacctttggcgagattgctaatttgcatgtcaataaagagttggtaattcagccagagtatcagcgtctattccgttggtcgaatcagcaaaaatctcatctgattgagtccattctcttggagttgcccgttcctcagatttttgtcattgagaatccggatggtgttctagagttgatagatggcttgcagcgagttagtacaatactccaattcatggagccgcagagtattgagttagagcctcttgtcttggatggctgttcgctcattcgtggtctcaataatttgtcctttgctgatttgccgctttctcttcggttgcgattaaagcgttcgcctatcagggttgttgttattaaaaagcaaagtaaaggtttcttgcgctatgaaatgttcaagcgcctgaatacaggtggctcgaatcttgagccgcaagaaattcgaaattgctctgctaggatggtaggtgaggcaggtatcaagttttataacttcttggtgcgcctgtctgagagtgaggattttgctgcttgtgcagagttccttgctcagcaagataaagataaaaaagcagcagaggagcttgttttgcgtttctttgccgtgaagaactatattgatgaatttaagggtagtgtcagagactggcttgataattatatggaggggatactgctagaggcgcttccatttgattatgagaaggaggaagcagcttttatccagactctagctatcgttcgggcaaaattgggcgatgctgcgtttttgcggcatcgaggcgatgctcctgtgggctctctgcctcctgcatactttgaggcaatcgcaattgccttctactctgagtttgatcgtgtaaaggataaagctcccgaggttttgcgtagagcagtttctgagcttattcaggggggcgattttagggccgtcaccgggccaggcgcgaactctagagaaaaaatgagagctcgaattaatctgactgctcaagcgattgtggccgcctaa

SEQ ID NO: 346035 - DNA, 636 bp, Pseudomonas aeruginosa
atgagctttgatcaatcaattgaggatgatctcaagtggagggaggccgaattggcctctctaaagcgcttggcaattactgcgccagaagggagtgtatcaagaaagagtatattgcgggcaatgtgggctattctttatgcacattatgaaggtttcactaagttttgctgggatacagtttttgatcatattcagtcgaagtgtattcctaaaggtaaacttgctgagaacttttctttgattgcaatggagaaagatttcaaagagctgaggggcaggatggatagcgcctcgttgctgcgcttctttaatgatgaacttgctgcgttgctgactgataaagcagaatttccagaggattttcgacttaaaactgaaagcaatctgtggccaaatatttttgagcgtgagtcttccaagattggcttggtttgtggtgaattggataatcatcgcgtcaggataaagactttggttgggcgtagaaatgaaattgcgcatggtaatggggtctttataaatactctgaatgagtatagtgagtatgaggaagctactatttgtttaatgcatgatctcgctctgagggttatagagcttttagatggagagcattatttgttgaaggcgtga

SEQ ID NO: 346036 - DNA, 1908 bp, Pseudomonas aeruginosa
atgtggggcatcgcttcggtgcccagcatgaaaccctccccctcctacctcacacgcaaccgacacggaaccttctacttccgcatcgtgattccacgaccattgcgagccttgctccatggccagcgagaagtcagacgtaccctgaaaacagacagcgaaaggctggcgcgtaagcgtgcccggcaatacgtcgcacgctacgaagccgtctttgacaaggtagtgaacatggttgagcgtgatgaactcggcctaaccgaggccgactacaaagagctaatggggcttgtatcggataccaagcctgcaccggatttctccagtccgcaggacgagagccgattagcggagcccatactttccaatcaagaaatcgaagcccgccaacgacgcagggaagtagagcgcctgctgactggagcctatggccgcccaataccagccgaattagagcagatggcgcaacgactgctagagctttcccgcacctaccaatcgacagagctacgagccatcctgccaaagctccgagatcagctggcgctgagcggttttgcctccgcagctccaaccttgactacacagaggcctgactttgatcctgcaatagcagaatggactctctacgacgtatggaaacaccagcttgaacgggacaaagccgatacctcagagaaaggcgggcaagcaaaccacggaggcacctatgaagagagcgagcgccgggctcgcgtgatgaccgtacttacgcagcacaaggccgtatcccagctgactaaacgagactggcaggctgcttacgacgctgcgcgcaaggttaaagtccacgctattgcatcccttaatcccccaacccctgtagatgacctgacaactgacacgccagagcagatgcttgggcacgaggcgacaagagccctaatcggcgctatgaaagacattcaaaaacacgccgctagcatcctcgatctaacgactatcactccagatgacttagtcattaaacctattcaggaaaggaaaacagttcgtacgcgaggcggtaaggccttctcgaagacagatgttgaagcgatattttctggttatatctatcgcggagcactaccagctaacagaaccaaagcatatcctttctggttctggcttccacttgtaggctatttcaccggcgcccgcactaatgaaatagcacaactggatactgcagatattcgagagattgacggctacccttgcttcgacttttgtcccgatgctccaggggcctttgaagcgaagcgagttaaaacagaggaagcgcggcaggttcccattcatccacaacttattgaattagggttccttgactacgtcgagagccagcgaaaagccaaacagaaaaagctctttggggacggccttgcttacctgcctcctcgaaatgaagatctcgaccacaacaaagaagggtgggccaagagcgccagtaaatttttcaacgaagcccctaaaggttatctcgtcgagataggcgtacataaagcgcatgatggcaaaagcctgtattcatttcggcacacacttgagaccaacttgcggcatgctcgacgcgatggaaaaccgaatgcagaacagcacataattgattcaattacaggccatgccacagaagaacagcaaaacacctttatagacaaaaccgtaacagatgcaatatccgggagagccgccagggacatgggcgaattacattatgatgagggcgctgcaatcaggcataagctggaagcactgaaattactcccaataccagaagcaattcagcggctaaccagctaccaagtagactttgttgagcgctttggagaaaagctcaccaagagcatcaaaagccatcgagacagacgaccaagaacaatataa

SEQ ID NO: 346037 - DNA, 159 bp, Pseudomonas aeruginosa
atggacaccttccaattctgcttcgcgggcatcgtcggcagcgtctccggcagggtcgtgacctggggcggcctgactgtcgatatcgaccagatcgagaatgcttggcttcgtcgggcgattgaagactatcgctgtggtcgcagggggcagaaatga

SEQ ID NO: 346038 - DNA, 675 bp, Pseudomonas aeruginosa
atgtcgtacgaccatcagatcgtttgtctcgcaaactcacgcaaatggagcggtcgctgcattgcaggcaagatcacggaaggcaccaatacagggcattggctccgccccataggaaccaccgccacacacgaaataactgagcgagaccgtgaatacgatgacggtactacggctcagaagctggacattatcgacatcactttcaacgcccctgccacaccggcgaccttccaacaggaaaaccacgtcatcgatgatggcttctattgggtgaaatcagggcagtgcaccattcaagacctagcggctcttgtagacactccggcaaccctttgggaaacgggcaaccacagctattcgggcacgaacgatcgtgtgtcgacttcgattttgaccaccccgcgtcaaaccctatatctcatcgaacccgaagaagttcagttcagcgtcaaggctgaaggcgcagccttcgggaatgccaaaaaggttgtccgcgcccacttccgctacaatggtacgcgttacgctctaaccgtaaccgaccctgatacggagcagtattacaagtcccaacccatcggcgactatccagcagaggtcaactacttcaccatcagccttggcgaaccttacaagggtgacgcatacaaattggtggcagcggtgttctag

SEQ ID NO: 346039 - DNA, 666 bp, Pseudomonas aeruginosa; identical to SEQ ID NO: 323670

SEQ ID NO: 346040 - DNA, 255 bp, Pseudomonas aeruginosa
atggaagccgtccaggtagacgcggacatcaagcccgccgtgaaggtgcagctgctcgccagcctggccgacgcctacaacaagacggtcagcgcgtccaagcgtgttctgcccgaaacatcagcgctggccaccgctatggaggtgctccagcgcctggccagcttcatccgtgagcggtttccgcagcacgcccaggcattcgccgaggtgctggagccgtttggagaagtgattgcgaaggaattgggatag

SEQ ID NO: 346041 - DNA, 636 bp, Pseudomonas aeruginosa
atgcaaatgcatgcacagcaaggcggtagcgccgcgaaggctagcacaagccactttcgcggcactacgaacattgaggagtacatccgcgacatggcgagccgtgggttcagtcgtcgggccgtgagtaaggccctgggtatgcagtcgcggaagttcaaggaactcctggaactcctgccagaaatggactgggtgcctccttgtcagtcgtgggaccgcctgcgcgctgaccaggagaagaagggacgcaagtgtccgatgacagaggggcgtctgcgctcgattgtcgcggcgaggcgcgccgcgatggcaaaacacacccgctacaccgcgtttggtgtaacagccaccttgccggagctggtgagccagttcggccaggtcaccgccgccaccgtgcgcatgcggttggccaagggaatgcctctggagcaggcccttgcctccgtgcgcagcgatccttgtggaaggaaggtcgcagatagccatccctggaaacaggaggcgcaccagggggctatcaatcaccttgagcgtcaaaccgctgcaatgcaggaacgcgttcagggggagcgcctggaccgggcggcctcactgctgagccaggaggtgccgccatgcgccgaacactga

SEQ ID NO: 346042 - DNA, 189 bp, Pseudomonas aeruginosa; identical to SEQ ID NO: 328998

SEQ ID NO: 346043 - DNA, 630 bp, Pseudomonas aeruginosa; identical to SEQ ID NO: 330091

SEQ ID NO: 346044 - DNA, 999 bp, Pseudomonas aeruginosa
atgccaacagcagtttcacttttttctggatgtggagggtccgacgcaggagtcatcgcggcgggcttcgacgtcatcatggcaaacgacatcctcccctacgcccgagacgtgtatttggcgaattttccggaaaccgactatcgcctaggtgacgtgtgcgacatttccgactttccggcagccgatttacttgtgggttgctacccttgccaaggcttcagccaaggaggagctcgcgaggccaaccgaaaaatcaataccctgtaccttgagttcgctcgcgccttaagcatcattcagcccagagctttcattgccgagaacgtctctggtctacgtcgtagcacctacaggcatctactggaagaccaactaacaaagttcgcggaggccggcgcacacggttatagcgtatattggaagcagataaatgctcatgagtacggggtcgcacaagaaagaaagcgtgtagtaatcgtaggcattcgcaaagatttgaatgccgaatacaaattcccggcccctactcatggcccaaacgctgagcaaccatatttcaacattgctcaagctctggaaggactacctgagtggccagaaggggagttctgcgaggacccctttcactggtattacctgtcccgcaatcggcgcagagattggtgtgaaatcagcaagacgattgtcagtcacatgcgccacatgccgctgcatcccagtagccccaagctacatagaatccatactgataagtgggagtttgaagtagatgaacctgccagaaggttctccttcagggaagcggcgcgcttgcaagggtttatgcctcgctatactactcatggtggagacctgatcttccctgaaaccgttgaaagcagtcaaaaaaatattgaatacaacattttgcgacagcgctacaaggttgtaggaaacgctgtaccaccgcctatgttcgaggcggtggcatcagcactaccaaacatctggccttag

SEQ ID NO: 346045 - DNA, 900 bp, Pseudomonas aeruginosa
atgctcaacctggatgctccacgagatagggatgttcacactattgcggattttgctgagatactatgcttggtaacgcaggatcgagtgtgctcgagagaaaccatctctgaccaaatcagagatgttggtgggagcaagatatcagcccaagagttggatgattgttttaaccatatcgcgtggcgagtagaagcatttggaggtagttatccattctctttggacattgggaggaggactattagtgcacctgagactctaccagaagagcataagttgtacgtgttaatattgttgtgtgctaatctcccattttttgatcggcagtatataaatggttcgcttactgatgcctttgaaagggtttcccttgttacgttgcgttcagtatttccagttgcagctaaagtcaaggcttttggtaagaacgaaacagaatacaggggggctaaatgggagcgaatcaatcagctagctaaggacatcggggcggttggtctttgtaatgaagaaacatttcgcgctagagactcaggtgatgggggtatcgacttagttgcttggctgtctcttgatgagtatgagtgccgaaatattccatctgcattagctcagtgtgcatgctcacgcttagagtggtcaagaaagcagagtgagatatctcatggtcggttgaggtatatacatgccacacatccttggatgcagcttatatttattccgcatagctttcgagataacaggggaacatgggctgttgagggagaggtaggggatacgttgatttttgataggttgaggattgttaaaaatattagttttgaggatgactggaggaatattgatcctccagaaatcctagcaaattttctagaagaaagactcgatttggtctaa

SEQ ID NO: 346046 - DNA, 1074 bp, Pseudomonas aeruginosa
atgacaaagcttgcaagcgttagtttgaatgagcttcattttgatcctgataaccctcggcttccagtggctttgcgaaataagcctgatgaggatgtaataaagtacttgctcctagagtgtaacttgatagagctaatgctatctatcggggagcatggattcttcttaggtgagcccctgctggtcgttcctcgtgcaggtggtggttatacagttgtggaaggtaaccggcggcttggtgccttaaaacttctggcaagcagtagccctcctccagtaatggctggtcaagttaagcaggctagagaatctgcaaggcagaaggttaatgatattccggtcttggagtttgatgatcgggataacatacttagttatctagggtatcgccacataactggcatcaaagagtgggactccttagctaaggctagatatctgaagcaactgcgagagcgtcatgcagataaaggtcatgcggatgcacataaagctctggctaaagagattggaagtaaatcttcacatgttgcaaaactcctaacagggctcaagcttttggaacatgctagagatactggtttgctagtaagtctaaagctggaagaggatgatatacctttctctttgcttactactggtattggttatcctaatatttgtgactttattggtattaaaggtgcgtctgatgttgatgcggctggtttgaaggaaaaggagttcgtagagttttttgggtgggttttcgacaaaagtcatgggccaagtacagtgttaggtgagtcgcgcaactttgataaattgtcgagggttgtggcgaatgatcgcgctctggaagtacttagacatggcgagcctttagcacatgctgacctatatacggaagggccgctagaggcgttacgacaccttctaagagaggctgagagtagcataaagaacgctcagtttacgcttagtgcggtggaagggctggatcagcctgacttaaatcaggctgagcggattaaaaagtcggcttctgctctttttgcttctatccaagatgtgatgtctggagaagagtga

SEQ ID NO: 346047 - DNA, 351 bp, Pseudomonas aeruginosa
atgaactggctcaagggaacggtcgctgcggtcggactgatggtttcatgtactgcggtggctgactcggccgcccagatcgaattgatgaacaaccttcaccagaggatgttggacgcgttgcaggcctcgagtgttgaccaagtgaccgaggtgttcggcgatctggatcggtaccgaccaggtatccgtaggagtgccagcgatgtttgccttgcagcctacgaggcgctggggtgggtactgtccgatctggttgtacaggcggatatggacgaaccattgcctgaactacagggacataagaaggactacgatcagaagcgcctagcctgtgccgcggatgcctga

SEQ ID NO: 346048 - DNA, 675 bp, Pseudomonas aeruginosa; identical to SEQ ID NO: 332561

SEQ ID NO: 346049 - DNA, 924 bp, Pseudomonas aeruginosa
atgcacgctacaccgactaggacagttcttaacagaacataccgaataaaggagtccgagcagcacagaacggaagagttatcggaagacctctggaacgcgcttagccacttactttcaccgtctgtgagcgtcgaatgtctgcgagacatcgatgtgctgtcttctatcctgtctgaacgcttagtcaattacaccttttctcgtctagtgatcggaggttgttattggcttgataacaatggaactccagacgatcctctgcagttagttgacggcatgctaattgctctcagagaggttctggatgtaccgaacaaagatgtggaacaaagagttgcctatttaatgtcacgcatctgtgttcgcgtcacatgcaaacaatcaaaacttaacagcactcaagtcaaagccattcgtaaatttgcaaccaacaatggccatcgctgctatatatgtggagcagagcttcactacggcgaaaatcgaccatatggttctgatcttgaagagtcgatagataaaaaacgcgaaaaaagatccttcgaaatcgaacatatatggggccaagcgcgtggcggttctcgatctcgaaataatcttgccgcttgctgtaaggcttgcaacaaactgaaatctcacctcattagctttgtcgatcttccgattgaacaggccacgaccaacgcaagggacgtaaagagcataagttctgcaatcaatcaccagtatcgctttgcactgatctggaagcaaggtggccgctgtggattctgcgaaaaacacttctatgacattgaaagcgagaccatgtacttggttcagcgcgaaaaaagtcaaccattgcactttcttaacctgcaaatagtctgcctaaagtgcaatcacaaccaatcgctggaaggagttaaaatccgtgcatag

SEQ ID NO: 346050 - DNA, 1233 bp, Pseudomonas aeruginosa
gtgcatagctacctcggcattcgagtccaacaacgtcaggactcaaacattagctttattcttcttgctgcaccggccaacgagatctacagctggtcccaagccgacgatataaaactcgaccgtgtcaatgttcagcggtcgctggtggattcgcgctggaagcaggtgagaaaattctttgactcttatcacgacaacatcgtacccacaagtattaccgtagcctttgcagacactttacctgaagtggcggactctcaacttatcacagacgacacaccggcataccacatccaggatctagggcaagacaacctagtcagaattacattttcaccagcggtgcgagaaagctcatacattatcgatggtcaacatcgcctaaaaggcatgtcgcaactcgcctatccagtcctagtgccggtctgcttgtttccatctttgagcagactagaacgagcattccaatttgtcaccattaacaacaaatcgcacaaggttccaaccgataacctcaaagcacttattagcaacttcagttccattgagacagatcttcgcaatcgtttgagcgcagccactataaccgtacccaaactagccctgcatattgacttagtcaatgaggatccagaaggcccgttccataagatggtcaactgggtcaacaatcgccatcctgatgcaaaacctcttattgcacccgcagcaattgagaatggcatcaaagcaattcaagctggctttaacgagacgcgcgaagacgatgcggacgcaatcatagtcctctcgacgatctggaagactattttcaactattacggcgtcacattggctaacgctgagcaatttccaaatctgataaaaaaggcaacaatccaaaccatcacccagatggttatagaatatttggtatccaaattagatccggcattttttaccggaggtattgctggcgacgatgcatctgaagcgcgactggcaactgagcgcctaattagtggcattcctgtagagttctggcaagaaaactgggtgctaaagagcctagacacatccggtggacgtcaaattattgccgactccattcgccgattaaagtcggccattgccagtcataaagatgaggaaaatttcgactggcgcataggtaacccacttatagactctggatcttctgaatccagcggtgaagactctacgaccgaagaaccggataacgaggactaa

SEQ ID NO: 346051 - DNA, 996 bp, Pseudomonas aeruginosa
atggcgattgcatgtatcgagcgagtcaagcgagatgagcgcggacgtctatccggttttcagcggccgttggtgtctaggcacatcagagaaatccgagactacctggagaggtcggactccgtgatgcctaacgctatcgtgctcgccttcacggatggaattcgagtgacagatgaggctggcgcatacgttcagattgaagtggatgtctcgaaaggtcccgtgggatttgtagtcgatggtcaacagcgcctgtccgcgatggccgggttgccagggcgtgatttccaattcttggtctctgcgctcatctgcgactcccctgaggaattgcgtaggcagttcattctggttaacaacaccagtcctttgcctaaatcgcttatctatgagttgttacctgcagttgatggtcttccgaagcgaatgtcatctcgtgcccgagctgcgcgagtggtcgagctgctcaatttcgacgatcgctcgtctttgcggggacagataaaacagcacacgaacccgctaggcataatcggagatactgcactacagaaaatggtgatgaactctctttcagacggctactgccgcaccgtgatagagggtgaaggaggtgaggagcggtgcttcatcgccataagtgagttcttctctgccgtgcaggaggttttcagggctgcgtgggttgggcatactcctagaacatctcgcttagtccatagtgccggaattatctctatgggatatgtgatggatcaattatgcgcaacagagaggcctttagctccgttgtttaagcttggtttgaagaggcttgagggcaggacggcttggacggcagggcagggggattggagcttccagagtggcgcaaggccatggaatgcaattcagaatctgcatggtgatatacatgttctttcagactatttgacaaggcttcttcgtagagatcttttttgtgcgcaaactgttgcggtctgtgatgcttag

SEQ ID NO: 346052 - DNA, 1011 bp, Pseudomonas aeruginosa
atgcagttattcggtggtaggattacacaagcagaaataactgcaacccttcaaatcagaggcacagcagtttccatgagcacggtcatcatcaccaattgcacaaaccgtaagcgacttggaggccatcctccgctggaactctgcacctcaagcaaccactcgctgaccgccatgacggccttctggctccaacaggtaaaggcacgaacctccactcgcccagctgagtcactgtatacggggaggagcgtgcaagacgcgaaatgggtagcgcagaaactcgatgcgaaactgatgttcgcctccacaggcttgggcttgataggaagcgagcagccgtgcccagcatacaacctgacggtcgcatcagagcccaactccattcgcccatggctggggaaattgggcctgcacccgtcagactggtgggacgccattaacaatcactggcaacgtcccaatccaatagcagcgcttgctaagcgcgccgatatcaaacacatcttgatcgcgctatcggcgaactacgtcgacttggtcgccaatgatctggcacagatcgcgactaacgaccgacccaagctgaggctcttcacttcacgtcccggcatcgaacgacttccagagcattttcgctctttggctatgccttatgacgagcgccttgaaagctcgcgattagcgggcacccgagccgatttcccacaaagatctatgcgacattttgtcgaactcatcgcggccccgacggactcgtcgagcgcagaccaccaagcagttaccgatgctatgtctgcactcaccccgatggacaccataaaaaggcgccgcgcatcagatgaagaagtgaaagccttgcttattgcggcatggggtacccacaacggcagttcgactcgcctactccgctacctgcgcgacgacgccttagtggcatgcgaacaatctcgctttagaagcttatggctagaactacagaagcgcgaggagcaccagggtaaggcatga

SEQ ID NO: 346053 - DNA, 1128 bp, Pseudomonas aeruginosa
atgaacggtaaagaccaagaaattgttgtgcgtgcgctgcgcacaactcagagcgataaccttgatgtttatgcgctctttattcgtggatccgacctagtgcgcattgctgacatcagccgaattgcaagggatgaaagcaacctgctcaaaggctttcaacgcccggagatccgaagccatgtgaaaggaatcgtcgactacctgaatcaaggtaacgtactgtttcctaatgccatcatcttagccctatctccagacattaaatttgtagcggctcgcggtagcaagcccactggcgatgagggaattgcgcaagccggaaccttaagaatccctctgcacgaggagggcctacgctctgcgtggattgtcgacgggcagcagagatcattagcactggccaaagcaaacgacgccgacttaccagtgccggtaataggattcgtatcagacagcctcaccacacagcgcgagcaatttattcttgtcaacaaggcaaagcctctgccaaccagactgatcaatgagttgcttcccgagacaggatcaattctcttgcctcgcgagttaagcgcacgcaaggcacctgccgaactgtgcggcttactcaatagagatccgcgatcgccgttctaccgattgataaaactcgcctctgacaaagagacatctcaggcggtagttatcgacaccgccatagtaaaaatgatccgcagcagcatgaccaacccactgggagcattgtatccctataagtccagcgatgacgtaacaaccaatgttgaggcaatgtatcaactattgctgctattctggcgcgccgttagagaatgcttcccgaatgactggggggtcgaccccaaagacagtcgcctcatgcactccgcaggtatcacagcaatgggtgtcctaatggaccgtatctacgccaagatcagcggtcgcgaagaaaactacgatctcatacgtaaagaggtcgaaaagattgctcctcagtgcgcctggtcttcgggaaaatggccgatactcaatgcctcctggaacgaggtacagagtacgccacaggacattaagcacctgcaagacacactaattcgcctttacatgaccaactcacacacatga

SEQ ID NO: 346054 - DNA, 1311 bp, Pseudomonas aeruginosa
atgaaatttctatacgccgacacccaagactacgtcgacccagaatacgatttcattaatgatcgtaatgcaccgggaagaaagagatactgggacgatcagtacgcccacgaaatgatgacaccagtgccatatgatggtttgcttgtgtccatgagtgctgtacgccctgctgttggcgtgtccaactcaaaggtccgctactcaactgcagagcagcaacgctttctgagagagggtgcacggaaattcctgcgattggatgacccaaaatataacaacaccatggtgatgggggattgtggggcatttgcctatgtcgaacatcccaccccagcctactcgccggccgaagtcgtagatttctatacggacggagggtttacacacggctgctctcctgaccatattattttcagttgcgactcgagcaatccacctgctgaaagccaaactgaagatacactctttcgctacaacgtcaccttagagaacgctcgcgaattcttgcgcctcacgaatgaggctggccggccatttgagccgcttggtgccgttcaggggtggtctcctaagagcatggcagcagctgcaaaatcgctggaagatatgggttaccgctatctcgccatcgggggcttggttcctctcaaggtcgagcagatacacgaagtgttgctagagcttcgggcgactatcaagccggaaaccaatattcacctattgggttttgccaaggcggagcgcatccatgagttcaccaattacggcatcaccagcttcgactcaacatctccccttattcgcgcattcaaagacgcaaaagccaactattacctagaaaactcaacggaaaaacttgattactataccgcgatcaggattccgcaagccattgagaacccaagactaatgcaaggcattaagcgaggtattcttagtgccgaagaactacaaaaaaaagaagcaatagcactcaagacattgcgcgattacgataaaggacatattgattacgaaacagcgctcggggccctaaccgattacctgcgactaactctctcagggtctatcacatccgaagtagaactagaaaaagaagtcaccaagagcattcgactaataactccaacgcttatcgataagccctggaaaaaatgtcaatgctccatctgcaagtccgctggggtcgagacgataatatttagggcaagcaatcgcaataaacgcaggggattccataatttaggcgtgtaccatcgacacctacaacgaaccttggaaaagtcaagaaatgatctaccgatttaa

SEQ ID NO: 346055 - DNA, 1074 bp, Pseudomonas aeruginosa
atgatctaccgatttaaaggcgtccgcgccacgcaagcgcccaatcacgacgtctttacttttgctgccacccccagagaaatcctttctttctctgaaattgaacgaattggccgaaatgaagagggacacctgaagggcttccagcgccaccaggtagcttcgcacatccaagagattcgtgattacttacgccgtgaagacgctcttctaccaaacgctattatcttagccttcctggacagcgtcactgtaaaagatctaggtgatggcatagttgatatagaaatagacagcactgagcagaagcctgggttcgtggtcgatgggcagcaacgcctaagtgcactgtcgacgatggaaaaaggagactttcaggtatttgtctcggcattaatatgcaaggactacaatgaacttcgtcagcagtttgtcctcatcaataatgctcgcccactgcccaagtcccttatatatgaacttctgccctccgttgacggcttgccggagcgcttcaccaagcgaaaatatgccgcacacattgtcgaccttctgaattcaacctctggttcgtcgcttttctgtgaaatcaaacagcacaccaacccccgcggtgtgttgagcgacaccgccatgcaaaaactagtcatgaactccgtcagcgatggagccattcagaaatttatgcagcatgaggattttgaagggcgctcaattgaactcatcaataatttcttccatgccgtcaggactgtatttcgtcccgaatgggacggccttagcccaaggcattcccgattaaaacatggcgctggcatcatcgctcttggctttgttatggacgaaatttacgccaaacaaggcacgtccacgaaggatgacttcattgacggactcaggctacttaaaccgcacactgcctggaccagtggcgaatggagattttcggagacagacattcgcccctggaatggcgtccaaaacacgcctagcgatatcgccttgcttacagagttcctgacccaaaaaatcagaaaggaactcaagcgaaaacaaactgaattagcagtttaa

SEQ ID NO: 346056 - DNA, 456 bp, Pseudomonas aeruginosa
atgacctcggagaagcagatcgagttcgaagagaacggtctgcccaacaccttcgttcccgggcgcaatctgctgttcttcacctttgccgccgccattgcctatcgaagagggcttagcgtactcgtaggcgggatgtgtgaaacggactactcaggctatccagattgtcgggacaacacgttgaaagccttgcaggtatcgctcggcctcggcatggatatgccgttggttatcgagacacctttgatgtggctggataaaagacaaacctgggaactcgccaaggaccttggcggacctggttttgtcgagttcattcaagaagaaacccatacctgttacctgggtgatcgtcagcgtcggcatgactggggatatggctgcaacgagtgccctgcctgccaactgcgccgaaccggcttcgaggcattccagcgagataacgacgcatga

SEQ ID NO: 346057 - DNA, 633 bp, Pseudomonas aeruginosa
atgacctatagcgtcaaagaaattttctacaccctgcaaggagaagggcttcgagcgggccggccagcagtgttctgtcgcttcgcagggtgcaatctttggagtggccgagaagccgaccgctcccaagcagtttgccagttctgtgacaccgatttcgtgggcacgaatggaaccttgggtggcaagtacctggccgcggagaccttggtcgagcgaattgcctcccaatggccggtcggccaagcgcatcgttatgtcgtgctcacaggtggcgagcctttgctgcaggtcgatgaagcactaattaacgcgcttcataatcaagatttcgaggtagcggttgagacgaatggcaccatcgcggcgcctgcagggatcgactggctctgtgtcagccccaaggctggtgcagagtgggtacagcaaagcggtgatgaattgaaactcgtctacccacagccgggactgctgcctgacagtattaccaccggcgacttcaagtactacctgctgcaaccaatggatggtccattgcaacgtcaaaacactcgttctgccattacttattgtcaagccaacaccaagtggcggctgtccgtgcaaacacacaagatattagagatccgctaa

SEQ ID NO: 346058 - DNA, 2271 bp, Pseudomonas aeruginosa
atgattgactccttgccactcaaggaacaattctggctagggcgtttcttctccgatcgcaatgcactgcactgggaagccatagccggcagcaaagcaccggcggcatggctggagcaggttagcccatggattgccgcttttgccagccaaggctcccaatcacctattgttttaccggtgttcgatgctgatggtccgtctcagtggtatgcaatggctgagaatgagaccacggcagtcgcattggcgcaggaattgtcagctgttgttggccccagttatagcgacttccgtggccaaccgattcaggccgctagtactgacgaaatcgaatgcgcgttgcaggaccgttttggccgtttcgttttccgcatagggccggtgaatgcggcggcgcgcggcgacattacacaagccttgcagttgtatctcagtttgctgcgtcgtcgcccagaaatcccagaccgcacccaacgtccgttcggcaagattcgtgcggagttcgatcgggcgctgttggtaggcgatgaggcggatgctcagtacttatgcgacgaattgatcgctagcggccgtattgacgcggaacagcacaagtatttggaaatccgcatgctggccggactcggccgccagcatcagttggcacacaactactcgctgatcaagtccgttcttggcctgtctttaccggctcagaccattgccgacttggtcgaggcgctttatgcaacctatatcaccgccatcgagaatgacccgaatgtcgacgccatcctggccgtatttcgggacgatatctctcggcactttggctctctgtttcgggagcggaaaggaatacgtcagcccaatgtactgaaggcctttctgctttatgaactaacacaggatgaaccaaatataggtcgctgcgaggccattgctgccgcttatccgacctctgcagggcgcgaactaatcacgcgttggtccagtcgattggcgtctgttcagccgtccgggactgatgcctgtgtattggcaggtcaggccttggttgacgatgactatgagttggcctcgcagttgtcgtttgaagctttccccgcagcatggacatatagcgtcttgctacgttgcgcggtggagttgggtgatgctgaaatcacccgacgggtgcttacggcgatcaacactgcatccgaggatgtgcgggcaacctggacaaagcgtgacttggccaggctgcagcaattgcagtcggagtcggtggacgcctctgaggtgcaaaaggcttcgcaagagaggcctgatacgaattggctgacttgggttcgctatgtcgaagctggtcgctacgagcggccaccactgcaaatccttgaggaagcgctcctgcgctggagcccagaggcctacgctttagatccagaatcctgccgccagttagccgagaggatcggcaatgctactggcgaggcagaacatgtgtttcgcgatgccttcgtggcgttagttgagttctttgtcgatcgccaggctcatccagtgcggggattcatacctctgtactcaatgctgatccgcatcgtcgcatggagtggggtggtttcggtcaatgaacttgaactggcctctgttctcatgcaggcgttgatcagccttggtccgtcgaaggacgattacgtcgaagcactcgatagctatgcggagatagttacagccaacaatgcacccactaacatcgactgggcgcttaatgcggctgaaatactggtcttacatggctctcctgactgcgagtcgcgactgcgcttttttttggcagttgtggatatggcacgcacccacactcaccgcctcaagccgacgcaatacgcgattctgtcgctgctggcaaaggactacggttgtgccaatttgctggaggtcttcccctttaaggaagaagatcatgccgaatcagttgcgcatgcagacttcgcgggcctaatcggcatctataccctaactgagccggctggccagcgcgcacgccaatttctgcgaaagattttacctctggctcgggtggaggtgaacgctgacctggtggcaaccgaaaaacttaagaatttggcagcgacagctgatatcttcgtgtttgcctggaaaagcagcaagcaccaagcttattacgctgcgaaggaagcccgcggcgacatggaaaccctcctccctacgggaaagggaagtgctagcattttggactgtgtcttacgcgaactcgagcgacagtgtgaatag

SEQ ID NO: 346059 - DNA, 537 bp, Pseudomonas aeruginosa
atgaacattctctaccggcgaattttcaagacgcaaactacgggtgtcacgactatccaggagttgctgcagaccatgttcgtggctgaggtattgcaacctggcgacgagatttgggtcgtttctccctggatcagcaatgttgtcttgatcgacaatcgttccggtagcttcgatgccctcaatcccgagtggggaaggcgcgagatccgcctcgccgacgtgctcgtgacgttgatgaaccacggaacaagggtcaacgtcgtaacccgcaacgaagctagcaacgatgccttccgtacccggattgccgacctggctcgtgaatgcggcctggaagatcagattgccgtacacattcacgaccaattgcataccaagggcattttgctcacgcgctgcctattgatgggctcaatgaacctaacctatagcggcatggtgatcaacgatgaatgggtcgaatactcgctcgaccagcacgaccttggtcgcacccgccttgagtttgtccgctatagggggtcgcatgattga

SEQ ID NO: 346060 - DNA, 4143 bp, Pseudomonas aeruginosa
atgatcggtgaggtagcctcaagtccagcgctgctagcagctgtgcgtgctctgctaatgccatctggccgtatgctcagtctgtccggctttcaagtacgtgcagcggagcgcatattgtgtgctatcgagacaggggtggatctggcgaccatcgtttgtgcgggtactggcagtggtaagactctcgccttctatgtaccggcgttagcgtcgatctatcgtcatctgttgctggacgacaagtccaagcgctgggtcaaggcgatagctatatatcctcgaacagagttgctcaaggatcagttgcgtgaagtctttcagcggatacgttgcctacaagccggtgtgccacaagaggacaaggtgtcggtttgcgttggggccctctatggtgataccccacattccgcaaagttctgtgattggccaagaataggtaatgatcgagtttgcccgactctagcgtgcctcgaatgtagcggcgagttgcggtggttgcataaggatcatagcgagggccgcgaacgattagtgtgtgcctgctgtgaatcggtgttagatggctccgtgttcccgctcactagggaagcgcttaaaagctccgtaccggacatcctgttcaccactaccgagatgctaaaccagcgcctctcggacagttcgatgatgcatctttttggcgttggccccaaggcactgcatgcaccggaactagtgttgatggatgaggtgcatacttacgagggcaagcatggcgctcaagtggcttacctcatgcggcgctggcaacgtctgcttgggcaaccgcttcgctttgttggtttgtctgcgaccctgcgcgaagcatcccagtttttctccgcgctgaccggttgtcgccccgatctcgtagacgaagtgtcgccgcgtgctgatgagatcgaattcgaaggcgccgaatacatgattgccctgcgcggtgatccggtgtctcgcacggcactgctttccaccaccatccaggctgccatggtgctacagcgctgcctcgatcccaaagctgcgcgactggaaaagtcggtcagccacggcgccttcggccagcgcaccttcgtcttcactgacaacctagatgtgatcaatcgtctgtatttcgacttactcagtgcagaggggcgcaatagctatggtgacccggacatgcggcatgcgcctgacggtggcctagcggtgctgcgcgaggccggaacatccctcttacgctatgccaacgggcaagattggcgcttctgccaagacttacatcagggactcaagcatcgcttggcggtaaagcgggtgagttcccaggatcgtggtgttgatgccgacgcagatgtcattgttgccaccgccgtgctggaagtgggattcgacgatccagtcgtcggcgcggtgattcagcacaaggcaccgcgcggtatggcgggattcctgcagcgaaaggggcgcggtggccgcacacgtaatatgcgtccctggacagcgatcgtgctgtctgactatggccgcgatcgcgttgcttaccaaagttacgatttgctgttcgatccggaattgccggtccgtacactccccttggcaaaccgatacattacccggatgcaagcggtgtatgcgacgatcgattacttggcactgcgactgcaggatgcttctgcaggcagcgtttggagcgacctgagcggtggccaaaaattcaatgcgcagcggcgccagcgcttggtacgcgaattacgaaatattcttgaaaccgaaacgggcacccgacgtctctcagactatctacgccgcgcgctgcgcctatcagatgaagaattatcggcaatattgtgggagtacccgcgaccgcttctgacaaccgtgttaccgactgcgctccgtcgcctagcgaccaattggagtgcaaacggtaacccacaacaggactaccaagcatataacactccattaccggactttattccaggttctcttttcgctgacctcaacttagcggaggttgccatcgatctgtcagagccgcactcggcaagccctttcaatgcttcagtgatgtcagtcttcgctgcaatgcgcgagttcgcgcctggccgcgtaagtcggcgtttcggtgtgcgctatcgtactgagcggcattggatcgcaccgtcgccgagcttccaaagtgaaccgggcatgagcagcgatatctttggccttgatatcgacgccataggcagtcacgtgccgttgggggagtatatggtacgccggggcgataaaacggtagcgctgccagtttaccgtccggtacgtttggcaccgcaatcacctcctacggcagtgaaggattcgtcgaatgcctcgttggagtggcatagtcagattatcgccaccaccgagccaagttggttgacgccgccccttggcagcctgtgggcagagatcgtcacccgtatcggcttttttacgcactcacgccatgcaccagtagagatacgacgcttcgcagtcggcgcttcagcggaaattactgtcggttcggagaaggttcgggccgatacagtgttccaacgtgaaagccaagcggtgggcctgggagcgcaattttccgccgacggaatggtgttccaggtccatgtacccacgaacttgcatttgcggcagcattctgaagatggagcgaagtggcgtgctttacgcagtgcccgcttcatcgaccttgcgtggcgcggtgagcgattagccatgattcgcagccccttcatgcgcgagtggttagcgcagatctatctgtctgccctgacctttgaagcgatagaaaggcagatcggcttggctgaggccgatgcctccattcgacacggccaggcgtcgatttcgctaccggacgtgctgagccttctattccagtcgcaagtggtcgaagtacatggcgacgacatgacgacaggtagtccggacaagctacgccaggaactggacgcgtatctgcgggatcccattgtgactgcggaattgcatgagtttggtgccatgctttgggatccgatcgattccaactgggagccgtggctacgcggggtctaccattccacccttgctgctgcgcttctacgttccattacggacctatgcccgagtatcgatccggaagatttgacagtggacttagaccgcggccccgcccttcagggtcaagccgccgggttcgattctcaagtaatggaggcttggtttactgagcgaagtccaggggggaacggactgatcgaggagtttatgcggcgttacgcggaggatccgcgccgtttcttcgctaccgtgcgtgccaatctgggcatgggggaatttgagttgatcgaccatcaactcaagcaaatggttaccgtgctagctgaggacgacggtagcggcgattcgggaagcgctgaactggtgcgccaattccgtgctgctgacagccaggaggaaatggcgcggtccttccggagcttacgccgaacgctgatgcaggaaggcttctcacccttccacggatttttggttgcgcttggtaaccgagtattgcggcctggatccggcgcagcgaccgatctttacctttcccgagcactaagtcagtggcaaggcgaggagacgcgtataggcatcgagattgatttgcgcgtttttagctattacttgagtcaatcggacggaattgaccgtgtcgtgtccgatatcggctccccggcaggtggcgatcgcgcggcctggcgcattggtgctatttccggcctgctatggccccgcggtcgggcgacacgtcagtccgcactgcaaataaggaatccgttcactgaattgcccttaatcgagcgcctgctagttgcggagacgatcggcgacgatcgtgcctgcgtatcagttctggacgctgattggttggggcagactgccgagcaactcaccaacggccgtcaagtgacgctgacctgtcctgaagtcgaacgtgctcgcctggctgcggcgctaaatacactcgtaaccaatccaatcgagtcaggctatttgcgtgcatacgcccgcctccaaggaatccgtcaaacccaatccatgatagaggctgatatcgaactcgttgaggcggtgcaatga

SEQ ID NO: 346061 - DNA, 717 bp, Pseudomonas aeruginosa
atgctcttaaacgatgcacggagtgttcgcgagcgtttgatgcgtgctgaggctgccagcagcggtattgaggaagctgaggctttgagggccaagcgaagtgaactacaggcgctggcagatcgaatcttagccttagcgcgtctcaatgccatgctccgggaaatgagcgtgctgcttactccggttcctggtgttgacaaggcaaagcaagtgatcaaccaaatcagtgctcgctttgccgagtcgccgaaggctgccactttggtagaaaaacaacgctggagcaaactggtatcgacgctcaccgagttcaccgcctcggcagaggctttacagaaacaggattggaaggtctacttcagtagcaagttgtttgctggagtcccccccgaacaacgtaagcagactatcgtgcagactctgccggaaaatcgaaaacttttagagcgctatgcgtacttgtatcagtgttttaatcaataccgtagtaacatccctagtactattgaaggtctgagggaggttcacgcgcactcggatgaattggccagtattcggtttcttgagaatgacgacgttccaataccggtaagggctttctttaacgcaacctcctcggggagtggggcggacctcgagtttctgactcaggaagttattgagtggctacgcacgaataacatgctcaccaactacgtagtccgggcacgctaa

SEQ ID NO: 346062 - DNA, 3105 bp, Pseudomonas aeruginosa
atgagtctgttgaattattggcctactcatgaagagattaatctctgcatcaaccacgaagcggaaggtgcgcatgatgctgtcctgttggcggtacaccaaccttcgcctctaagttatcggctaatttcttcaggaaagagttttgaggcgagcgaggatgaactcttcaagtacctgatgacaaaagacgtcccatccggatctcatgtggtacccatcactggtgcatctggagttggtaagtctcatatggtgcgtatgctggctgctcgtctacagaacgtgaatgaagatggtcgctacgtcaccattcgcatcccaaagagcgccagtctgcgaagggtgattgaattgatcctggcagaattgccgggtgaagcgtacgcatcagttaaggctgagtttgctaaggcgtttacagaagaaattaatatcgaaactgcagttgttagatttcaagggcaactagatattgcgctgggcgaattggcgaaagagctttttactcagcttaaagctaatcctagtaatatgctgctgaaggagcgtgtcggacacgcaagtgagttgcctaagtttatgggggatcccgagttagtcgaccattttcgcagcaatgtattcccaaaaatcgtcaagcgcgccatcgctgggcaaagtcaggccgatcaggaagggcaagttgaggattttcaggctgacgatttccttctgccggactcaatcgatatcactaaggctgcgtcaaagactcaatcgtactatgtccgtacccttcagttgcgcgaaggcgagggtaggcgcaatgctgcacgactactcaatgagagcaaggttgtcgaccaagctattagccagttatttagcctgcaccaatctctaggtggtatgacattgcaagaggtcatccttgagattcgccgtctgctgctacaacaagagcgtgaactggtgatttttgtggaggactttaaggcgctgaccggcattcaagacacactgctcaatgtactaatccaggagggcgtgcgaggcggtgtcagggagctcgcgacgatgcgctcagttatagccgtcactgacggttacttagccggccaagacacgatcgctacccgtgcaaagcgtgagtggattgtggaaagtcttttatccagtccggaagaggtcttccggcgatccaaagcactggtcgcctcatacttaaacgcggcgcgctggggctaccgaaatttggtgcgtcactttgaaatgaacggtggtgtaagtggcaggcatggtgcatggatcgagccgtatgtcgccactgatgatgccaacgatgtctcagtgttggctgctttcgggaagaaagatgaaattccgctgtttccatacactgagcaagctatcgagcaattaactcggtccgcgctaactagaaacaataccctggtttttacgccgcgcttcattattgataatgttctacgtagcgtacttttgcctggtcgtcccgcttttgagtgtgggcaatttccgtcgccagctattgaggcgccggggacgaatgcggaagtctcacaatggttgtcttcgcttccagtctcggaagaaatgcgagagcggtaccggcgcgttgtggcgatctggggtaatgctccgcgtacaccagtggatattggccatatcccgaaggaggtatttgatgcctttaaggtggatcggccaaacatccaattcacccctaaacccattcctgaacagatcccgaaagacaagcccagtcagttgcctactgactcaccgcccagaccggatgacgcctccttgatcgaggccctcgagaggtgggtgcagaatggggagcgccttaaccagacggtagctaatcaaattcgacaatcgatcgcgtcagctatcactgagcgaattgactggtctgctgagcgcactatcaaatcgccaatcaaggcaaaacagatatcaattccgaatgctcttggggaaggcaacctttattctgacccaatcaaggtggcagatgatcattccgacccgaccggacaattgcgctctgaactggcagctgtggtccgcttaattcacctaaatggcggcaaggtaaattatgcaggtagcgatgatgatttggtctggatcggcaatcttacggatcgattgatgccacaggcgttggcgctcgtacgcgctagcatgcggcagaagctcggcttggcagtacgattgctatccacaaatagccgaattctcggccttatagaacgttaccgtacaccggccagccttgctgcatttctattcggatctcaaaatatttccgagcgcccgcccgaatcgacatctgctgaatttactgaatggcgtgccttgcaggagcaggcattacggatacgccctgacttgatccaacttgtagcatcctactgcggcagtttccagggcactactggtaagattccctatgccatggatatggtgagagtatccgagagcttattgtcagatggcgaaatgatcaatccgaattcgctcgacttgatcactatcgaactgaagcaagcattggcgatcatgagcgaagcgcgtgtaaaggctcaggcgcgcaaagtattgcagcgtgcaagtaacatccgaaccagattggtcgaagagtttggtgaaaactttgataaacaagaggttgcagaagaactcagggcactcgcagaacagttgagggcgtctggtgtttggaattcggacgagattggtattagccatccggcttttaaaggtttgtgcgaggagtttcgcagcggagctttgcgagaagcactttctatgcttgctagttcggtagaaggggatgaagggcagagcgatgaccagttagtcagtcgcatggggcgatttgatattcatccactcatcgtggcctcgcggtttgctgacgcggcgcgaaaagtggtgcgggcctcagacaagcgcgccagggggttggaagtgcagtttcagggtgtggacccgcaggagcagaccagtgagattctaagcttatttgaaagcctagcgaatgaaatagattcactggtagtagtgggagaaactgcatgctcttaa

SEQ ID NO: 346063 - DNA, 951 bp, Pseudomonas aeruginosa
atgagcattctcaatcgcgaaaatgatggcctacacccgatagtgctgactttggccggaatagtcgcccgagaaaaagttatttctcgcgacgagttgatcagaatttgtgtcccgcatgccagttccgaagtggaagccgaaaaagattctgataaggggaaggtcaagggattggcttctcgggcccgtgctacgttggctcgctgggttgcactggggctattcatcgagagcgatgaccaagttcgtttgaacgttgacctggcgcggggcgagtcagttgatgagtttgccgagcgcttgcccgccatttgccgaaggcttgcgttgcatcaacagcacgccctaccactatggcccgcggacggcagcgtttcggaagaggacgttgggcgcactgccgatttttgccgaggtttggcttggtgcttggctcaggatatctatgcgctaccaagcacgcatggtgaagtcgagagtctgatcaagtcccaggtgcaagttgggcgattcatttttctgaacgacacgcgttggactgggttccggtcttgggcgagattccttggctttgccactggagacgactccagctttttctgcgacccaacagtcgcggtgcgtgcagagttgaaagaggtgattcaaaaggacgagacggtgctcgcagttgatttcgttacgcgcctggctgaacggataccggtgttggattttggtgattatcgtctcgaggtagaaaaggtgctgaagcctgaaacatgggttgcaccgtctgccggtcacttgtcaactgcgctgtcattcgccttgcggcgtttacagttacagggagtgatcagcctagtggcattggccgatgctggttcaaaactcacacttgttggtcgaggcggacgtgcgtgggaaagctttacccatgttcgtctactgagggacgtatcatga

SEQ ID NO: 346064 - DNA, 2595 bp, Pseudomonas aeruginosa
atgagtttcggtttcgatgagttgcaggctgtcctcgcggcctggccgaatgttgatgcttggccggagaagatagaggacagcctgctggaccggatctgccaagtactggatgcggcgcaagcccagcgcggtaatgcatcatggcacgctgacttgcagcctttgttacgacaacttttgctccgaaccagcaacggcgtcggcaaaagtatgaggctacgtgtgcctgccggtcaggggtggcctgatcgagcgagttgggccatccatgggatggatgcgatagaggcgggatcctctgcctatctgctggcagctcgcgagtggcatcccgagtggcttggtagtggggagcgtggtgtcttcgcggatgcattttccgatgtgagagtgcgccaggatatggaatgcgaggctgaccctttcattcgtgattccacgggcttcaccaactattcttcccctgggcaacgagaggcggtccgcgcggccttcctgattcccgaaggcgataccctgatagtcaacttgcctacgggctctggaaagagtctggttgggcaggcaccggccttagttaacaaagaggatggtcatctaaccattttcgtcgtgcccacagtcgcccttgccctcgatcaagctcgtgctatgggaaaactattccggagtaatggtctttcccgatcagattggcctttggcctggcacggcggcttatcgcaagaacagcgtgccgcgattaggcagcgcttgcgtaatggtacccagcgcattcttttcacctcaccagaagcgctcactacctccttgcttcgtgccgtgtcggatgctgctacatcaggcatgcttcgatatttcgtaattgatgaagctcacctcgtcacccagtggggagacgagttccgcccctcctttcaggccttggcagggctgcgccacagcctgcttcgtttatcgccgcgtggttttcgtaccttgctaatgagtgccacttttacggaggaaacagttgacactttggcgagcctattcggcccatctgaacgggtgcaaatggtatcggcggtgcatcttcgcccagaacctcaatattggttctacaaggcttcctcgccgcaggaaaaacgagaacgcgtactggagtcgctgcgctatgcgccgcggccatttattctttacgttactaaacgcgaggaagttgtgcagtggaacaccacgcttcgttgcagtggtggtctgcgccgcattgctacattcgacggcggaacgcctgaccgcgagcggaagcgcatcattgaggaatgggctgcaaatcgcctcgacggcatcgtcgcgacctctgcttttggtgtcggcctcgacaaaagtgatgtgcgcacggtaatccatgcgacgattcccgagaccctggaacgttattatcaagaggtgggtcgcggtggccgtgatggcaagtcgtcggttagcttgcttttattcgacgttagcgactggatttttccggaacgactcgcaagacccaagattatttcctatgaactcggcttcagtcgttggaaggcgatgtaccagtcacgccaaccaaccggtgatgaggcgttatgggaaatcaatattgacgccgtgcgcgaagggttgccagggggaagcgaatacaacgttaactggaatatgcgtaccctcatcctaatggcgcgtgctggcctcatagccctcgaccttgaggtcaagtgtgacgagcaggacgcggacccgggcgaggatgcctcgtcgatgctagcggccatggcgaatgtgcgcgtgcgcatcctcaacgacggccatcagattcctgaggtttgggaaagcttggtcactgcctcgcgtaacaatacgctagtggcggctgagcggaacttgcaaatgatgcggcaactgctgccgcagtccagtgggttggatcagcagattggccaagaggtgggcgccactcttgcgcagttgtatcgtattcggtcgccgcgctggccggtccaggtttcgcaggtttgcggtggctgtccgagagatcgcttcggcactgagaacagcaggcactatagcgagcccgtggtagtgccggtgaatcgcgttttgccatcaacaatgagcccctggctggataaatttccttgggtggaccccacctttgcttatgtcttctatgacgaaagccagtctaggcagcagatccaacagtcaatcctgcaatttgcagaatggttggtgcagtcgtgcggcgtacgcgagttggcaactcatccctttactgctttagtgagtcagcctgagtgggggcgcctataccagcgcacgcgagatcgggtgctgctgcagcgatcccttcaggagtccgacctggagccttattcccctctggcacgattaacagtgctggaacctgactcacgcccggaaactctctcggatatccagatgctacaaagacctttccatatcgtgctcttgccatttggtatgttggatcctgttaaccctacacgtcgtctcgccgatgtaagcccgaatgctttgcatttgggcaacctcactcaagtgataagtcaatga

SEQ ID NO: 346065 - DNA, 3288 bp, Pseudomonas aeruginosa
atgttctgtttagtgaaggattccgaaagagatggcctgtgtaagcttgtgcgcagtgagggcgcgcgagccttggttgaatatttcgattacccagggagcgatggccggtgccgtacggaggtcccgttttcttcaatcaggcccaagcgattgggacgtaacacccgagtcttaacctacgatgaattgagcgaccagtggcgtatcgggcgggtgcgtgaggacgacggggagggcgtcgagatccgcttggctgacaaggttaatgtatatctaggctacgatcaggttttcgtccgatggaagcacccgattcaggatccagttgacttcctcggcaacttcgttaccgaaaccccactcttcgcggaggcgcgttccgggtttttacggaattatcttgatcagcgaggtagtgcgttcggcatttctgccctgctttcgtcttctattgaattggagtcgcaccaagtcgatgttattcgacgcgttttgaccgatcactcccagcgttatttgcttgcggacgaggtcggccttggcaagaccatcgaggcaggagtcatcatccgtcaagcagtgctcgacgatttaggtaaccatcgggtactcgtgctggtcccgcatgctctggtgacccaatggcgggatgagttgatcgttcgctttgggcttagtgaattcatcgacatatcggtattcgttctggcgcaggaagacaatgagcacttgcgcgaagtgctgccaaatctatctatgcttgtcatcgacgaagcgcatcacttggccgatcctcgcgcgagcgatactacgcaagacttgtaccgtctaataagcgacgtggcgcagcgtaccgatcgcttgctactactatcggctacgcccattttgcgcaacgagtcaggcttcctccgtatgttgcatctgctggatccagtggtttatccgctagatgacctagagagttttcatgccaaaatcgtcaatcggcaggccctcgctgaagcggttgctgctttagatccaagcaattcattcttcatggatggtgtgcttgatgatttgatcgagcgcattccggatgacgcgcgcttggttcaattagtaggtgcactgaaggagaagttgctagagttgccggaggaggatgatccggaattttgcgcaactgtacggtatctgcgagcccatatctccgagacttatcgtctcaatcgtcgcattctgcgcaaccgacgaagccaagttggggggctaactcccgaacgcaaaggagtacaagtctggaaggtcgaggatacgcccatggcgcgtctcgaatcacttctagaggactggcgtgttagtgcctctttgtcgatctatcaacaagataacgttgccgcgcggacgctgggagcgttctactggagcgcggtttgtactcttttggagaacctaggcgcgcttcgtcaactttgcttggaacgccaacgtagcatcgggatcgattcgaacacgtcttttattggagaggaaggtcttcttgatgcgatcattcgtgcgattgacaacgatgagtggatggcgacccgtctcgatcaattgtataaaggggtgcgatcgctgccggagtcgactaaggcggtggttttctgcaccaatgaaaccgtagctgacaaagtcttcgctcacctaaagagcagcagaatctacgtggttcgacacaatattggagaatctactgcatgggataatgggtctaattggcaagaatttctaacggatcccgcgattcgagtcattgtctgcgaccgccatgcagaagagggcatcaacctgcaaggcgggaacaaggtcttggtgcattttgacctcccgttacagcccaatcgaatcgagcagcgtatggggcgtgttgaccgctatggtgctggcagttcggttcagtcatacgtattgctcaatgaacgtgctcctatacaagcagcgtggtttggaattctcgaccagggatggggcatcttcaatcagtctatttccagcctgcagtatttggttgagtcagagctaagtgatttgaagagcgcaatgatccatggcggcgtagaagcacttgacgcgcttcgcgagcgattggctggtccctcgggcttagttgctcgcgaactcaaactgattgaccagcaagacgcactggatcagttgtcacctgtgcctgaagcggagttggacgaactcttcgaagtcgattcggattggaggactatacgggacacaatgatgtattggattgaggacacccttctgttccgcaaggtagtagaacagagtcggcccggtacacagcctgtggatgaaccattccgatttcattatttctcgccggatggcgacaataacccgccaaccctcattccttcgtcagggttcatcggtgactttttaggtgccattgactttgatgcacctggcagtcgttcgactcggccgcaatcttatccatacattgtgcaccgccccaccgcagtgagacgaaaggttcgtccgctacgttacggtacagagttcattgaggccatcaaatcgttttctgagacggacgaccgaggtcgcagttatgcgatgtggcggcaagtgttcgatcacttcccgtcttcagaaatccggctctgcttccgcttcgactttgtgatcgaatcttgcttgaacgaagcagtcacaattttgagtgccgaccaaggccagtcgagccaagcagcacgtactgtgctggcgagacgcggagactccttgtttggcccaacagtgatgcaagtctgggtggacgaggacggcgatgaactgacgcaagatttcattgagcgttttttgatgcctgagtatgcaaaaaggggcgggaacggttacattgacaagaatcttgagactccttactttcgtgcttttcggaggatggcgccagatactttcgccaactggaaggagcgttgcgaacggatgcgtgaccgcgcgcttgctatcgtgagggccaggcccgaattgaaagggcggcagcatcgcgcgcttgagcgggcgctggctgaagacgaaattcgctatgcccagttgcaggctcgcatccagtctttacatggtagggaggcagaagccgaggcgcgccaactcaagcttgagcaggcacttaacgaagcacttcaccgtggcataatgtcaccttcggtgaaggtcgacgtcgcaggcgtggttttcctcaccagcgaacctgtatcaatcatccagcgccacgttcaggaagacgcatga

SEQ ID NO: 346066 - DNA, 270 bp, Pseudomonas aeruginosa
atggctgagttcgaatcctgcatcgtacctttcccgctgcagcgaagcccgctgcatgaatccgaacgctctcccctaccctctgaagctgctgctgaactgcgtggcgtcatgctcggcaatctgctcgatcaactggctgaacctgacggcttgcagccggcagacttgcgcgtgcgcatcgctgcttactcagctctggctctgctcgatgagatggtcgtgctctatcgccgcgccctctctgacgttcgaggaggtgcaatatga

SEQ ID NO: 346067 - DNA, 813 bp, Pseudomonas aeruginosa
atgggagctttcactccggctggagaaacgcgcgtagctgttctggtggattgcgacaacatatcgcccgagattctggaacacgccttacgcgtggttgcccagttcggacgtgtcgtcctgagaagggggtatggcaatcacggcaccttggccaacaagtggcaggaggctctggttcgactggccttcacgccatgcctgcagtaccagtatgcagccggcaagaatacctccgatatcgccttggccctggatgcaatggaggcgctcttcgatcaccgtgcggatacgttttgcctggtgaccagcgattctgatttcgcttacctgtgccgcaagctcagggagcgcggcgcaaccgtctgcatcgtcggtgaatccaagactcccgatgcactgcgcaacgccagcgaccagttctttgagtggcgccgcgaggagcacttccaggagcctgttgcggagcaggctgacaagcccgcagccaaggctgaatcaagcgccaagcaggaaaccgccaagcctgaacccagcaagccagtcgttaaacggcggccccgattcgtggtggatgccgtatctcttcttgcaggcggaaccagtgaaggcaaggtcaccctgagcgtccttgggcaatatctcaaacgtactgatccggcgttctcgccaaacgcctacggccattctggtctgctcgacatgatcagaacctacgacctgctgcacctgatccaagagaatggcgggcactggactgtggggctggctgccaaggaagaggaaccggctgaacacgcagcgcatgcctga

SEQ ID NO: 346068 - DNA, 528 bp, Pseudomonas aeruginosa
atgacgttgggtgctcgcggcgtgcggtggccactggcgctgctcgcaggcagtctggttgccctgggatgggcagcgttcacaacgtcgccgccgcggctggtctacaacgcgtccgacagtctgcctatcggttggtaccgcatttcgccggtcgacgcactggcgcatggcgatctggtgctggtccacctgccgccggaggtgaggtcgctggcggcgcagcgcggctacctaccggcgaacgtaccgctgctgaagaccgtggcggcgatcgcgccgcagcaggtatgcgtgcagggcagccaggtgcgcatcgatggtgacctagtggccaagcgcttgaggtgggatcgacagggccgcgcgctgccaacctggctggcctgtcggcgcctggttagagatgagctgttcctgctcagcagcagcaacccggcgtcgttcgacagccgctacttcggcccggtgtctgccgacgcagtgatcggtcgggcgcagcccttgtggctggagtcacgtcgatga

SEQ ID NO: 346069 - DNA, 1950 bp, Pseudomonas aeruginosa
atgagcaaaggaagccgtccggacgacgaattgcgctttcgcccgcagccgggcaagccgcagcaacgcgatcaacccttcatcaaccaggtgctgcgccaggccaacaaggccggcaccggaaagccgcgcaaagcgagccaccagcccggcgctcggctcggccgcgggcatgtcgccgctcgcttcagcgcgcagcaactgccctacaacgcccggcgcgtcaccatcaagacgcgtctggtgaacctgtgccaggctggcaagcactcgacgctcagccacctgcgctacatcgagcgcgacggcgtcagtcgcgagggcgatccgggtcaggcctacgggccgctgaccgaccaggccgacctcaatgcgttcgaggaaagtggccgggaagatcgtcaccagtttcgctttatcgtctcgcccgaggatgccgagcagctcgacgacctacgcacctatacccgccacctgatgagccggatggaggccgacctaggcacccggctcgactgggtggcggtcgaccactggaacactgacaacccgcacacccatatcgtgttgcgtggcaaggacgacaccggcaaggacctggtgatcgcccgtgactacatcgccgagggcatgcgcaaccgcgcctcggatctggccaccgaatggctcggcccgcgcaccgaactggagatccagcagagcctgcagcgcgaggtgcagcaggagcgtttcaccagcctggatcgctccctgctgcgcgaacaccagaccggcgtgctcagcctgaaatcgctcgccaaccatccgcgccggcagttgctgatcggccgcctgcagcaattgcagaagcttgaactcgcccatgaagttcggccaggacaatggatcctgcgtgacgacaccgaggccactctgcgtgccatgggtgaacgcggcgatatcgtgcgcacgatgcagcgggccatgggtagcgtgcagcgagagctggcggtattcgagccgggcaaggatggttctgttgtggttggtaggatcgtagccaaaggcctagccgacgagctcaacgaccgcggttatctggtggtcgatggcctcgacggcaaggcgcattacctggccctgcctgcccacgctgaactggccaactaccccatcggcggcctggtggaaacacgcagtccgagcgaaccacgcgcggtggatcggtcgattgtttctgtggcttcgaacggcctttatcgcaccgatcaccacctggccctggcacgctcgcagtcgagcgacgggcatgacaccgaggcattggtcgagcgccatgtacggcgtctggaagccctgcgccgggccggtatcgtcgagcggttggccgagggtgtctggcgggtgccggccgacctgcccgagcaaggccggcagcatgatgctcgccgcctgggcgacgtcgccgtcgagctgcgtacgcccctggccctcgagcagcaggtgcgcgccgtcggcgcaacctggctggatcaacagctgatcggcggcaaccgcgagctggtcgacaagggcttcggcaaggaggtgcgcgaagcgttgcggcagcgcgccgacttcctggtggaacagggcctggccgaacgccagggccaacgcgtggtgctcgcacgcaacctgctggccaccttgcgcgggcgggagctgaccgcggcggcgcgcgagatctcggcgcagacgggcctgcagcaccgcctggcggttgagggccagcgcgtcagtgggatctaccggcgcagcgtgcaactggccagcggccgttatgccctgctcgacgatggcgtcggtttcagcctggtgccgtggaagccggtgatcgagcagaagctcgggcagagcgtgtcggcgctgatccagggcaacagagtctcctggcaactgggtcgccagcgcgggccgtcgattggttga

SEQ ID NO: 346070 - DNA, 504 bp, Pseudomonas aeruginosa
atggaacagtccttcctcaccgtgcgcccagcgacccaggccgacctgcccagtttggttgaactgcgcgcgtatctgctagacgacagcaacgccagctattcgagtaagacgccggaggatgcggctcgctggcgggcggcctaccgcacctggttgagcagccgcctgagcgaaagtgactgcgtgcagattctcgccgccgagcacaaggaatccggccaggtgctgggttgcgcgaccgccatcatcgaccagcgcgcgccggcaccaggctgcctcaacggcctgtccggctgggtgcaatcggtggtggtcgagccacagtggcgcggtcgcggtatcgcccggcagttgatgcagcacctgctgcgctggttcgccaaccgcggtgtcggctgcgtggtgctgcagagcaccgaggccgccggtacgctgtaccaaggcctgggcttcgccgtcagcgacgagcgcttgctgatccgtcaggaggcctcggcatga

SEQ ID NO: 346071 - DNA, 621 bp, Pseudomonas aeruginosa
gtgaccggcaagtacttcgacggcaagaccctgttcgatccaggactgctgacccagctcgacatgcacagtttcctgcgcgacagctacacccaggccatcgccgaggcgccggtactgcccggtgagggtgcggtcgaccagcgcatgcggcagatgagctacgtcaacctgacgcgcttcgttcagaccctgctcgaccgcaaggatcgcatgagcatggccgtcggcctcgaggtacgagtgcccttctgcgatcaccgtctggtcgattacgccttcaacatcccctgggcgatgaaggccttcgacgggcgggaaaaaagcatcctgcgcgcggcgactcgcgacctgctgccggagtcgatcagcgagcgggtcaagagcccctacccctcgacgcaggatccggcctacgagcaggcgctacgtgatgccctggccgccatccaggcggatcacaatgcgccggtgacgcccctgctcgacagcggccgtatccagcaaaccctggccaagccgctcggcagtgtctcgcccatgtacgagcgcatgggcatggagctggcagtcggcctcaacacctggctgaacgagtacgacgtcagcctcgaactctag

SEQ ID NO: 346072 - DNA, 186 bp, Pseudomonas aeruginosa
atgagatacctgacattgctgccgctgctggtgctggtcgcctgcgggcaggacgacgacggcgtcatggctcgacaagacgatgcgactgagcgcttctactcgggctgtgctcggcctggcgagtttctgcggcctaccgacttgcccacgatcccgccaagcttcgacgaggacgtgcaatga

SEQ ID NO: 346073 - DNA, 936 bp, Pseudomonas aeruginosa
atgagcacctgggataagcgctacaccgaccgagtccagttgttggtggaaattttgccgaccttggcgaaagaaacacgattttccctcaaaggagggacggcgatcaacctgttcgagcatgacttgcccaggttgtctgtggatatcgatctgacctggttgccgatgcaggactatgcgcaggatgctggtcagatctccgatgcattagaaagtctgggaagggtacttggctctgcgtcattaaggctacaggtacaaacatcggcgccagagagaggtggcttcataaacagactgatagtgagtcgtggacgagcccgagtccaaatagaaacgactccggtgatgcgcggttccgtgcatccggtacggacaatggttatccagccgcaggtccaagaggcctttggctttgcctcgatccaggtgctcgactttgcggatctatatgcggggaaaatggcagcagcattgtcgaggcagcatccgcgcgacctgtttgatatcggcttgcttctagaggatccgcgcacagatgagcgcctttggcgaaccttcctgatatacatgacctgcagtccgaagcctgcctgggagatgctggttcccaatgagcccaaggatttcgaggcgatatacgagacccacttccgtggtatgactgctgcccctgtcagctcagagatactgctggaataccgcgccaggcttcttcgacaaatttcagagtggcttaccccgcagtcgagagcatttctggagtccgtcgagatggagaatccagattttgacttgatcgagttgccacaggcagcagagctacctgcgataaaacggaaactgcagaatcttgcttcacgatcagctgcgaagcgggcttccgaccattctcagttgcaagcggccttcgagatgtttgatcgtcggtag

SEQ ID NO: 346074 - DNA, 135 bp, Pseudomonas aeruginosa
atgatgccgctcctgcgttcgctgcgctccatcctgaagaccgcgaccgtgtgcatgaaaccatacaggcgtcggggcagtcactcgcgctttggcatgacgagtaccgagtgcagtttccagacggtcgggtga

SEQ ID NO: 346075 - DNA, 612 bp, Pseudomonas aeruginosa
atgcaaccactcacctgcgtcgcccaccgcctggctgtgcctgcattgctcgccggctgcgtactgatggccggctgcgccaccacgggcgtggcgaatcccccgacggccgctgccaccgcgcccgagccttcggcgtttgtcagggccatcgccccggagtctgagccgaacctgatcccggtggcgcgctacgggcgctacacgctggtcgagatggtgcccgagccggcgcagcgcgacctgctgcggcaggtgatcgagatttcgattccgccgaccttggacgcgagcgtcggcgatgcgctacggcacgtgctgctgcgcaccggctaccgcctttgcgacgcgccggacgccgcttcgctgttcacgctgccgctgccggcggcgcatctgcggctcgggccactgccgttgcgcgatgccttgctggcgctcgccgggccggcctgggcgttgtccgtcgatgacgctgcgcgcgcggtgtgcttcgcgcgcgtgacgactgcgcgtgcgccgagtgcaagcccgattcccgcgcctccggcaccgagcgcgccggccgacgaacccgccgatccccatgtgccccaggaggcccagccatga

SEQ ID NO: 346076 - DNA, 567 bp, Pseudomonas aeruginosa
atgaaccgcatcctccttgccgccatggcggcactgctggccgccacggcccacgcacagggccgcggcccggtcatcaagagcagctccccgccgttgatcgtcgtcgaggacaagggcggcagctcggcactgccgcactaccgggccttgaacccgcaggatgcgcagcccagtcagccagccgcgccgcaaccagcgccgcaatccaggccgcgcattggcggcccgaccgatgccgaggcggccatgctgccggtgcgctcgatgcggctgacacccggcgacgagccgcgccgcgtgatccgcgcgccgggcctgacgccgctgttcctggtcggcgacgacgaccgctcgcgcgactggctccaacagcggggcaaggacttacaggcgctgcgcgccgtggggctggtggtcaacgtcgcgacacccgaagcactggccgcgctgcgccgcctcgcgccgggcttggtgctgttgcccgtctcgggcgacgacctggcgcaacgcctgggcatcaagcactacccggtgctgatcaccgccacgggcatcgagccctga

SEQ ID NO: 346077 - DNA, 741 bp, Pseudomonas aeruginosa
gtggcgctacgcagccaagtcaaccagttgttcagccagagtcggggctcggccggcagccgcagcattctgggcatgctgcgcgaagagggcgtgaccatcggccgtttccgagtgcgtcggttgatgcgtgagctgggcctggtcagcaagcaaccgggctcgcacgcctacaaacaggccacggttgagcggccggatatcccgaatcggctgaaccgcaaattcgcgaccgagcatcccaatcaggtgtggtgtggcgacatcacctacgtctgggcgcaaggccgttggcactacctggccgcggtgctggatctgcatatccggcgggtgatcggctgggcgttctcggccaagccggatgccgaactggtgatcaaggccctggacatggcctacgaacagcgcggcaagccacagcaggtgctgttccattcagaccagggcagccagtacgccagccgcctgtttcgacaacggctctggcgctatcggatgcagcagagcatgagccgtcgggggaattgctgggataattcgccgatggagcgcctgttccgcagtctgaagtcggagtgggtcccgtcaacgggttacctgacggcgcaggaggcccaacgggacatcagtcattacctgatgcaccgctataactggatcaggccgcatcaattcaacgacgggctaccgcctgcggtggccgaagaaaaactcaacccactgtccgggatgggttga

SEQ ID NO: 346078 - DNA, 162 bp, Pseudomonas aeruginosa; identical to SEQ ID NO: 332592

SEQ ID NO: 346079 - DNA, 264 bp, Pseudomonas aeruginosa; identical to SEQ ID NO: 332591

SEQ ID NO: 346080 - DNA, 231 bp, Pseudomonas aeruginosa; identical to SEQ ID NO: 332588

SEQ ID NO: 346081 - DNA, 357 bp, Pseudomonas aeruginosa; identical to SEQ ID NO: 332093

SEQ ID NO: 346082 - DNA, 1233 bp, Pseudomonas aeruginosa
atgctcgacaagttgcacctcttcgttccgttccgcctcgagcacatcgaactgctcggggtggaagggcgtgcggatccggtgcacgtcgtggatctggaaagcctgggcgtgccgctccaagggcagatcagccgaggggagggcggagagctacaggcggattacttgcggcacacctgggagtcactgagtacgggcttcacgcctttggcgttcaaggtgtttcaccagtccttgggtaagcgcctgatgcccggtgtagagctgaaggccagcccggcgaagttgctccaggggcacaacgtgtttggcccaacctgcatccagaagggggccgaggtgatgttcaagtggctagccggaagctacccggacctcttcgcgaagctcgatgtgtcagcgacgcaggtctacaccctggactgcacgtattccagccggctgccggacgaacgcacggcgctccaggtcatccaggcgctgaccaacgtcagcaacggccacaccaagagtcgcggcgacaactaccagacgtccgcgtactggggcgcgaaagaatcccgcctaaagcgcctgaaggcgtatctcaagcacaccgagtttcaggcccagttggacgaattgaagcgggcagggcgggccgatctgtcggctgctcggtctgctcgggtcatgtctgacccacggttgcaggagtgggtgcgctacctgctccgcatggaggccacggtaatgcaccggtggctggaacgccggggcatcccgtctcggcttgttgatctgatcgcctaccagcagcggctccaagaagaggggcgctgcctgattcaggagtgctggcaagcggttacagcggaccttttcgcggcctttgagggtatccagatgcgtgtgattgatgatgaaaaagtgctggccgcactgactgagcgacacctgaagtacgaccgtaagggcaagcccaacgatagccacgctcgaaacctgtttcggacgtaccgcagcctcaaggactacgggtggcaggaaacgatggactccatgtctcgcccgacgttctaccggcatatcaaggaaatctgcgaggccggcctgtcgaaagccgccctgcagaagctccacgaagcggaccgggcgaacaacgtcgtaccgctgctgcggttcgtccaggtcgatttcagcgcccagcgccccgactggtacgtcgagccgaccgtggaggccgcttga

SEQ ID NO: 346083 - DNA, 345 bp, Pseudomonas aeruginosa; identical to SEQ ID NO: 345846

SEQ ID NO: 346084 - DNA, 1749 bp, Pseudomonas aeruginosa
atggataagaaagttttcatcagctactcgcatagagacgaacaatatagacttgatcttgaagagcatcttacaatgcttaaaaggaaaggaacgatctctatctggcacgacagaaagcttgtcgctggagatgactggaaagacaaaatagatgagaaccttgagtcggcggacatcattctcctgctgatcagctcaagcttcctagcatctgattattgctacgacaaagagctacagcgtgcagtagaaaagcacgaagaaggcactgcaaaaatattctccataatagtaagaccatgtgactggcatgacacttctttctctaaataccaagcggtccctcgagatgggaaggctataacactgtgggaaaacgctgatgttgcatggttggatgccgtcacttcccttaaagtactaattgaaaaattttctcctgaagctcaaaaaaaaaacatagagaaaccgactgagggagtgtcagtatcaccagcgcatgagctatggctagaagatacagaaatcattcttacccacagaaaggtagacaaggtcaaactcggaaacatttatgtttacccagacatcgagcttgacccaggactaaacaagtccttagagatagaaatattcgaatcaagcaagctgaccaaagacaaagggctttacattgtattaggagaggagcaacaaggaaaaacctccttacttaaaagaatatttcacgacacagccatttccggaaagctgccgctttatatcgatgcagaactagtcaaccgcaccgatctagagcgcctgatccaaaaagaagttgaacgacaatacattaacctgccccccgatgagttcatggctcatccagatagaattatccttctagataatttagatagaatcggactcaacagcaaacacagaaatctctttattgaaaacataaccgctcagttcgactgggttatttcgacctgccacgccgcgttcaactatatttctgcagaaataccagcactctctacctacaaagtggccgaccttctaggattcggaaacaaaaaaagagaggaagtcatcagaaaatggattagccttggagtagaggaatcgatagatgattccctgctctattcgcgctgcgacgaactaaagaaccagctaaatatagtcataaagagaaatattgtcccacccaaaccaatctacgtattaatgctaatgcaaatgttcgaagcatatgcacagcaaaacattgagctaacctcatacggccactgctatcaacagctaatatatcaatcattcgagaaggccaaaataagcggaagggactacgaaaaatatctaaacgtccttactgaaatatcgtgggaaatattcctaaataacggaggaataaatcaaaatcaaacagatgattttttccaaaattatggaaccaaatatctctccgtaaacaaagaagagatactaaaaaaactactcgcccactcaatactagcaaaaaagcaaggcacccttaacttcaagtacccctacatatattacttctttgttgggaaaaagatcgccgagggatattctgagagacaggaaatcagaggaaaagtgcaagacctactaaaggacttacacagggaagatttcgcaaatatattaatatttattactcaccatacaaaagaaagctgggtcctaaacaacataaaggaggtactctcatctctattccatgaaaattaa

SEQ ID NO: 346085 - DNA, 690 bp, Pseudomonas aeruginosa
gtgaggcacaagcccctccgttattggcactacgaactctttatgagttttctctgtctcgccgcggatgaggatcagttgattttcccagtcgatgtcgcgcttgcggatgcacaacagcgcattcaaccggattccggtgaagtagaagacctcaaacgtgcaaagccagaaccaggcgggagtgatgcgtgcgcgatcgccagtgcagcgctcggcgccgacctgcatgttgagccaattgcgggcgcgcaggatggcttcggctgcgacggttttgcttgctcgcctgggggggatgacggtggtctttctgaacgggttgacttgggagtgtgtcaccagctcgtgctcgatggcatagccccagatcgttcgcagatgattcgaatacgtgttccagctccgcttcgacaggccttgttccaggaccttgcgccgccatcccagcacagacctgtggtccacctcctgtacggttgccgtagggccgaagtgcttgagcagcgccttggtcgcggcgcggtagatcttcgcgctggcttctcggagatcgtgcgcgaagatgtactcctcggtgagctgctgcggcgtcattccacacctccttcggcatcggtgatgaccgtgaggcttgggttgtccagaggctgcacagggaacagcaatttgggatcctggagcaggtag

SEQ ID NO: 346086 - DNA, 348 bp, Pseudomonas aeruginosa
gtgcgtgcccgcctgcgcggcgccaaggccgacgccgacgccgcgctggccagctacgaacagcaggtgctgctggccctggaagaatcggcgaatgccttcagcgactacggcaagcgccaggagcgcctggtctcgctggtccgccagtcggaagccagccgcgccgccgcgcaacaggcggcgatccgctaccgcgaaggcaccaccgacttcctggtgctgctggacgccgaacgcgagcaactctccgccgaagatgcccaggcccaggccgaggtcgagctgtaccgcggcatcgtggcgatctaccgctccctcggcggtggctggcaacccagcgcctga

SEQ ID NO: 346087 - DNA, 1317 bp, Pseudomonas aeruginosa
atggtcctggtcgactatggcagcccgcaggccatcggcttcgtcatgggtcacaacatgcaccgcaactactgggacaccagcgcccacctgttcgacgaccgcgccgccggtcgcgatcccgggttcgggccctggcaggatatctccatgcaggtccagggcccggtgctggccgacctcagccgcaacttcagcgaggcctgggacctcgagacgccgtggtacaagcgctggttctcgacgccatcgctgaccgccgagcgcgacgccttgccgctgccgaagatcgccacgcccgccagcaacagcgtcgcgcagatttgccgaacccagccgcaggacgacgagcgctcgatcctggagcactatctcaaggccctgggcaatgccaccgactacgtctacatggaaaaccagtacttccgttatgccggcttcgccgagcgcctgcggaagactgcgcaggtgcgcaaggcccggggcgtgcccggcgacctgtacctgttcgtcgtgaccaacacccccgactccagcgacgcctcgaagaccacctacgacatgatgaaaggcctgggccaggagcaactgatgccgcaggtacagcgcgacctggcgcatgacttgcgggaaaagcgggagcagttgaagcaggtcagggaaaacctacatcccgatccctatgtccggcgcggccaggaaaacaacatcgaacggctggagcgcaagatcgaggcgctcgaagagaaaggcgtgacgccggaagtcgagcaacgcctcggcgatctcggcgcgcaggagattcccggactggcgaagaacaccggcgaggacgacaagccctatcaactcgtcgaagtacccggcctcaaggtggtcgtcgccaccctggccaccagcgaccctgcccccggcagcccgccgccagcgcgcctgtccgccgaagccgaggccgccctcggggcgccgccgctgaaggcgcgctacaagcacatctacgtgcactccaagctgctgctggtggatgacctctataccctgctcagctcggccaatatcaatgtccgcagcatgcatggcgacagcgagttggggattgcccagcccaatccggatttggcgagggcgatgcgggaggagttgtggggactacatgcgtatgaagtggctgcaacaaccaaggacaactttgaactttggaatcaaacaatggacaagaactggaaacagcagcgaaacgatgaacctctcactagccatctattacggttctgggatgtcataacaccttatagcccgagctttacggtggattaa

SEQ ID NO: 346088 - DNA, 1692 bp, Pseudomonas aeruginosa
gtggcgtctccatttgatctcgtcgagcgcggcctgcaggagtgcaggccggatacatggcgtcgcctgactgcccaagagctttcggtcgatttcctgtgggcgtttcgttcagggtggcgggttgatttgcaggcgggagaggtgagcattgccggtgtggaccacttgctcttcgttattgatgctgctttccccaactcacaaccgcgggtgtttgcgccaggtgctggcagcgattttcggtggccacatgtggagcgcttcggcctattgtgcctgcgtccgacctccctatttgctgatgtggctgatcgcattggggtgcaccttgctgatgccttagagctgcttacctactcggcagccgagtgtcaggcagagttcgaaagggagtttttggcgtattgggcgcagcaggcagtcagcgctagtagcagcccacagatcctgagtttgcttaagccgggcggggaggcccgaacgatctatcagtactttgattatcgtgcggggaagtgcgtggttgctgacgataagacgcagctcaaggactggctccgcaattgcggggtaaatgctggtgacaaggacattctgcctgcgaccctcctgaaactgtcccgtccattgactcccgcacaattcccacgctcagggggggacttggtacaagagctcacggatgacgtgctgaggcgaagcttggtgcccgggcgcagaccgttgttcattcttgaggctcatactccgactgggcctgcctttgtggccgttatctacaagagcggggctatagatgctctcacaagagggtttcgtaacatcacacatgtgccgggtgaccgcatcagagggtggttcaaggggcgtgccatcgaacgtgtcgtggttaatagagtggatggactctggatacatggccgggaccattcttcggacttccttgagctcaaccgccggcgggtggtggtggtggggtgcggcgctattggatcggccgttgccaatcttcttgcccaggcgggggtgggtgagctgatatttgtggatggtgatgagattcactcggccaatgcgtctcgccattttcttggagtagatagcctgcgtgttgacaaagtgacaggactcgccagggctttggctcgcaagtttcctcatttgacattcgaccacgcgtatccatttcgctttgagcggcttccagttcagcacttagccagaatcgcagatgcggatctgatcattgccgcaggtctcgatttggagggcgaggcggctctcgatgcgtggcgcgcttcactgccctgtccccctgcatacttgagtacctgggcggaggcctacgcgatggctgggcatgctgtgttgctatacggtcctgaaaggctaatgtctcaattcgacgttgatgaacgcccgtcttttcggctcactgactggccggatgaatcgggggcgatcgtcgtcgaggcaggatgtgggaatgttttccagccgcatggtgctgtggatctgcatcctacaattggcatggctgcagggctggccttggacgctttattggggcgagtcccgaactcctgccgaagagtctggatggggagccgggagcgtgtagagcccctagggggcacgctcagagcggctttcgacaaggccaatactgttcaagagtacgcgtggtga

SEQ ID NO: 346089 - DNA, 1047 bp, Pseudomonas aeruginosa
atggccgacatcgattgccacggcgagatgaccaactttcatcgtgagaaggtcacgctatccagcgcgcagcagggtgacatgcgtaagcggcgggatgcagggcggacgcgtctgaaaaatgggctggatactgccgagaagtcgcagcccaaagagattcggtcacaaggctcctaccagatgcgaacgatggttcaggataatgacaacgactatgacatcgatgatggggcttactttcgctcggaagatttgactaatgacgacggagagcctctatctcccaaggctgcccgccaacgtgtctgcaatgccttgaagtgggatggtcgattcaagcaagaggcaacagtcaaaagaaattgtgtgcggcaggtatacgccgagggttatcacattgatgtgccggtatatcgtatcgtgaaggccacgaacctcttcggaaaggaggaggagcgctttgagttggccagcggtgatgagtgggttgagtcggatgcgcgagcagtaactcggtggttcaacggtttggttggcgagctcaatgccggtgaggcggacggcagccaaatgcgccgggtgacgaagctcagcaagaaattcgcacgcagggccaagtggaaatccaaaaccaccagcggcatcgcgattaccaagctggtcgtcgaccacttcgtcagcaaagctgaacgtgatgacgtgtcgctcagggagacctggaagaagattcacagcaagctgctgtggtcgaccgaaattaagcaccctgtagtgacgagcaacattgctgaggccggcgatggtcaggtcgagttcttcagggattgcttgggggaggcactagacactctcaaggtattggacaagcatgactgcgctcgtaaggaggcacgagaggcgtgggatgaggtattcgatacgtcgttcttcacggaccaacctgatgacggcgacgaggggcggtcgaaagcctcaaccgcagcgctatcggtgacttcagttgagactgctcgtcgcaatgacggcggtggtaggttcggctga

SEQ ID NO: 346090 - DNA, 1104 bp, Pseudomonas aeruginosa
atggaagaggaacaaaagcctttcagggttttatgtctagatggtgggggcatgcgaggggtttaccaagctgcctaccttgcaacctacgcggatcggcttcggaaccgagctgacacggtgggtaatttgttggatgtcggcagtgcattcgacctcatcgtcgggaccagcactggtggcatagtagcttgcgccttagttgctggtgtcccgttacagcgggtccagtctttgtactatgaaaacggacccagaatattcccctatcagtggctccgcactaagacgctgcctggctacgcaatcaggcttctagggctcggcctgaagaagggcaatgatgctcttcgctccgcgttggaggagacgctcggtgagcgcacggtggacagcgtttatcgaggccgcggaattgcgctggcgatcccaacggtcgatctcaatcgtcatgctgcagtggtcttcaagacgcagcatctttcccgcctcaatggtcgagacaatacacgcaagcttgttgatatctgcatggctactactgccgcgccgattcttcgctccatggccatgctcgaagagccgggaggcgccggagctaccccggccacatatgttgatggaggtctttgggcaaacaacccaggaatgctcggaatgatggaggctgttgagattctgagtgatcgaaaagaggcacgccctatccatttgttcatgctggggactcttccctctcagggtggagaggaggtcagctcaggttccttgaatcggaacgccttcggttggatgttcggtattaaggccatggaagccagcctgaatgctcaagctgtgggctacgactacctggcgaacaagatggctcagcttcgaggcgatggaagctttgctttccgtctaccggcccaatgcccatcgaacgagttgaggaattacttggcgaacatggacgatgccagaccgaaagtgctgaacgcgcttgcccgacaggcgatctctgatgtggactacgcctgggcggcatgtgcccgtgatcctcatatgcaagctttccaggctgcaattgcagcagccgcgccacattccgccaacagctga

SEQ ID NO: 346091 - DNA, 2739 bp, Pseudomonas aeruginosa
atgaacgccgtagaaatcgaacaagccatcaccgacctggcgggtcagccgtttgaccaagtcgagttcccttatgccttcctgcaggccttcggcaacaaggaaaccaccctcaagcgtctgcgttcgggggcaaccaataagtccgatctgggcggtgtgctgcaaaccagcaatatccacctggcggtgtgtgaggccggcaaggtcactgagacgctggccgccctcaaggctagcccggccacagctcgggccaaggctaagtacgtgctggctactgacggcgaaacactggaggccgaggagctagaaagcggcgaaactgttgcttgctcctacccggaattccccgatcactttgggtttttcctgccgctggcagggatatctacggtcaagcagatccgcgagaactccttcgatatccgtgccaccagccgcctgaaccggctctatgtggagctgctcaaggacaatccgacctggggtagcgccgagcgccgccatgagatgaatcacttcatggcgcggctaatcttctgtttcttcgccgaagacaccgacatcttcaacgggaccggtttatttaccgacaccctcgcgcaaatgagcgacagggatgctggcaacctgcatgaggtgatgggcgagattttccgcgccatgaacaccccgattgctcagcgtgcttcggcaaacctgccgcgctgggcagacgccttcccctacgtcaacggcggtctgttctctggcgatcccgatgtaccacgtttttcccggattgctcgcagctaccttctgcatatcggtgcactcgactggaaacagatcaaccccgatatcttcggctccatgatccaggcggtagccgacgatgaagagcgaggcgccctgggcatgcactacaccagcgtgcccaatatcctcaaggtactgaacccactgtttcttgatgaactgcgcgccaagctggaagaggccggcgataacccgcgcacgctcctcaacctgcgtaagcgtttggcgcgcattcgtgtattcgacccggcctgcggttcgggaaacttcctggtcatcgcttacaagcaactgcgcgagattgaaaacgcgatcaatgaacagcgtggcgagcctggacggaaaagcgaaattcctttgaccaattttcgaggcattgagctaagggatttttctgcagaagtcgcacgactggcactgattattgccgagtaccagtgcgacgtgctttatcgcgggcagagggaagcacttctagagttcctgccattgagcagccagaactggattacttgcggtaatgcgctgcggctagactggatctctatctgccccccgacaggaactggggtaaagctaaatgcagacgatctattcggaagccctctagaacaagctcaaattgattttgaaaatgaagggggtgagacgtttatctgtgggaatccgccctacatcggtgacaaaaagcagtcagaatcccaaaaggatgatatgaggtcaatatttgataaaaaaacctcaagatggcgctcctttgattatatctgcggatttatttacaaggcatccgaatatctgcgcacagcagagagatcatcagcaggattggtttctacaaactcagttagccagggcatgcaagtggctgagttctggccgttggcgttagagaaggtcgcattgcgctttgctgttctatccttcaaatgggcaaacttagcagcgaataatgcaggggtaacttgcgtaattattggtttaagtccagctgccagaaaaggtgttgccaagctgattgatggtgaagtatcgcgtgaagttgaagatatatcgccttatctcacagttgggaaaactatctatgtcgctggccggcaaaagccgatatcaaaaatctccgaaatgatgctcggtaactttgcgaaagatggtggtaatctgcttctttcaaagcgtgaaattgaaagtctagatcctatagcgaccgagtttataaggccaatattcggggcaagagagttcatacaaagcatccagcgctactgtctatggattgaagatgatcaagccgaaaatgcctcccaaagtgcattcgttcgagagagaatgttgagggtcgctcgggagcgagagtcaagctcgaaaaaggaaacgcaaaaatggagcaaatatccgcaccgctttgtcgaaattcgatcccctctctatgaggaagcaataatagttccacgtgtcagttcagagaatcgcgagtacctcccagtaggcctgctgccaaaaaaatcagtagtcaccgaagcatttgcactatatgacgcgccgatgtggaatctatccattattgcgtctcgcatgcatttggtttggattggaacggtttgcgggaagatgaagaccgacttccgctattcaaatactcttggctggaatacattcccaatacccgagctgaccgaaaagaataaatctgatctcattcgttgtgccgaagacatacttttggcgcgcgaggcccacttcccagccaccattgcagatctctacaatccagagaccatgccggataatttgcgtgcggcacacgagcgcaacgacgaagtgctggaacgcatctacattggtcgtcgtttcaagaacgacaccgaacgtcttgaaaagctgttcgagctgtataccgaaatgacggccagccagaagctacggaaggccaagtaa

SEQ ID NO: 346092 - DNA, 1437 bp, Pseudomonas aeruginosa
ttgaacattaatcacatagcctggggagatgatagtgcagagaaagatgcatatctactcgactactttgtgagctccgactcatttcgacgtttagctgagcgcctaaaaaatatagttataggacgcaaaggatcagggaaaagcgccctactcaaaaaacttgaacaagtttttcaagatgagagcgaaacatacgtaatcaaggtttcaccaaattaccactcaataaaagcagtccttaacgacaaggacctatccgaaaatggatttggcatagaaatatttttccagcacacatggcttaggcaaatttacttagacattctgtgtttcataggacacaaaggaaaaggaagattctcacaaggcagcttggagtttgcccgaaagattgcagagcagcagaaccgcacatccaaggatctggtcgaaaatatcgccgacatcctcggtagaataaaagtcaaagcaggagaacttggcgaatttggtttgcagctggaaaaagaacttagaaacgtctccgaggttgatgctctggagcatcatacactaacactttgcaacgcgggggcaaagtttgtcatcctgatcgacgatctagacttggggtgggacaattcagaaactgcaaacaatatgctgctaggactattatcagcagccaactacctcagcagtcaaagcaacaatatccatccggtaatatttctccgagaagatgtctattccatacttatgggaaagacacaacactccgacaaatacaggaatatagaaaggctgcgctggaacaaagaggaccttgtcgaaattttaaaggcaaggataaactttaaccgtacacgggatggactagagcctattaccgatgcttttcacagtgtattcccacaaacaataggaacagccaatactgataactggctcgttgatagaactttatccagacccagggagctaatacagctagcaagatattataccgagtcggtaaatggtgagcagccttcggtccaagcactaaaggactccgagtcggactattcaaactggaagcttgatgatctttgcgccgaatactctaaccaataccctggactggtatctgtattttcttactggaaaaccaagtttttccgacaaaaatatcacctcaagaaatcagaagttgaagacttactgctaaatattcttgccgaggtaaccataaatgaagattggtttaatagcctgacagacaacactgacatagatagcttgctaaaaatcctctatgaaattggattcctcggggattttgttctcggaggtcaaggtggaagcaaaacctattacgcctatgaaggacggcacgagcctttatttgaagaggtccagattcatccatgcttcaggagagccgtaaatactgttgaaagaataagggtgtag

SEQ ID NO: 346093 - DNA, 876 bp, Pseudomonas aeruginosa
atgtccaaagaagctatctggagtgactgcagatcgtgcaaaagaaatacgaaacacaacaccttagggaaaatcagtcggggaaccgatcccgatatatatcacgacgagacaaagtattttattttagaatgcaatggttgtgaaacagtttcattccgcaaagaatatcatgactatgagtcgtactacccagttggtcacgaagagtacgagcatgatataactgttgagaccttccctcactacataaaaaaccacaacccaattgaatccctgacagacatcccaataattgtaaaaggaatctatcaggagtctcttctagcaatacaggaaggcgcattcactctggcaggactcggattaagagcaaccattgaggctatttgcaatgacaaggatgtcactggaaaaaacctacaaacaagaataaatacaatgaaccgttcgggtatgatttcgaagtctgatgcagagcgcctgcacgccattagattcatggggaacgatgctgctcatgaaataaaaaaggcaaagaaacagtcagttctaatagcccttaaaatcatcgagcacatattgctatctgtgtacgtatttgaagaggaagtcactcagcacctagagaagcctatctcaactctagatgatgccctcccaatacttatcactaacctaaaaaaaatcacagctcatagcaattttactttcactaaatggctgggagcatctcgaagaagagtgctggagaaaatagaagatcttgaagcagagctaaaggaaaaaattgagagcggcgattttgaaggcgtagagctaatagacaccccggaagcagaggaagcacattctcagtggtataaaaaactgtag

SEQ ID NO: 346094 - DNA, 270 bp, Pseudomonas aeruginosa
atggacctggccggaaccatcaccggcagcgtttgcctggccgacagcggctacgctgacctcgtgcgagagaatcctccaggtgccggttgcgccctggtcggcatgggtgtccacctgcgcggttcgctgtatctcgacgttcgcgccctggttcagcaccaggccgccattgcctccgccgatggcgctggcgtcctgcttgccggccacccgcacggtcccctgttcgccgccgtcgaggacgatgcgtccttccgcgctgcgtag

SEQ ID NO: 346095 - DNA, 2667 bp, Pseudomonas aeruginosa
atggcttccgccagacaggatttcgagcgatttgtccgatggctttaccagctagagcagcaagtatcagccgatgttcgccgcctagctaaattgtcactggaaaattttgatgcactggcagggacttctcggcagcgcaatcaacgatccacctatctagttggattgatacgccagcagttggcgcaaactctcgacgtggcacccaatgcggaggtcgaggagcttgagggagcttggccgtgggttcggctgaaacgtctaacgctggggccgttccgagggtttaggacgccggaacccttcgacttagagaaaaatgtcattctcttctacggcccgaatggaagcggaaaaacgagtttgtgtgaagctctggaatatgccctgctaggagacgtagaggaggcagggagtaaacgtatagcggcgcgcacttatctcatgaacgtccatgcccggcgctttgaggagccggtgctcagagcaatcgaccgacaagcccgcgaaattgatgttgctgcacaccctgacacctaccgcttctgttttatcgagaagaaccggattgatgcattttctcgtatcgctgcacgcccaaatgcccagcgggccgagctgatcgccacgcttttcggcatggatcaattcagtgactttgtgagtcatttcaatgagagcatcgatggccaacttgttctgaccgcagagaagcgcggtattctggcaacacggcgtgcagcactgaaggtcgatcaagagacagtccaaagcgaagccgctacgttgcagaaactcgacaatgaagaagccgagctggcacaagcgtatgcacccgacatggcatatgctgatctcaagcacttgatcggaagtgctgaagcccccggtcgccttcaagaacttgatgccatcttggagtcagttccggcagcgaacataggcgtcaccaggcagagccttcaggctgcttttgaaaaagcccacgggattcagaacgagctggtcgagattatcgcaactctccgcgctcagagtgatgaagtatccttcaaaggtctatacgacgcggtagtcgcacttcagaagacaataggcgatcgttgcccagcttgcgatacaccattgaatggcccagtacatgtcgcaaccaatccgtatgacaaggctgctgctggcttaaagcaactcgaagcgttaggacagttgcaggaaaaacagcaatctacgcagacagatgtggcacgcgcctctcgcgaacttcggcaagtatttggattgctactgaccttcatcactgcccaacaagaaggagaaacgcccctcggcatgtatctttctaggctacccgaggaacccgacggcgcatggtgggcgaacatctacccagaggcaggtgcggatcaagcggatactccattactcgaacagttgctcgaagtggccgaccgcatagcagctcaggacattgcctccgaacgtacacggcaagaacgtcaaccccatgttgctgaacgaaagaggctcgctgaatttcaactcaaggtgcaggcacaggatctaaaacggcagcagctacgggagaatgtcaccgcagcaaatggcagaatcaatgatttcgatatagcaaatgctgaactaattgcccaggttgagcaggagcaacgagacatcgaacgtgacaccccattcaaggctgcctatgatcggttcttggaatcactgagatcgtaccgaaaccaactccccggccagctcatggcaggactcaatgagaccgccatgaacctctataactcgtttaaccgaaacgatctagacgccgataaactcgccgctctttatctgcccttgacgggggatgacaaaatcgagattgcctttcggggtaatccagctagacgtgtggacgcactccacgtgcttagtgaagggcatatccgctgtcttgggttggcgatcctgttggctaaagccaagagtattcaatgcccggtaatcgtctttgatgatgccatcaacgctattgaccatgaccatcgtggcggaatcagggaaacgatttttgagagtgatcattttccacagactcaacttattgtgacttgtcacagcaacgaatttattaaagacatacagcagcatttgcctgctcagcggcgcaacgactgccaagtgtatctgctccgacatcatgatggagactatcaacctcgcgtaacaggtaatgtccccagtgcaaactatattgccaaagccagagcggcaagagatgtgctgaatgaccgtgatgccttagcgtcatcgcgccaagcgttggagatgttgtccgaaaaggtctggcgctggttaggcagtcacgatcaaggagccctgaatttgatactcgcaggggtcaatgcagagccagcactgcgaaatctttgcgaagcattggcaaagaaactcagagatgcacagacgtttaatcatgcaaataaagagcctattctcgcagcttatggtcgcattcttggtattccgacaaccaatctggtatggacgtacctaaataaaggcacacacgaagaagctgatcgcgatgactttgacggagagctggtggagtccgttgttattacccttgaagaattagaccggcttgatcttagacctggccgatag

SEQ ID NO: 346096 - DNA, 1140 bp, Pseudomonas aeruginosa
atgacgaatacaagtagcatcccgcaggaaagcggaaacacctccctccatgtggccgttgtcggtggtggcctggccgggcttcaagccgcacgcttgctgcacaaggccggcgtggatttcaccttgatcgaggcacgcaaccgtctgggcgggcgcatcttcaccgtggacggcaaagggatgccttccgaggatggtttcgatctcggcccgtcctggttctggccgaagatgcagccggccatcggcaaactggtcgcggaattggaccttgccacctttgtccagcatagcgatggtgacgtggtattcgagcgcatgtcgcgcgaagaaccgcaacgctatcgtggattcccgcaggagccgatgtcgatgcgcctggcgggcggcaccgctgcgctggtgcaggcactcgtgcgcgatttgccgagcgactgcatgcgattgggctcccgcgtcaaggccatgacgctgcttggcgacggcgtggaactggtgctcgcacagaccgatggacgcacgaccacgcttgccgccacgcacgtcatcgccgcattgccgccgcgcctgctcgacgccacagtggtcttcagccccgcccaggaagcgtccgtggcacaccgctggcgcgacaccccgacctggatggcgccccacgccaagttcttcgcgctctacgaccgccccttctggcgcgaggctgggctatccggcacggcgcagagcatggtcgggccgatggtcgaaatgcacgatgcgaccacggcatcggggcaggcggccttgttcgggttcctcggcgtgaacgccatgcagcgcgaggcgctgggtgaggaaagtttgacccgtgcatgcctggaccagttcgcccgcttgttcggtgatgcagcgcgcatgcccgtggcgacgcttatcaaggactgggctgccgacccgctgacctcaaccccggtggatcagactgcctcgggccacgttgtgccgaattcgatcccttggattcaggggccatggcagtcgcgcctgattctggcagggagtgaaaccagtcccgaggaatccggctatcttgccggtgccatcatggccgccaaccgggcagccacagacatcatcggtaggtgcaaatcggactag

SEQ ID NO: 346097 - DNA, 720 bp, Pseudomonas aeruginosa
atgcggttgaacgatgacatcggaattcgcaccctcgtccacgcaggtgcgcaggactgggtgtccagcccgacccagggcgtcgaacgccggctgctgttccgcatcggcaaggagaaggcgcgcgccacctcgatcgtgcgctatgcgcctggcagtcggttcccgcatcacgcgcatcccggcggcgaggaaatcctcgtgctggaaggcgtcttccaggacgaaaccggcgatttcccgcctggcagctatgtgcgcaacccgcccggtaccggccacgcgcccggcagcgaggccggatgcaccatcttcgtcaagctatggcagttccgcagggacgacgacgctcgcatcgtccagcgacccggcgagggcgaagcggcggcgctgcgtccgggcgtttcgacctcgcggctgttgttcggaggcacgggcgaacgggtgatgctggaaacgtggaaggcaggcgcgcgggtcacgctgccgaatccggagggattggaactgctggtgctggccggtgatgtcatgtccggaaccgaccgcctgggacgctggagctggctgcgattgccgcccggtgaatccttggccgcacacgtcgggccggagggcgcgcgggtctggttcaagtccgcgccgctgctgcatgaggatgtctgcacttttgaagatgaaggctcgaccgacagggtgaatgatgatgggcgcagatga

SEQ ID NO: 346098 - DNA, 744 bp, Pseudomonas aeruginosa
atgcttcacggtaaaacggccctgatcacgggcggcacaagcggcatcggtttggccacggctcgggcgctgcacgaccagggagcgcgggtggccatcctgggccgctcccaggacaagctcgatcaagcggcagctgcattgggcggcgacgtgctggcccttcgcggcgatgtggcctcactcgacgatctggcgcgcatgcgcgccgagttggaacgcacgttcggcacgctcgacatcctcttcgccaacgcaggggtcgccttcggcacgccgattgcctccaccgatgaagcggcctatgcgcggatgatggacgtcaacgtgaaaggcgtcttcttcaccgtgcaggctgtcctgccgctgatgcgcgaaggcagctccatcgtgctcaacacgtcctggctcaatcaggtcggcgcgcccggccgttccctcctttcggcttccaaggctgcggtacgttcattcgcgcgcaccctgtcggccgaactgctggaccggaagatccgggtcaatgcggtcagcccaggctcgatcgagacccctatccatcgcagctcgggacagagcgacgaggacttccgcgcctatgcggagaaggtcggcgcgcaggtgccgctggggcgcatgggcacgccggaggaaatcgccgcggccgtgctgttcctcgccagcgatgcgtccagctacatgctcggtgccgagatcgtggtcgatggcggccgggcggagttgtag

SEQ ID NO: 346099 - DNA, 912 bp, Pseudomonas aeruginosa
atgagatcgttgacccgcctgaaatcgctgcaagccttggaagctgcggcccgccacggcagttttgtcggtgccgcctccgaactggacgtgacgcccgctgccgtgggacaacttgtgcgttcgctggaagcttgggtcggccatccactgttgcaacggacacgttccggtgctgagcgactgacgccggtggacgaagtgcgggaagcccttgaagacatcgcccaagggctggattgtctcgaatcgggcttgaagaagttacgagggcgccaagcccgttcggtagtggtggtcacggcctcgcaggcgctggtcgccaactggctgttgtcgcgacttgacgattttgccgcgaactatccgggcatcgacgtgcgcctggacgtgtcggatcgcgtcatcgacctggcccagggcgaggccgacattggcgtgcgctgtggccttggtgcctggaaaggtgtgaaagccacccccctgatgggcgaggaaatcatcgccgtctgccatcaccggctgctgtccgagacaacgccggtcacggcggactggattgccgcgcagaccttgatccatgacggcacgccgcatcccggcggcgagttcccgacgtggggcgaatggcttgctcgtgccggagtgaacagcgcctccaccgatcgaggtctcaagatcaactcgactgccgccgtcatccaggccgcgatcaccgcgcgtggtgtggcgctggcacgcaaggcgctcgtcgcgcaggaaattgaaagtgggcgactcgtgcatctgctgtccgatttgcgttggcccgtgaagtgggcctattacgcagtcgcctcgcccaagaccttgaggcgatacgaagtcagtgccttccatgactggctggttgagcaggcaaggcatggctga

SEQ ID NO: 346100 - DNA, 792 bp, Pseudomonas aeruginosa
ttggatcctttattcagatgggcgggtagcaaaaaaaagctactctctagcattaaagctagactccctaaagattaccgcacttatcatgagcctttttgcggttcggcatgtctgttctttgacgttctgccacgtaaagctgtgctgtccgatatgaatacggatctcatgcaagcctattcagagatcaagaattctccaaagagtgtttttgaatgcttgaagcgcatggagatatcagagtccgagtattataaggtcagaggccttgatacgaagcagctttcaccctccgaaagggcggcaaggtttatttacttaaacaagctttgttttaatggtgtttaccgaacgaacaagaatggacagtttaatgttcctatggggacaaaaaccggcaagctccctgatcttgcaacgttatctgaatactccaaagctctcaaggatgtcgacctaaggtcaagcgactttgaagatatgctagtcaacgttcgaaagtatgacttggtttatttagatccaccttactccaagccaggcacacgtaagcgtggcgagtatggtcccaactctttcaattataccgatattgacaggctcgtcgagatcttgaggaaaatcgacaagaaaaacgcattctttatactctcgtatagtgactgtgaagttattagggatgcgttaactgatgactggaatattcaaagtgtgagcgtgcgtcggcacgtggcaggttttagcgcacacagaagagttgtcgaagaaatcatagtaagcaatttctag

SEQ ID NO: 346101 - DNA, 1248 bp, Pseudomonas aeruginosa
atggaaagtgcagaacttaagatcaaagttgccattatcagtgatctgcatgtcggtgggggagccaaaggtagagatttttctttagatgactctccagctgcagcggttgacaactatcttgggcagttcgaaaaatttgtatctgctggtgatattaaggccgactaccttttgatacctggtgatatcagcaacagcgcagaccaggcagagtttaagcttgcttctgatttgattcaaaaaattgcactagctttgggcgttgataagagaaagatcttgttttgcccagggaatcatgacgtagactggaaagcatgcagtgcacttgcctctcttagcccgtcacaagccgccataattaaagcaaagtattttagtctgcatacagataggcttctgtttaatgacaatctttcctttgctaacggtcgctttgatgaagatccgtacctcgttacatgggattttgaggatgtactagtttgctcgttaaatacagcggtctttgattctccagataaaaagccacatcatggagaagtaaagccagagcaattagataaaatcaactccatcctacaagcccttccaagctctggaaagcttaagatattcattcttcatcatcacccgaggaactatttagaccgaacttttagtactcctgattttagtgcgatgacgaatgccgaagggcttactgatatgttatctcgccatgccttcgattttgttattcacggacacaagcatattccacgctttacaatgtctatcccaactccggggcatccgctttggatactgtgtgctggtagttttagtgcaagtctcgataatcgatactttgaggcgattgggaataattttcatctggttgagtttcacagtcgttgtagtaataagtacgcaagaggggtggtaaattcttggacacattattcgggggcgggctggacgcccagcagggctaaaggttcgcttgattcccagaatttttttggcgcatacgcgccaaataatctgttaagaaacgagcttaaatcggcattagccccgaagttagaggtgtgtgaatatattgagtggcgagaatttattggggatcaggaagcatttagatattattcaaacgagatgcttagggatgcacttaagtttatacaggaggagctcggtgtgatactgcatgagatcgatgatgtaaatttagggcagcttgtcattttgaagaggcgctga

SEQ ID NO: 346102 - DNA, 1776 bp, Pseudomonas aeruginosa
atgacttctctaggttaccccaaaaattcaaacccttttgagaatgataacgcccgaaatagcacggcggaagatttgccccgacagtttgtctggaccaaatcttttgagagacttatttctcccaagaaccatattattcttggggctagagggtcgggcaaaacagcaattgtgaaaatgctgtctcatgagtatctagcaaggctcaagcatcctaaagcagtaagtctcattaggagtaggaaattcattgggatctatgtccctatgcgcctttcgtgggtgggcgggctaaagaacaaaaagtggctatctgagtcagagcaagaaaatcactttcaatggcgcctaaatatatcttgctgtgcatcctatctggctacattgagaagctgtattgactgttactcctcaaatcctggcgagcgagcacttacggagagggaggtcgctagagagattggtctctcatggtttgaaaaagatgaaatttatactattagagagttacgctctgagcttgcagacttagaatataggaagcttttagaagagcagcgggcaagaattagcgagcttactgtcacgccaggaataggttattccttcgagcttgggctttttgaaccgctaaagcgcgcgattgatgtgactaagaggcacatagattttccctctgatgcagcatgggctgtgtgtctagatgaagcagagtacttaagtaaattccatcatgttattctaaattcgcatctcagaacctttgctgatgggctggtgtttaaaataacaacgatgccttataagcactataccttagatacgaatactagcgtgccgctcaatcgcaaagatgatttctcttatatttacctagataatcttgaaacatcaagacgagcgagcagtgagttcgagtcactaaagaaattctgcgaaagcattttcgcaaagcgcatcgcaggatctgcctggggagacagcggggtaacactagaatccttgcttggaagctcttacttgctttccaatgaagagcgaattgatcaggagggtcttctaaatcttattgataagtacgctaatgaaaatactagaagaagagcccgtgatctattcggtacaaaaaaattcgacgacgaagttggtcgaaaattaaagggcgcgttactgctccgggacttagcttcatcgcaccgaggcaatagccgcactgtcgcatactctggctacgagatggtcatacggtgtagcgacgggaatccccgtcgactgatcagtctacttaactccttttacaacgcaaatgaagatggtgtcggttttaaaccgatacccagctccactcaggatcgtattctaagattatattcttttgatgagtataagcgtatgatttctgagcccaatcaaggggagcgtatttatggcatactttcgttgataggaaagtttttccgagattcgctacataatcaaaagctctcaacagatatccggctatgcttcaagtttaatcttaaggacaaagacgcatggagtgtaattgaggaggctattggattaggtctagttagacctatagtcgaacgctctgattatgaaacgctcccgtacatgagcggtgttttcaggctgtcttatattctttcccctcactttgatcttctccccagaaggggaaaagatgttgctctcagcacaattctttcttttgggatagagcgaggcgttgaacgtggggtcggtgcgtatcaaatggagctaatctga

SEQ ID NO: 346103 - DNA, 969 bp, Pseudomonas aeruginosa
atggtaggccatttcaagatcagtgacattactttcgatgaggtagctgagactcagtatgatctagctatttttgcctgcggctatgaagaaagatcaatatacttcccagggcttttagatcccaaaaccttcaaaaagtctattgtttttggatttgcttccagcttatctgatgatgcttatgtccttaatcaggaattttataaatcaaagcttaaggtcattccaacgcctgttgatcaatatgatcttgggaagatattttcgatactttctgaagagtttaaagatataccggcgggtggcgacagtaagtttagaatgctggtggactactcgtcaatgccgcgtctttggtattctgagatattgaactttattaaaatatatgagcttgatattccggttcttttagacttcgtttactcggttggtgagcattctgcttcaaagtatgagaagcaactaagcgatcctgtggttttgcctgggtgcgaagcgatctctgcatataacagagaaacgatagggatattcagtctgggctttagcgatggagggcctatttgccttcaccggaaaatagagccagacagatcgttttctttggttgctcgtcctggagcacttgaagactacacagaaaagactcttaatataaataagtttttcctggataatgtttctcagggtacggtgttttcaccattaaacagcgtccagcaatgttacgaaactattagggagatcttttatccatttaaagagagcgctataactgtaatagttccgttcgggcctaagcctcacgcgctagcatctattattgcgtcaatgaatttccctgaggtcacctgcctatactcgagcttaggtagcaccggcagtcaggttaagccgacaaccgaactggttctgagtcgaattgagaaggaaacgaccgagccattagctgatccttactag

SEQ ID NO: 346104 - DNA, 309 bp, Pseudomonas aeruginosa
atgctgagcaacaaccctccactatctatcgccaccaacgtgctggcctacgacacgatcaaggctgttcggcactctccggccttccatgcgcgagcctggcggattcttgatcgctgggcgctcaacaatccgacgcaggttcgtcagatggaggcgcagggcgagatcatcctgctggaaaggctgcttattcaacaggaactagagcatcaggctctgtgttcagaggaagggctaaatcagcagcgtcatggcctcacagagcacgagattctgacgctacacggggtttcaagctgcctctga

SEQ ID NO: 346105 - DNA, 324 bp, Pseudomonas aeruginosa
atgaaggtagcttttgcttttgtaccgccgggtggcggtgagactgactacgggttggagtttgagatggaggcactcccgcaaaagggtgactacatttcgatccttcgtgatggtgaaaaggggatggaggactttgtcgtcaggcgcattcactggggctttgaagtgaacgcggaaggaaaggatggacgcgttactaccatttgcgttgaatgcgaattcgccgagggcagcttctcttctgagagccataggaaggcggtggagaggtacgagcataggacaggcaagcgacttacctttgacgtttcggtctattaa

SEQ ID NO: 346106 - DNA, 252 bp, Pseudomonas aeruginosa
atgactggcctgatcgaggatgacgatacgatcatgatcgacgtgagccgcaacgtactatccggggaaggggtatatgtaatcctgcttgatgatcacctgtacgcgaagcgcctgcagcggcagttcgacgggtccgtccatatcatcagccataacaaggaatatcaggtcatggccgtgcccaaagacaggctggccgaactacaaatcgtcggtcgtgccgtttgggcgggcggctggttaatctga

SEQ ID NO: 346107 - DNA, 1752 bp, Pseudomonas aeruginosa
atgaccgcgcgcctcgccctcatccgcgaagtcgagcgcctagcccaagtcgtcagccagaaacaggccgtcctcaccctgatcagctcagcccgtgacggccagctcagcccctacctcacccaacagttggcgcgcgccaacgaccgcaagaccggcgaccgcaccctctccgagcgcacgctcatgcgctggctggccgacttccgcaaacacggcgaagccggcctggcaccggcgcgcccgcaggcggacatgggcgtcccggcctgggcgccggccttcctgcgctgctatcagcgcccaaccaagcccagtgtcgaagcggcctatgccgagtacgccaccaagactcctggcgaccgaccgagcattcaccaggtgcgccgcttcctgaacaaactcagccccgaggcccgcgagcgtggacggcgcagcccgcaggaactgaaggccctgcaacccttcaaacgccgcacgaccatgagcctgtcgccctgcgacgtcttcaccgccgacggccacaagttcgacgccgaggtcatcaacccacgcaccggcaaaccctaccgccccgagaccactaccgtcatcgacgtcgcaacccggcgcatcctcggcatctccattagcgaagccgagtcaaccattggcgtgatggacgccctgcgcgatgccgtcagccggggcggcatgttcgctatcttctacgtcgacaacggcagcggcttcgccaacgacaccgtgcgcgaagtcgtcgaccgcctcggcggcaccatgacccacgcactgccctacaacagccaggcgcgtggcctcatcgagcgcgcccaccagaccatctgggtcaacgccgccaagaagctgaccagctacatcggcaccgacatggacaaacatgccggtaccaaggtccaccgcatcagccgccagcaactacgcgacaccggcacgactcgcctgatcccgaccttcgccgaattcatggccggcgtcgaattcgagatcgagcaatacaacaaccgcccccaccgaggcctgggcaaggtccgcgaccccgacaccggaagggtccgccacatgagccccgcagaggcctgggatgccgctatggccaacgggtgggaacctatgctggcaccggccgaggtggtccacgacctgatgcgcccgcaagtcatccgccctaccgtacgcggcgaaatcacgtgggccggccagcgctacttcctcgacagcctgcgcaacctgcacggcgaggaagtacgggtcgcctacgacgtgcgtgacgcctcccgtgtttgggtccgcactcttgacggcgagctgctcggcgaggcccagctcgacggcaacaccagcgactacatgcccaagaccatgatcgagcaggctgtcgaacgccgcgagcgcggccaattcaagcgcgccgtagacaaactggaaaccctgaccggccagcgcgtcgagctgctcccaccaaccagcgcacctagcgccaccgtcagccccgaacagcttgccgccgcccaggccaacgttgcccgcctgaccaccgagcgcaaacccgccctgcaactgcccgacgaccccctcggccgctaccgctgctggctggcactggacgcccgcatgcaggaaggcgagcccctgaacgacgacgaatcccgctggcatgccagctatcccaagcacagcgattttgcggccacccgacgcgtcctggactacgcccagcaacgtcaggcctaa

SEQ ID NO: 346108 - DNA, 711 bp, Pseudomonas aeruginosa
atgaatatcgcccccctgaccaacgtcgtactgctcagcagcgccgtagagcgtgcgatgaaccgcccggcggacctgcccggcctggtcgtccagtacggccccagcggctacggcaaatcccgcgcggcggcattcgtcgccaacgtccaccgttcctactatgtggaatgccgcgacacgtggacccgcaaggccttcctgcaggccatcctgctcgacatgggcatccgcccagccacgaccctgagccagatggtcgaccagatcgccgagcagctatcccgcagcagccgccccctgatcgtcgacgacgtgcagtacctgctcgacaagtccgccgccaacgtcctgaccgacctctacaacgccagccagggcaccctgatcctgatcggtgaagaacgggtaccggggtccatggccaagctggagcggctgcacaaccgagtcctggaatgggttcccgcgcagtcggccagcctcgacgacatccgcaccctggcgcagcagagctacccccacctcagcatcagcgacgaactcctgaccgacctgcaacgtgcagtcaacggctgcctgcgccgcgtcgcggtcaacctgcaccaggtcaacagcgaagccgccgcctgcggctggtccagcgtcaccccggccgaatggaagcgtgcctggcacaccggcgaagcgccggtacggcggagggcgtaa

SEQ ID NO: 346109 - DNA, 729 bp, Pseudomonas aeruginosa
atggcccgcaaacccgcccacctgcaaatgaccggtacgcgcacgccccgccagaccatatgggaatcgctgcgtcacctgcaccaggctggcgagaccgtcagcacctacgccatcgcccggcatagccagcaggatgatgagaccgtgcgcagctacctgctggccctggcccgcgccgagatcgtgcgcaaggtccgtaacctgccgcagcgcaacgccgagtgggagctgctcgacgaccgaggcgccgaggccccggcgatcaccaagaacggcacccccggcaccctggggcgtggctgcgagaacatctggcgcgccctgcgcatcctcggcgaggtgagcgccgaagaggccgctgccagcgcctcggccggtggggtaaccatcagcgccgaaggtgcccgagtgtacctccagggcctgaacctggccggctacgtcacccgtaacggcggcactgccagcaaccccgcgcgttatcgcctgatcccctcgcgcaacaccggtccccggcaccccgtctaccagcgcagcaactatgcgcaggtctacgacccgaacctgggcgaaatcgtctggagcaagggccagcagagcggcgagccggatggcctgcggcttgaagtcgcccacctgcgccacctgttaagccgcctgacccccttcgcaggccccacaactcccgccgaactgctggcggaagtccgggaggtaatccagtga

SEQ ID NO: 346110 - DNA, 378 bp, Pseudomonas aeruginosa
gtgaacaccgtggacctgaccgcctggggcaccgagccgccgctgtgggtgcgcctactcgccgccgaagtcgcacagagcaaccgcaccctggccggcgagcgcatcggcatgagccgatccgccgtcaccctggccctgggcaaccgctacccctcgcgctccaccgccggcatcgagcgccgcgtgatggaagccctgggccgcatcgactgcctggccctgggcgagcccatcgacaccgagcaatgtcgaggctaccgcgagcagaaagcccccacgcacaacccgcaggccatgcgccattggaaggcctgccagcactgcccacacaacccgaactgcgcaagtaaggagtcaccccatggccatcactga

SEQ ID NO: 346111 - DNA, 309 bp, Pseudomonas aeruginosa
atggccatcactgaaccgcgccccctcaaggtgctgacatccgccctggcagtccacctcagcagattcaacggtgccgcccgcgaacttcaggccctgggcgtgcgcctgctgcaaatccagccgacggaaaattgcctggtgatccagcccgaagatggccgccgcctgcaggcgcagcgcatgaccgaaggcttccagcgccacccctcggccggcagcacccgctacaccgtgcagttccggggggtgaccctcgaatggcgcgaacccatcagctaccacgacttcgcaaccagcattcactga

SEQ ID NO: 346112 - DNA, 618 bp, Pseudomonas aeruginosa
atgaacgcaaacgccatccccgcaggctacaggcaagacgcccagggccgcctggtccacgaaagcctgattaagcccatcgaccaggcccgcgacaagctggtgcttgagctggtggaaaaagccaagcacgtccaccaggtactggccgacttcaaagagcgtgccttcggtgacgtcgccgcattcgtcgatatgtccgtcgaagagtacggcgtcaaacgccgtggccggaaaggcaacgtcagcctgctgtcgttcgacggccgctacatgatcaagaaggcggtccaggagagcattgccttcgacgagcgcctgcaggctgcccgtgacctgattaacgagtgcctgagcgattggatcgagggcgcccggcccgagattgtcaccctggtcaacgatgccttccgcaccgacaccaagggcgaaatcagaacggctcgggtcctggcactgcgccgcctggagatcaacgatgagcgctggcagcgagcgatgcaggccattggcgaagcctgccaggtcgtcggctccaaggactacatccgcgtctatgaacgagacggcgacagcgaccagtaccgggctatcagcctcgatatcgcgggggtgtga

SEQ ID NO: 346113 - DNA, 450 bp, Pseudomonas aeruginosa
atggcgaatctgagctaccacgaccccagcaccgacccacttccgctgcactcaccgagccatgaggccgagcgtgcgcgcctggaggccgccacggccgaattcctggccagcggcgggcaagtagaccaggtcgggtttcagatgaaggaaggcccccaggccttcgtcatcgacccgaagaagaccccggtctatgcccacctgttcgcgccccctccggtcgagctgaaggccaagcccgccaggcagcttgccgctgcccgcattacacacgacctcaagggggccgagcccccgtcggccgaagtcgtcctggccgccaaggtgctggtccaggccagcctgcgcaacaccccgctcggcaccgccgtggtgctgggtctgaccgagaaacaggtgcggcagatcacccgcgactattgcatcaccttcaaccgccaacgctag

SEQ ID NO: 346114 - DNA, 249 bp, Pseudomonas aeruginosa
atggccgagtacaccctcaccatcaaagacgaagacggcggcatcagcatcctgctggccggcaaaggacaggcgaacaccgcagcggcgctcgcggccaacgccctcctgggcctggcgccacgcctcgtccaggatgccgtccgcgcggcagcccagcacagcaactgtccttgccccaactgcgcagccaggcgcgcagcacaggacgaccagaaccaaaccgattccaaacccaccctgcactga

SEQ ID NO: 346115 - DNA, 297 bp, Pseudomonas aeruginosa
atgagcatgaccaagcaagccctgatcgacagcatccacgacgacctgcaggccaccggcaccccggtcagcaagcaccaggtcaacgcagtcctggaacgcctcggcagcatcgcaaccgcccagctgaagaacggtggcgacgtgccgctgcccggcctcggcaaactcaaggccggacagcgcgcggcccgcaccgggcgcaatcccgctaccggagcagccatcgacatcccggccaagaccatcgtcaagctggccaccagcaaagccctggaggacaccctcaacacctaa

SEQ ID NO: 346116 - DNA, 402 bp, Pseudomonas aeruginosa
atgagcacaggcaagaccaaaatccagatcgcccgccgccagctcggcctggacgaccacacctaccgcgccatactccagcgctcagccggcgtcgagtcctcgaaagacctgaccccgcgccagatcggccgcgtcctggccgagttcgagcgcctgggctggcagccaaccccagctaaaaaggccggccgcagcccgaaaccgcgtaccgacctggagcgcctggtgggcaagatcaacgcgcagctgaccgaggcctgccgcccggtcgcctatgccgatgccatggccctgcgcatgtaccaggtccagcgcctggagtggtgcagtgccgagcagctacgcggcatcgtcgccgccctggcctgcgacgccaagcgccacgggaggccacagtga

SEQ ID NO: 346117 - DNA, 438 bp, Pseudomonas aeruginosa
gtgaccgacctcgacctcttcggcgacggcacccccgacagcctcgcccccgagcaggtgctcgccaacatgcccgacctgtcgagcgcgaaatgggaaggcaccctggccgaaatgctcggcatcgtcgaacacaccctgcgcgagggctccagcggcgacgaccctgccgagcaggcacggcggatcgtctacggcatcagcagcaccatgggcgggcgcatgttctacctgccgcgcggggaccagctcaagcgcagcctgcgcgacagcgcgctgtacaacgagtgggtcaacggaaaaggaacaatccccgatctagccagaaagtaccgacttgtgcagccaacggtttacgagatcatcaaacgccagcgggaactgcatcgacgcagtgagcccgacttgttcggctatggcgaggtcaaggactcatga

SEQ ID NO: 346118 - DNA, 525 bp, Pseudomonas aeruginosa
atgatcggaagggggatgattgcagcatccatgcttttcgcgggcattctgatggctgacgatggacctaacgccatcagcaacgaagatgcgaaaagggaagcctatgccaatcggctgttggctacgcagttgaggcaggacagtgaggaagcttgctacaagcgggacataccggccctctacaggattatgtccaggatcggcaaagagctgagcgcgcagccaacgaaccacctgaagtatcgtgcccgcttcaagttcagtggctgcagctctttgctgggggacgtgtccggcatcaacggcgactgcgtgacgggtctacccggccggcacagtatcgaacacttcgagaagcgctgggcggaagacactgcgcagtgtgatagggaactcagcgaccctaactggaatcacgacgagcctgagcccaagaccgaagaagaactggccgcaaagctccgacgtgaaggcacgtccgaggaggacatcggcttcatcatgaagctacgaaatctctaa

SEQ ID NO: 346119 - DNA, 534 bp, Pseudomonas aeruginosa
gtgagcctcagaacccgtattgccgccggtagcctgctcctggccagcggcagcctcctggcgtttctcggcacctgggagggccaggggcagaacaccgtctatgccgacaagctcgcccgaggcctgcccaccgtctgcaagggcatcacccgctacaccagcccttacccagtgatcgtcggcgactattggtccgatgcgcgctgcgccgaggtcgagcgcctggtcgtggagaaaggccagttgaggttggccgactgcatcaccaaccagaccgtgagccagaacaccttcgacgccctcagcagccacgcccacaacgtcggcgtcgccaacacctgcgccagccgcgccgttggcctgatcaacgccggccggattgccgacggctgcaaggcgctggcctgggcgccggacggcaaaacacccgtctgggcctacgtcaccgacgccaacggccgcaaacagttcgtgcgcggcctccatgcccgccgcctcgacgagaggaagctgtgtgagaccgccctgtga

SEQ ID NO: 346120 - DNA, 624 bp, Pseudomonas aeruginosa
gtgagcgccttcaaatccctatggttcaaggtgagccttggtctcggcctggctttgcttgcgctctggtgcctgctttctgcactgcacgacgcccataacatcggctacgggaagggcgcagccgagggcaaggcggccctcgagtctctccgggccgagcacgccgaagcggccgctgctgccgcccgcacatccgaagcagatgccaaagccgccgccaaacgcctcgcggccgagcaagcccgcctcgacgaactggccggcaaactcgccgcccagcaacgcgagcaccgccaagcaaccgaccgactcattggggagataacccgtgtcaacgacctctaccgcaagaccctggacgccgagcccgaggcgcttcctgcttgcgtgttcactcgcggctttgtccgcctgtgggaccacgccaccggagcactgcccacggccgcagattccggcggagctgctgcgcaaggcgcccaagccctcgcccttgagcagctcgatgcaggcatcagccgcgcccagctcctggaacaccacatccgctacgccgagcagtgccgcaacaccgccgcgcagctcgacgccctgatcgacgccgtacaggtagaccaatga

SEQ ID NO: 346121 - DNA, 321 bp, Pseudomonas aeruginosa
atgatgcaaatggacttcactcaagccgtcggttgggccatctccctgctgggcatattcaccaccttggttttcggcctggtgaaactgctactggcccagttcgagaaacgcctcgacgcccggtttgctgtccaggaaaaagagatcgagcagatcgtcgagctggaacgcagcttcctgcgcttccaagccgaactccccctcaactacgtccgcagagaagactgggtacgtaaccaagcggtcatcgaatccaagctcgacggcttggccttgcgcatcgaaaacctccaactcaaaggaacccaccatgattga

SEQ ID NO: 346122 - DNA, 312 bp, Pseudomonas aeruginosa
atgattgacccagccaaagcgcgccgcgagagcctgcgctggttcgtgctgatcaccctaaacacgtcccgccccatcgatccccacgaggctgtggtgctatcgactattcagggcatctaccccgacgccaccgcccaggagctgcgccgggaactggactacctggccgaccggcagctagtcaccatccagcgccagccctccggcccctggatcgtcgggctgactcattacggcgtcgacgtggccgagtacaccgtcgaatgccaccccggcattgcccgaccggaaaagtactggagcgcctga

SEQ ID NO: 346123 - DNA, 519 bp, Pseudomonas aeruginosa
gtgccgccgcgcagcaaagtcctgcagctcccgccggaggtgaaagcctggctggaccagaccctggtcgagaccaacttctcgggctacgaactgctatcggccgagctggccgagcgcggctacagcatcggtaaatccgcgctacacagctacggccagggcttcgaagagcgcctggcggcgctgcgtatgtccagcgagcaggccaaggctgtcgtccaggccgcgccggatgacgagggtgcggtcaacgaagcgctgatgcgcctggtccaggagcacctgttcaagctgctgatgagcgagggtggaaaggtcgacctgcccaaggttgccaaagccgtggccgagatcggccgggcgagtgtagtgcagaagaagtgggccgccgaggtcgaggtacgccgagccgccctgcaagaggccgccgagcgagtaggcgccgctgcgcaggcccgaggcctcaatgccgaggaagccagcttctggcgcgaacaagtgctgaaggggatgtga

SEQ ID NO: 346124 - DNA, 1683 bp, Pseudomonas aeruginosa
atggcagctcccgcagcgcttccagacaccgagcggctggtcgattgggacgagcttccggagcgtgtccgcgcgatcccggccgacttcaaccccatggccaagggcgtactcatggcacaccaggccgaatggatcaccatgcagcaggacctggacatcgccgtgtgtgagaaagggcgtcgtaccggcattacgttcgcccaggcattgaccgacacgattaccgccgcctcggccaagagcgccgggggcgacaatgtctggtacatggccgacacccgcgaaaagggcctggagtacatcggttatgtcggcaagttcgccatgatcgtcgcacgtggccaagccaccatggtcgagcagcatatcttcgtcgaccagctcgacgacggcaccacccgcaacatccaggctttccgcgtgcgcttcgccagcggcttccgcgtcactgcgctgtcctcccggccggagaacatccacggcctgcagggcctggtcaacatcgacgaggcggcgctgcacaagaacgtctcccacgtcctggaatcggccaccgccctgctgatctggggcgggcgtatccgcgtatggtcgacccaccggggcaagaagaacgccttcaaccagctcgtccaggacgtgcgcgcaggccgctacggcaagcgcgcccaggtcgtgcgcatctcattcgacgatgcggtggccaatgggctgttcgagcgcgtctgcttcatgcgcggcacccagccgaccgaggcaggcaaacgcgaatggtacacggccattcgtgccggctacggcccgcgcaaggcggccatgcgcgaagagctggacgtgatcccacgggacggcgacggctcggccatcccctcggtatggatcgaacgtgccatgcccgaggttcgcaccgtcctgcgcctggtcttcgacgatgacttccccaagcgccccgagcatgagcgcgagacctggtgcgccacctggatcgccctcaacctgttgccggtgatcgaggacgccgctcaggacttccatggccgctgggcaatcggcatggacttcgcccgtcaccggcatttctccgtcatcaagcccgcccggatcgaccaggcgctgcgccgcgacgtgccgttcctgatcgagctggccaacgcaccgacccgtcaacaggaacagatcctgtgggcgctgctcgaccacctgaaaaactggaccttcgccggcgacgcctccggcccaggacaaaccctgatggagtacaccggcgaccgctacggccgcgccgagctggacgaagagaccaagcgctacgtcggcgggccggtgcatgaagtcaccctgtcgcggccttggtatggcgagtggatgggcaagtacctcgaactattcgaggacggcttcatcaccctgcctcgggacgcctccctggaagacgaccaccgctccgtcgagttcgtcgacggcatccccatggtgccgaagatcgagcgcaaggacctcaaggacccggagctggtgcgccacggcgacggcgcaatcgccggtgccctgatgaacttcgccgcgctcaatcacacaggtagcagcgtcttcgaatatcaccgcgtccagctcggcgccgcattcccccgcgccatccagcgcggcgccggctggcgcacccgcaaaggcatctggtaa

SEQ ID NO: 346125 - DNA, 1554 bp, Pseudomonas aeruginosa
atggcccagtcccgcatcctcgaccagttcggtcgccccatcgagtacgaccagctcgtccgcgaaatcgccaccccgcaggtcacaggcgtgcgccaggtctggcatgctccggtggccggcggcctcactccccagcgcctcgcagccatcctgcaggccgctgccgagggcgacgcgcgcgactacctgacccttgccgaggaaatggaagagcgcgacctgcactacgcctcggtcatcggtacccgcaagctcgccctggccgggctggaggttcgtatcgagtcggccagcgacgacgccgaagacgtgcgccgtgccgatgccgtgcgcgagttcatggccgccccggaagcgggcgagctgcaggccgacctcaccgacgccctgggcaaaggctacgccgtgtccgagatcatctgggaccgttccggcaagtcgtggactccggagcgcttcgaacaacgcgaccagcgcttcttccagtacgaccgggagaccgggcgcgagctgcggttgctggacgaagcggagcccatgaatgggctgcccctggccccctacaaattcatcgtccacaccccacgcatccgtgccggcatgccgatccggggcggcctggcgcgcttggccgcccccggctacatgtgcaaggcctggtcctggaaggactggatggcctttgccgacctgttcggcatcccgatgcgcgtcggccgctatggacctggtgccagccaggacgacgtcgccgtcctcatggccgccgtggccaacctcggtagcgacgccgccgccgtgatccccgacagcatgcgcatcgagttccaacaggccgtccaggtcagcggcgccgccgacttcttcgagcgtctggccgagtggtgggacaagcagatcagcaagggtgtgctgggccagaccatgagcgtcgacgacggctccagccgcgcccaggccgagatccacaacgaggtcaggctggacctgctgcaggccgatgccagggcgctgtccaatacgctcaaccgcgctctggtgcgcccgtactgcgacctcaacttcgcacccggccgtggctacccgcgcctggtcatcgtggtgccgaagccggaaaacaccgcgctcctggtcgacgctctagagaagctggtgcccttggggctggaggttgagcaatcggttatccgcgacaagctcaacctgccggagccggcggccggcgccaaactcctgcaaccggcagcgcctgccgccgaggtgcctctggaccaggcagaaaaccgcgaacagccgaccaggttggtatcggagggggatatcgtcgacaaccaggtccgcaccctggagacggctaccgccgccccgctgggcgacatgatcgacaacatctgcgagctgctggacagcgtctccagcctggaggagttccgagacaggctcatagagacctatcccgaaatgaacgccgcccagttggccgacgccatggccgatggcttggccgcggcgagtctggcgggcagatatgacgtgttgagggggctatga

SEQ ID NO: 346126 - DNA, 699 bp, Pseudomonas aeruginosa
atggctttcaatgctggtgccctcccacaaccatcaaacgagtacgttgcatgggtggatgtaatgggcatccaatccgcaatgtcgcgctcattgaaaatttcggcgaacttcgtattcaagctgcacatagccgctctttctgctccacgggaccaggtccaagtctatccagtgatggacggtttttacgcttgcgcgccgagacaagaggcgatccttgcatttctgagattcgttttttcccaggttgctcaagaattcgtgggtgctacacagcctttgcatcgattcatcgttcgtggcggactagcatttgggcctgtaattcatggcaatgaagtgggcgctgccgttgatccaaggcttgaggaccacgacgactacaagtcgaaaatcctactgggtatgcctattgttcaagcaaatgcctcggagcggctggcccctccgtttggcatctatattcatgagtctgcacgcgcgtttgctcaggctggtgaagagccgttccaccatgtttggtggaagtgggtaaaccaggaaaactcggccaactggaacccgctgcttgagcgactaaccgctcactatgagtggtgtaggcaaatgccaaaccgcctgatttatgacttaccgaggattgaggctcaccagaagatggccgcagagtattttctcgtcgagcccaactcatag

SEQ ID NO: 346127 - DNA, 1278 bp, Pseudomonas aeruginosa
atggcactttcacatggttccctaccattcaaacagcaaatcaccttcttccgggacaaggtcaacctgcccacccgcgcctggtccgacctctacgcggcagagcacgactgggccttcgtcgtagccggcgccaccaaacgcaccttgctggccgacctgcgcggcgcggtgcagcgcgccatcgagagcggccagaccctggagcagttccgccagaacttcgaccaggtcgtcgccaaacacggctggcaatacaacggcgagcgcggctggcggacgcgggtgatcttcgacaccaatctgcgccagagctacaacgccggccgcgaaacgcagatggccgaccccctgttgcgcaagcgtcgaccctatggcctctatcgccacggcgacagccgccacccccggccgcagcacttggcttgggatggcaccgtcctacccctggacgacccctggtggagcactcacagcccgcagaacggctggggctgccagtgcaagaagttcatgctcagtgagcgcgacctgcagcgcatggggctcgccgtcggtcaggcgccagagatcgaatgggaagaccgcgttatcggccagaacagccccaacggaccgcgcaccgtgcgcgtacccaagggcatcgatcccggcttcgaatacgcccccggccagtcgcggctcagctcggccgtgccgccgctgcgtgcccatgacccgttgccggaacccacacccggctccaaatccagcgccaccgccgccggcctgcccaacaccccggcgcgcagccccttgcccacgccgcgccaattcccggccaagcgcctgctgcctgcaggccgcagtgaggccgagtatgtcagtgcgttcctgggcaagttcggtgccaccgaggcagccccggccgtgttccgggacgtgaccggcgacgccgtggtcatcggccgcgagttgttcgtcgagcgcaggagcagcacctacaaggtgctcaagcgcggccgcgaacagcagctgccgttgctcgccgaggcgctgaagtcaccggatgaagtctgggtccgcgtggaatggctctatgcccagcagcgcgccgttgtgcgtcgccgctacatcagccgctttgcggtcgaaggccaggaagtcccggcgctggccgtgtttgaagtgggcgacgacggctgggcgggcgtcactaccttctccccggaggcgggcaacgccgagtacctggagcggctacgtataggagtgcgtttgtatcgacgagaaagctaa

SEQ ID NO: 346128 - DNA, 279 bp, Pseudomonas aeruginosa
atgcgtcattttgctgtgttcagtcaccccaatcagaagaagacggatgaattccgcgttccgaatccccccttcgtttctatccaagtcggagaacatttcactctcgaaaatggcgaaatagttttcggcggtcatttgatggatgagtcagaaatcgactttgccgttgactcacttctgagggagcttgaggagttccgtaaagctgccaagaaaaggctccaggcccttaaggatcacaacgaacgcgaattcccccgcaagcagagcagttag

SEQ ID NO: 346129 - DNA, 483 bp, Pseudomonas aeruginosa
atggccggagcaatgatcaccgtcgacctcggcaccgaggcggcctgcgccgccctggagcaactggccgcctacctggacaacttgaccacgccgttacaggacgtgagcgagtacctgcagctgtccaccgatgcacgcttccgcgcccaggtcggcccggacggcacgccctgggcgccgctgtccccgaccaccctggcgcgcaagaaaggcaaccgcatcctgcgcgagtccggcctcctgcaggacaccctgcgcggccaggtcgagggcaatgaactgcacttcggtaccgaccgcccctacggcgcagtccaccagttcggccaacccaaaggcaagtccggtactacccccaggggcgcgccaatcccctggggcgacatccccgccagaccttacctgggcctgtccgccgaggacgaagtcgagatccccatgatcctgcacgactacctcgccgagccgttcgagggctga

SEQ ID NO: 346130 - DNA, 993 bp, Pseudomonas aeruginosa
atgccaaacctcatagcactcaacaccgacctctccgccagcctggccgatgaccagaccgaagccccggactggatcgaactgatccccgccggccccaacgtccagggccgcgacggccgccgctggctgttcgacgcggcagcgcagcaactggtgcgcaacgccttcgcccaacgcgacatcgacctgccgattgactgggaacacgccacccagcgccgcgcccccaagggcgaagaggctccggcggcggcctggatcaagcagctggaggttcgcgacgacggctcgctgtggggccacgtccagtggacccctcgcggtgaaagccaagtgctcaaccgcgagtaccgctacctgtccccggtattcgactacgactccgccaccggccgcatcgcccggctggtcagcgcggggctggcgaacatccccaacctgtttctcaccgccctcaaccaggaagcccaggaggccacgaccgtgccactcccccagcccatcctcgacgtgctcagccttgccgccgacgccaccgaggaacaggtcctagcagccatcgcccaactgaaagccaccgcccaggcgaccaacagtgagcagcccagcctggagcgcttcgtgccacgtgccgactacgacacgcagctgcagcgcgccaccaacgccgagaaattgctggccgcccagcagaaggccgagcacgacaagcaggtcgaagccgccctggaagccgccagcaaggcgggcaagatcacccccgccactcgcgactaccaccgcgccatgtgcagcgaccaggccggcctggagcgcttccaggcgttcgtcgcggccgcacccagcatcggcgacccgtccgccctgggcgagcgcaagccctccactacgaccactaccgcactcaacgccgaggaacaggccatgtgcctggccctgggcgtgagcgaggaagagttcctgaaaaccaagcaggaggccgagcaatga

SEQ ID NO: 346131 - DNA, 396 bp, Pseudomonas aeruginosa
atgaccgctctgaccgaagaccgcaacacccccctggccgatacccaactgctgtcgctacccgtcgccggcggcgcgcgcatcttcgccggcagcctggtagtgctcggcctggggtttgcccgacccggtcatgacgcccccgacctggttgccatgggccgcgccgagcagttcgtcgacaaccgcgaaggcggcgacggcgacgaacgggtcctggtccggcacggcctggccttccgctgggccagcgatggcaccgtcactgctgcccacctcgggcagctggcctatgtcatcgatgaccagaccgtcagcgccgatgacaacggcggcaagcgctcgctcgccgggcgaatcatccagctcgaagccggcgaagtctgggtccactaa

SEQ ID NO: 346132 - DNA, 906 bp, Pseudomonas aeruginosa
atgctgatcaacaagagttccatccaggccgccttcgtcgccctgaaaaccctgttcaacaacgccttccaggccgcgcccagcacctgggaaaaaatcgccatgaaggtgccgtcgtccaccggcagcaacctctacgcctggttgtccgccttcccgaaaatgcggcgctgggtcggcgagaagcacgtcaggaacctcaaggcctacacctacaccgtcgagaacgaagactgggaagccaccgtcgaggttgaccgcaaccacatcaaggacgaccagatgggcatctatgccccgcaggcgcagatggccgggcactcggccaagcaactgccggacgagatcgtctttgaagtggtcaacggtggtttcgacacgctctgttatgacggccagtacttcttcgacaccgaccaccccgtcggcaagggcagtgtcagcaaccgtggcaaggccgccctgtcctgtgccagccaggcggccgcccgcgccagttatggcgccgcgcgtaccgccatgcgcaagttcaaggacgaagagggccgccccttgggcgcgcgccccaacgtcctgctggtcggcccggccctagaagacaccgcccgcgcgctgctgaccaacgaacgcctggaagatggcaaggccaacctctacaggggcaccgccgaactggtcgtcgatgagcgcatcgagtccgacaccgcctggttcctgctcgacacctccaagccggttaagcccttcatctaccaggagcgcgaggccccgaacttcgtccagcagaccaacccggaagcggacgacgtcttcagccgcaagaaatacaagttcggtgcggaagcgagggcagccggtggctacggcttctggcagctcgcctacggcagcaccggggaggaatga

SEQ ID NO: 346133 - DNA, 372 bp, Pseudomonas aeruginosa
atggccattcgcatcaccccccgtcacgacggtttccgtcgcctcggcatcgccttcccggagcagggactgacgttccctgatgatcgcttcactccggaccagctccaggtgctcaagggcgaacgcatgctgatcgtcgaagaaggcgtagcggaccaggaggacggccatgcacagcgcgcccaaccaccgcagcagccgaaggcacctgcgccaactcctccgcgcagcgcttcgccggctaccaggtcgcgacctgctggcaaacctggcgctgctgccaagcccgccgccaaaccggccacgaaagcggcgccggacaaggccggtgcggatgggacatcgtccgaccaggagagcaacgcgtga

SEQ ID NO: 346134 - DNA, 492 bp, Pseudomonas aeruginosa
gtgaagctgcaactgccctcggccgtccagctgctgctgcgctatggcgcatcggagctgacacagatcgccgtccccgacagtgagcggcccattgcgcccgagctgctgcaggcggcggccgagggggctgcgctggacgactggccagaggacgaggtggccatcgccaccatcgccctggcgcgcatcgccgacgcggtgacccgcgcacgcagcgagctggcgttctacctgcggtttcgcgccgaggccgatggcgtgccggcgtgggtcacggacgacctggccgagatggcgcgctatcacctgttcgacgacaccggcaaggaagagtcgaccgtccgcacccgctacaaggacgtcatcctccgcctggaaaccctcgccagggaggatgaagcgaggggcgcggccgaaggtggccgcgccgacctgcggatcacccacaaccctcggctcatgagccggcgcagcctggggcagctgtga

SEQ ID NO: 346135 - DNA, 576 bp, Pseudomonas aeruginosa
atgctgggcgacctggaggaccgcatcgaagcgcgcctggccgagctgcgccagtacctgccgcgcctgcggctggacagctacggcggcgagctgagcgacccggacctgctgccgggcctgctcaagggcggcccggccgtgctgctcaccgtaccgcgcatgcgtttcacccgtcgcagcaatcggcgctacgccctggtcgtgacctttcgcctggtcatcgcctgccggcagccgcgcaacgagcgggcatccaggcgcggcaacgaagccgaccgcctgggcggcctcggcagctacgcgctatgggaggcctgcgtgcgccagctcaccggctggcaaccttgggcggatcaccccggcatcgttcccaccgaattcaacaacctggtcaacggccgcttccagggcgagcactacagcgtcctggggcagagcttcagcctggaggccggttgggacatacccgacgagcccgaggccctgttcgacgccatcgacctccactatcacctgccgccggacgcggacgaatccgccgccaccgaccgcatagacctgggagacccctga

SEQ ID NO: 346136 - DNA, 222 bp, Pseudomonas aeruginosa
atgcccatgaacgtcatagccgcgcctggcctgcaggtgccgctggaagacaagccgcgcgagtacatcaccgacagcaaggcgcggtccgttcccgacagagcctactaccaccgtcgaatcgcagcgggcgaactgctgctcgtcggtgacagcccggccgagcaagccgagccctccaccagcactgccaaaccgcgggcgaaagcccgcacggagtaa

SEQ ID NO: 346137 - DNA, 1098 bp, Pseudomonas aeruginosa
atgaatatccagttcgaccagatcccggcgagcatccgcaagccgggggtctatatcgagttcaacacccgcctggccgtgcgcaccctgccggccaacaagcagcgagtttgcctgttcgtgccactcggcgatgaggccaccgtgcctgcggcaacaccgcaccaggtcttcagcgacgaccaggcgcagaagctttacggaagtgacgtggccgccggcatgacccgcgccgccattgccgccaacccgtacctggacctgaccctggttggcgtggacatcaaggacaagttgcccgacctcgccgccgcgctggccgccaccgtgggcggcggctaccacatcctggtcccggcctggttcgatgcggccaccctgaccgcgctgcgcgcgcacatccagcgctacaccgacggcatcgagcagcaatcgctgatcgccgtcgccgccagcaccggcaccctaagcgccgccactaccctggccggcagcctgaacagcggcgccatcaccctcgcgctgctgcctggcagcgcgacccccgccgagcacatcgccgccgcctatgccgccgtgatcgcccgcgaggaagacccggcgcgcccgctcaacaccctggccctgaccggcgtcgccgtaccgccggtgggccagcgcctgggccgcaacgaacaggaagtcgccctggccaacggcgtcacccccctggaagtcggccccggcgaggtggtacagatcgtccgcgccatcaccacctacaccaagagtccgaccggcgccgacgacatcgcgctgctcgacctcaccaccatccgcaccctctattacgtccgccaggcctgccgtgaccgcattcgcctgcgcttcccgcgcgaaaagctctccgaccgcaagctgcccgacgtgcgcagcgagctgctcgacgtactgaagaagctggaagagctggagatagtcgaagcggtgggcgacaacgccgacggcctcatcgtccagcgcagtctgcaggaccccaaccgcgtcgatgcgcgtatccctaccgatgtcgtcaacggcctgcatgtgttcgccggccgcatcgacctgctgctgtaa

SEQ ID NO: 346138 - DNA, 372 bp, Pseudomonas aeruginosa
atggcagatatctacgtcggcatcatcgtgctgaatatcaacggcaccgagtacgaggtcaggagcgtcgagccgacgctgaagaccggccgcagcctggtcaagaccatgaaccgcaccggccgcgcgctgggcaccgccaagggcctggaggagcacgacctgcgcgtcagcgttgccatcccgaaaagtggcgaaccgaactggcaggcgctgatcgacgccaagctgaccatccacccgcaggacggtggcggcacgcgcgagacctggaccggcgtgtacctggtcgagatcggcagcaagtaccaggtcgagggcgaaggcacgcgcgaccttaccctgggcgccctgaaccactacacggagtaa

SEQ ID NO: 346139 - DNA, 402 bp, Pseudomonas aeruginosa
atgagcacccccgacaaacgctggaacggcctcacccacgacggcgaattgcccatcggcctctactacgccggcacccgccaccgcgccttcaccctgcgcgtcggcgtcgccggcgacctgatcgccgcccaggaagagcacccatccggcagcatgcaactgctgaccctggccgtattccaacgccagttgctgcgcctgggcgacatcccggccgaggcgctgaccctggagctgctgcgcgagaacctgaccgagcctgacctggccgccctggccgaggccgacgccatgctggaaaaaaagctcatgacgccgagcgaggcctcagcgcctggcgtcgaatcgagcacgcactcgcccagcgcggattcagtagcgccgacctccgaggcatga

SEQ ID NO: 346140 - DNA, 2487 bp, Pseudomonas aeruginosa
atgagttcggagctgcgggtcgccatccgcattgccgcccaagccggcagcagcaagcgcgaaattcaggacatcaacaacaccctgcgcgcggccggccgcgagggcgcccgcagcctggccgacgaatcctggcgcgcccagggcgccatgcgcggcgccggccaggccggggcggccagcttccagttggcccgcgccgccatgcgccaggccgccaccgacggcctgcgcccactgcgcgaggaagccagccaggccagcgcggcggtcaagtccgtgggcaccggcagcacccgcagcggccgcgaggtgaccgaggcattccgccaggccgagcgtgccggcgtgcgcggtctgcgcgaggggatcagccagaccgacaacggcctcaagcgcttggcgcgatctggcctgacctcaatgcgcaccctgaagaccgtagctgccggcgtgcgtgaagagttcagccgcgtccgcaatgtcatgagcagtaccggcggcaagctcgccggcctgggcatcggcatcggcgtcggccaacagttcggcgccagcgcccggctggaccggcaaatgatccgtacccagcaaactgccgaaatgacccctgaacaacgcgaggaatggcgggcagtcggcatgcaggcggggcgacgctacggcgtagacccggatgccatctacgccggtggcgacgccctactggccggtggcctgagctacaaggcgaccctggccagcgccgacgccatggcccaggccagcgcggtgaccggtgctgactcggaggtgctggccggcgcgttgaaagcgggcagcgccatgttcgacatcaacccggagcaagacggggccgccctggacatgctgcagaagatgaccatcgctggccgcctcggcagtgccgagctggagaacatcgccgaccttctgccccgcatcggcggcaatgcccgtgcggcaggcatggacctgtcgcaagccctggcatttaccgagacgctgtcgaacatggagcaagacccggcgcgcctcggcacactgaccgagtccacgctgcggatattcgccaacccccagtaccggcagcagatcaccaagagtaccggcgtgcagttcttcaatgccgacggcaccagccgcgacagccaggacgtctacgccgacctcaagcgcaaatatgcccgcatgcaaacggacgaagagcgggcaaggttcatgggggtggtgttcaagggtatggaccaggacaccctgcgcggcaaccgcttcctgctcgatgccgacaacctggaaaccttcgccagccacacccaggccacccgcaacgctggcgcccccttccaacgcgacctgcaagacaacgtccgcagtgccaccggcaccgccggccgtatgcgcgccaccctgcgcgaagccatggaccgcatggcccagccggtaaaccaggccctggccgacaccggcagctacctgctcgacgacctcaacctctccggcggccaactgctggccggtggcgccgccgccaccatcggcggctactacgccgggcgtggcgccaaagccctgggcggcaaagtcatgggcaagctggaagggctgctgggcaacagcaccaaccctgccgaactcatgaagaacctggtcgtcggccgcgccctggagtcggcggccggcgtgagccccgtgttcgtcaccaactggccatcgggcatcggctccgttggcgcagggccgaatgccgagcgtcgtgccggacgcacggccggccggctgcgcgactggggcagcgtaggggctggttatgcgctgcgtgccgccccctgggccgctctggccggtggcactttggccctcagcggctcaagtgacaccagcgacgaagtccaactggccaatctcgaccgcgccgacctgacccccgcccaacgcgagtaccggggcgcctacctgcgccagcgcgtcgccctggcggaccagcagccggacctgggcttctaccagctcaaccgcgaagcggcccgcctggcgcaggaggaaaccgggctgaccacctacggcactccggtggcggctatcgaccagcgaatgcaagctctgaatgcgcggctcatggacaacctgcagggtggcccgaagggaggcgagctgctgcgcgctgtgccaaagccagcgcaaaaatcggacttcgccgagcgcctcaatgcccggcttatgggcaacctgcaggccgacatggccccggctggggcgcagagtttcctgacctggtcacaagagcaggcggcccagttgccgacaccatccagcgccggcccgctcgcgcagtccaatccagcggcccaggccctggacaacttcgcccggcaactcggcgagctgctcggcaaacccctggtgatccaggtgcagaccgacagcgacgccatcgccgctcgcgtcgagcgtcgtgccggcatccagatgaggcgcggtcaatga

SEQ ID NO: 346141 - DNA, 1401 bp, Pseudomonas aeruginosa
atgagctggagcgatacgctgctcgatggcagcttcaggggcgttccgctgcatgtgcgcagcgagtccctgggcggcaagcgcaacctcgctgagcacggcgtgccgtaccgcgacggcgacgacatcgaggacatgggtcgcagcggccggcgttacagcatgaagctggtgtgctggggcgatacctacgaacgccacctgcagcgcatcctggaagccctggacaccctcggccccggcgagctggtccacccggtatacggcagccgcaccgttgtcgtcgagtcctggaacgtcagccacgaggccgaccatatcgaccgcgcggagatcgacgtcgagttcgtcgaaagcaccccgtccgagccgttcttcgaccgctggttcgtcgacaccagcgaccatgtcctcatgacgcccgacgaccttgccagctggcaagacaagctgcgcgactggctggcccgcctggactcattgttcgccctggtgcagcagtacatcggcggcggctgggtcgggctgctggaggaactgctgggtctgccgggcatcgccctgcgcctggcccagttgcgctcacagatactcggcgtggtctacggcctcaacggcctggcgcgccgcagctcccgagcgttcgaccccttcaccgacctggcgcgcacccaggccgagatccgcctggccatcgccgcggccatgcccgaggacggccgccggctgctcagcggcgagggcgtgccggcgcggctacccaccggagtgcctaccgcccagcagggggccgacgccacggccggcccggcagggcaagggctgccggtcaccgagccgctggacggcgccatcctggctgcagtggatgcgctcctgcaggaagcgcaacgcggcagcaccccaacgttcgacgccctggagctgcccgccgggctgccgaccgacccggccggcgcggtcggctggagcctggccgccctggtcatcaccgaactggccgtggccaagggtgccgccgttgccggcgtgctcgatgccgagctggccgcgccgacccacaaccccgacgaaatcgaacgcctggtcaacggtgcgcgggcgctgctcgaagccgccatcctcctgcgtcgtaccctgttcaccgtggaacccgcgctgcacgtcatccagccgctgcgctccagcgccgcgctcatgcaggcgcaagcgcaaaacattatccagcggcgtccgccgctggtgcgccgggcggtcgagtccggcggcaatctgcggctaatcgcccaccgctggtacgcggaccaccgccgcgcgcccgagctgctgcgcctgaaccccaacctgcgcgcgccctacatcgtgccggccggcgaagtgctcaatgcctacgcgcgctga

SEQ ID NO: 346142 - DNA, 1119 bp, Pseudomonas aeruginosa
atgcctacgcgcgctgacatccgcctgagcatcggcggccaggcccacgaaacctgggacggctggtcggtggaaagcgacttgctcaccccggccgatgccttcgagctggaactgttcacccgcgaccgcgtcagcctgcccgcgcagcttcaggagggttcgccctgcgagctgagtctcgcgggcgaccgagtgctgaccggccaggtcgacgaaatcgagcacgatatcgcccgccagggcaccgccatccgcatcaccggccgcgacctggccgcgcccctggtcgattgcgccacacccttcgtcgccatgcgcgaggccggcctggccgagatcgtcgcgaacgtcctgcgcccgctgggcatcacccaggtcgacatccgcgcggccgccatcgcccagcgtcggcgggtgcagatcgaacctgggcagagcgcctgggaagcgctcctgcaggtggccaccgccaatggcctctggccctggatgaccccgaccggggtcctggtcgtcggcgggccggactacagcagcgccccagtcgaccgcctggtgttgcgtcacgacgggcgcggcaacaacgtccagcgcctgtccgtacgccgctccatcgccaaccgctacagccaggtcaccgtgctcggccagcatggccagtacgacaacgacggctgggacaccagccgctcgcacatcatcagcaccgtgcaagaccaggcgttgacccggcgcggcatcttccgcccgcaggtcatcgtcgacagcgccagcgaaacccaggacctgaccacccgtcgcgcgcgcaaagtgctcgccgacagccgcttggaaggcttcgagatccgcgccatcgtcgccggccatcgcaccaccagcggccaagtctgggagccgggccagcgggtccaggtctacagcgagccgcatggcctggacggcacctacttcctcatgtcccgcaccctgcgcctgacgcgcagccagggctccatcaccgaactgcacctgcgcgaagaccacgcctgggtcctggacggcaacccccgcaagaaggggcgcaagcgcaagggtgacgccgacgccgagttcatcgcccgagtccggagctattga

SEQ ID NO: 346143 - DNA, 804 bp, Pseudomonas aeruginosa
atgaccactctgccgaggctcgtccgcgaacagatcaaccgcgcgctacgcaatgtgcgcctggccctgcgtggcgtcctacgtcgctccaacaccgcctggccgaacatcggcctggaggtcgagggcctggccggcgagcaggtggccaccgaactcgtccagcactacggcttcacttcggcgccgctgccgggtgcggaaatgatcgtcctacccatcggcgggcgtaccaatcacagcgtcgtcgtggccaccgaggacggccgctaccgcgtccaggtcgtcgacggcgaggtctgcctgtacaccgacgaaggcgactacatccacatgaagcgcggccgcctgatcgaggtcaacactgtggacctgctgatcaacgcggccaactccgtggagatcaacaccaccgactaccgcctgaacgccagcgccagcgcccgtaccaccaccgaactctacgatctggccgcaagcgcctcggtgaccactaccacccaggtcagcctgctgaccgcccaggccagcgcctcggtcgtcacgccggcactcacggcctccgtcgccgccggggtcgtggtcaccgcgcccctggtcgaagtcaccgccgccacgcgcctcggcctgactgccccggccatggccctgaccgctccgctgggcttccaattggattccccgattacaaccatcaaggccgacatgtggtacgcgttggacacgccgctcaactaccagaacccgaaaatgcagcagaaacctacgccgtccccgcccaatcccgccgctaccaaaccctga

SEQ ID NO: 346144 - DNA, 351 bp, Pseudomonas aeruginosa
atggatgccgccctcgaccccacgacccaagacctcactggccagcgtaccgacacgctggccaacgcggtctacctacgcctcggcatccccctggggagctggtgggccgaccccagtctcggttcgcgcctgcacgagctggcgcgcagcaaggatcggccacgagtcggcgtactcgcccagcagtacgccgaagacgccctggcgacgctgaccgccgagggccgcgcccagtccatcaccgttagccgcgaacaacgcgacgatggtcgcctactgctgcacatcgaagtgctcgaagccggcggccgactgaccacctttcagtaccccgtgcgagtcagctaa

SEQ ID NO: 346145 - DNA, 1059 bp, Pseudomonas aeruginosa
atgccgttcactgtcccgagctacgacgcgatccgcaacgccatcctgcgcgacatccgcaaccaactgcccgatgccgccgtcggcagcgacagcgacaacttcgtccgcgcggctggagtaggcgccgctatcgaaggcgtctaccagcaccaggcctggctctaccggcaaatctggccggacaccgccgacccggacgagctggagcaccatgccgccaaccgtgggctcaagctcaagcctgccgttgccgccgtcggcagtgtgactctgaccggcaccaagggcctttggctcgcaccaggccaggccctgcgccacaacgccagcggcgccggcctggtcaccaccgccagcgtcaccctgggcgatggcccgaccgccgttagcgtggtcgccctggagtctggcgcggccgccaacggcctgcagggcgcgggcaccctgaccagcccgccactgggcgtcgacagcggcgcccgcctggcgacactgacgggcggggtcgatgccgagacccacgccgagctgctagcccggctgctcgacctcatgcaacacccgcctgcaggtggcaccgtccacgactaccgtcgctgggcgctcgccgtacccggcgtcaccctggttatcgtgctgccacgtcggcggggcgttggcaccgtcgacctggtcattacctcggccgatggtctgccgagcgaagacaccctggacgccgtgcgcaatcacctagataacgtcggtcccgtgggcgccgactggcaggtccatgcgccgcaactgctcaacgtcgacctgcgcgcgcaggttcgcctcgccagcggctacaccctcgacgacgtgcgcgggcgtgcccgcgtcgaaatggccgcgctgttcggccggctactgccgggcgataccttctaccgctcgcaggccgaggccgtgctgtccaacctggccggcgtacttgaccgccggctgctcatcccgcaagcggatgtcgccggcccggccggcagcgttacctgggtgcgcctgggcacgttcgccctggaggcgatgccgtga

SEQ ID NO: 346146 - DNA, 663 bp, Pseudomonas aeruginosa
gtgaccatcgccgagctgctgcgccaactgttgccgcccgttgcctacgacccgaatggccgccatgtcggtgccgtgatcgatgccgaagcccagcagatcgaggccgccatcggcagctccgcagccgtgctgatggccctgcaccctgaaaccggctacgccctggacgactgggagcgcgtcctcagcctgcccgaaccctgcaccgccaacctggcactgacccgcgcccagcgcgtcgccgccgtgctggccaagctggccggcgtccagggccaacggctgcaggactacatcgacctggccaccgcgctgggctaccccggcgccaccgtcgacaagttccatgcccgccgctacggccgggcgcgccacggcgaacgctacggcggcgacgcctggaactgcgtgttccgcctcaacctgccggccttgcaagtgagcgtgcgccgccatggcctcgcggccatgggcgagcgttatcgaacctggggcgaccaggtcctggaatgtgccgtgaaccaacgccggcccgcgcatacggtggcgttgttccgctacggcgacccctgcctgcgcacccttgagaccaacgaagaacgattgactgaaagcggcgagcgccgcgccctggagaggatgacatgggactatcaatag

SEQ ID NO: 346147 - DNA, 1077 bp, Pseudomonas aeruginosa
atgggactatcaatagggcagatgccgcgcgcccggccactggaagacgatgacctcttcgaagtggttcaggacggcatcaaccgctgcttcaccggacagcagctgcgccagctcatccaaaccgggcagcgcgtcaggaccgtcgccggggtgacccctgatgtatcgggggatgtacccctgaccgcggccgacctaggcctggccggagcggtcaagaaagtagccggcaaagcgccggatgctgctggcaacgtgcctctgaccgccgccgacctggggctgaaaggcatggtcgccaaggtggccggcaaggcgccggatgcgaccggcaacgtacccctgaccgctgccgacctgggtctggccggagcggtcaagaaagtagccggcaaagcgccggatgctgccggcaacgtgcctctgactgccgccgacctggggctgaaaggcatggtcgccaaggtggccggcaaggcgccggatgcgaccggcaacgtacccctgaccgctgccgacctgggcctggccggagcggtcaagaaagtagccggcaaagcgccggatgctgccggcaacgtgcctctgaccgccgctgacctggggctgaaaggcacggtcgccaaggtggccggcaaggcgccggatgcgaccggcaacgtacccctgaccgctgccgacctgggcttgggaagtacggtcgaaggcccctggatcgagccggacatgctgacggcaagcttcacccccggtggccgcgatggctggacaatgcctggcgcgattgggcatgagcgccgcgtgcgatttcgccaggtaggccagcgcatctacgtcgacggctgcgtctattgcaagggcgggacaccttccggggtcgggatcttcagcctgacggaaacgttcgccccgcagtggagccgccggctgagcgccatctacaaagcatactcttccacctattcacgcccggtacccatcgagatacgtcgggtcaatggctacgtgctgctaggcgactcgattccagagcaaggcactctgtttctgagttgttccttcgacctcgactga

SEQ ID NO: 346148 - DNA, 1491 bp, Pseudomonas aeruginosa
atggactacccccattccgaacccggcgtcagcctgacgccggatggccgcttcaccgacggcgaccccgccgccggcatccccgccagccgagatcctgcgagctgggccaacggcgtcaccaccgaactgctcaacgtcatccgggccggcgggctccagccagacgagttccagcacaaccaactgctggtagccatgcgcgagctgatcgccactggagccatgaatgccgtcgtcgtgcggccgccgtcaatcagtgccagcacccaggcccctgtgggccatgaggccccggtgaaactgcagggcaagtcgctgcttctggacacccgaatcaccggatttcgctaccgcctcgacaagggcagcgagctggaggcggcagcaaatgccagcggcgccagcgagataggtctcgccgtacccggccgggtcggcgaacagcgcgtgctgtcagtcgtagccgtcgatgagtggggcaaccgctcgccggcgacgactcatgaattcgtactcaccggccgcaacctgcccgacatgacctatttccgtcatacggtcccgcaacaggtttcggccggcgccagctatgttgtgaccttcagcggcgccaccgcagacaccgggaacgtggtctaccgcatcgacccacgcaccagcggcctgaccttcagcaagaccaacaacatccaggccaacgagcaggtcaccctcactgcgcccttactcgtcggggaggatgtcgaccttagcttcgtcgtggtggcggtcgacaacgccagcctgaccagcagcaccaccctcaagacgcgagtaaacgcccgcaaggtatgggtattcccacaggctggcgctggaacctgggaagtgccggtgaccgggcaatacgagctgctcgccattggcgctggcggcgcgggcggtacggcagtcgtcgtcggccagatccgcaaccacggcggcggtgggggtgccggctacggcgagcggcgcatcgtccaactcaccaaggggcagaaaatcgcctacgaagtgggcaaaggcggcagcgcgccgacccaggaaggcgtagccggccaggacggtggcggcacgacgctcggctcaatcagcgtgcgcggcggacaaggcggccgccccggatacagcgcgggtgtgggcagcgccggcaacggcgggtccaacggcggcgcgggcaaggtcaagccgtatcacgacgtcgaggtcaacgaccgcaacgtcggcggcatcgacggcgcaccaggccagggcgccggctactacagcaagctcgacaacagcctgagccacggccgccccctgaccagcgcccacaccctggtcgcaggctacggcggcggcggcgttggtgggggcaatggcggcggcgcgggcggcctggggtttgacgtcagctatgtgccgcagtcagtggacttctccaagggcgcagacggctacgcacgtatcaagtggctgagcgcctag

SEQ ID NO: 346149 - DNA, 744 bp, Pseudomonas aeruginosa
atgaccactatcattaataccctgtaccgaggcgactcacttcaaatcctggccggcctcgaggccgccagcttcgacgcgctcataaccgacccgccatactccagcggtggactacatatcggggcgcgccaacgccccgcctcggagaagtacccccaaggcggccagaaactcgtctaccacgagttcgaaggagaaaaccgcgaccaacgctcgcagggctactggatgacgctgtggctatccgagtgctaccgactactccgcgacggcgcaccagtttgcctgttcagtgactggcgccagctaccgctgaccaccgacgtcctgcaggcagccggcttcacctggcgaggggtgctcccctgggacaagaccgagggtgtccggccccagctcgggcgcttccgcaaccaggccgaatacattgtctggggcagcaagggcaacatgcccagcacacgagcggtccccgtgctgccaggcgtcatccgcgagccgatccgccgcgccgacaagcaccacatgacgggaaagccaaccgaggtcatgcgccagttggtgcgaatctgcgagccaggcggccgcatcctggacccgttcgcgggctcaggtactaccctggtcgccgccgagctggagggatacgcctggaccggctgcgagctgaccgaggactactaccaggtcgccgccggccgactccgcgccctgaactcgcaattcacatcccacgtgtag

SEQ ID NO: 346150 - DNA, 207 bp, Pseudomonas aeruginosa
atggttacggcttacaacatcgcggtcaggcggttgtacaacccgctcttcgaacgcagagaaaccgacccggctcgattaactcgtggggactttgatcgcgtggtgaattttcttcgcgagagtggttacaagaatttctacaacgcgatttcgcacctcaaggtaatcgctgtagtggtcaacccatcccggacagtgggttga

SEQ ID NO: 346151 - DNA, 558 bp, Pseudomonas aeruginosa
atgctgctgcgtcatcacctcgggcaaggcttggcggatcaggggacgccagcagaaatgatcgccgagttgcttggccacaacagcacagtcgcggcgcgcgcctatgtcacggcgaccccgaatattgcccgcatcaaagagaaagcgctgggcaagagcccggcctatcaacgcattatgcgcagtctcttaaccggaaatattgttcagcgccgcgactcggtagctgaaagggaggtccgtggcgttgtcgacatgcagtacatcggggacatcggtgcgtgtgccctccccgttcacacgcactgtccctacaacccggtctatgcctgctacacctgcaagaaatttcaccccttcgccgacggtcgccatgaacaggtgaaagaggccctgcaacgggaggcacaacgcttcatcgatatggcagaacaagccggcgatctcagtcacaatcgcccgctggcacaacaccagaccactatcctggcggtgaaggccacgattgagcactgccgagggcatatgggggaagccgaaaatggcccagtctag

SEQ ID NO: 346152 - DNA, 279 bp, Pseudomonas aeruginosa
atgctcacgatcattgatactgacataggcgtgctgagagccctggttgatatccgtattatcggcctgacggccgctcagcagccagacggaataaccgtccagcaacgccaggatggactcaaagcggcactgcaagatcgcctcatcgacatccaggtctcggccttcggcgtagacatagaaggtctggatggcccgcaggtgggcagcagcggtgttaaaggcgcggtgcttgagctggagctgaacatagaggaacgggacgagcacgggtaa

SEQ ID NO: 346153 - DNA, 1272 bp, Pseudomonas aeruginosa
atgagcgaaagcgtcatcacccaatgtccccattgcagcaccagtttccgcgtcaacgacgtgcaactgggcgccgccaatggtgcggtccgctgcggcacctgcctgaaagtcttcaacgccctgcaacaccaggtcggtggcgcgccgcgcgcgaacgctccttcggcagccgaagcgaagccggccgccgctccgccacccgcgcccagcgtcgcggccgccacctcggccgcgcccccggcagcgcgcccgcgcgacgaaaccctgtggatccatgacgacctcgacctggacagcctcaacctcgacgaggaactggccaagctcgacgaattcgagctgaaccaggaattctccagcatcgagaaggccccgcgaccggcggaaagcctgctggcgcgccgcgacgacgaacgcgatccacatgacgaacgctgggccgaggcgctgatcgccgatgccgaaccggcccagccggcgcgcggcaatccgcgccaggaaccgagcctcggcgaaccgctggcggaagagcgggtatccttcgtgccgctgcgccgcgccgaggatccgccggaacttcgcctcagcctcgatgacgacgacgagccccgcctcggcaagcgccgccacggcctgagcgccctggatgaagacgacgaggaaagcgccgaggaacagtccgtcgcgccccagggcagcgcccgcaaaccggacgaggcgccggtcgagagtctcgaccagttgcgcgacgagccgctgcaactggcctgggagaagccccggcgccaatggccgcggcgtctcggctggctgctgctgatcctgctggcgctgggcggtctcgccgctcagtacgtcgcctaccatttcgacgaactggcgcgccaggacgcctatcgcccctggttcgcccagctctgcccggaaatcggctgcacccttccctccaaggtcgacgtggagcagatcaggagcagcaacctggtggtccgcagccatcccgaattcagcggcgcgctggtggtcgacgcgatcatctacaaccgcgccagcttctcgcagccgttcccgctgctggaactgcgcttcgccgacctcaacggccacctcatcgccaatcgccgcttcaagcccggcgagtacctcggcggcgagctggccggacgaacggaaatgccaccgcaggtaccgatccacgtgtcgctggacatcctcgacccgggtccgaaggcggtgaactacagcctgagcttccattccccggagtga

SEQ ID NO: 346154 - DNA, 159 bp, Pseudomonas aeruginosa
atgaacgtaactgggtggatcaacgtcgtcggcctgctggtactggccctcctcctgtgggcccggtgggcgcagttctatgagccggtttacccggtctgctggctcggttgggaaggctcggcctgctgggcgttggacgcgcccgccggcaggtag

SEQ ID NO: 346155 - DNA, 225 bp, Pseudomonas aeruginosa
atggatgtggaagaaatgagcctcgctctgaagtatctgctcgccccgccgcccctgatgccgtggcgcaccttcgctgactggattcgcatgaacgaccgccacgacatcgtctggggctggattcgcaacggctatatcccgtcgcagaagtacggcaagcacatgatggtcaacgtggcccagctgactatgatgctgatggaaaaggagacgcgcctgtga

SEQ ID NO: 346156 - DNA, 1317 bp, Pseudomonas aeruginosa
atgcaaaccttaaaagatttatatggggatgtaggtctccacgaaaagcttcgtcgaaagactctgaaaaaatcttttgagacatttgactcaagcatggtcctggagagcatccaagcctcagttagtagaagccagcagctacaacaagaaaactttaatatcattcccaaaattcgagaattatttgggaagacaggcgccgtggagtctgcgattggcggccaccctcacttcaactatctagctgaatcgggaggacagcaatatggatatactgtctcactcttcatggatatcaaaggatcgacacgactgggaatcatatattctcccgaagacgtattttacatcaagaatgcaataattagatgtgcaatcgagacaatccaagcttttgatggtcacgttcaccggatcatgggggacgccgttctcgcttttttcagaagcaacggtagctcaccgcgaaattctgcaatagacgcaataaactgcgggacttatctagtagagttcatgaaagaagttgtcctccctcatttacaagaaaataatttagatgaagatataggaattcgagtcggcatcgactatggcgacaacaaaaatgtgctctggggcatgtatggatacagagggtctcacgaggttaccgccacatcttttcacgtggatgttgccgccaaattacagcagaaagcgcctagaaacagagtaatgataggccagtccataaaagaacttttagacctacacaatggaattatcgaaaatcgatacataatcagaaatggcgagaccgtccctctcccgtatgtacgaccgaaccacaaagacgatgatggcaacgcaataaactatcagcaatttgtgattaaccataaagcatactttgagctgctgccgaagcctgaagacgcagatcgactgctaacaataacatccacactcaagccaaacaaagattccatatccgacataggatatgcctcttgctcaagggcagttgagaaaccttatggcgtggactttaaagttaaatttcgattaaacgcagaatctggcgacgacatcaaagttagattcagagtagagaatcacggcgccgaagcatttgaaataaaagagcctctttactccaatcacgacactgttatttccccttcactccggagtgatggaacttattttgccaaacaatgggaaggaacttcctacaccggacttcattacatgtgtgtgtctgtgcttcaaaatggaagggtcgcaatacctgaaaccctatttggagtttacgttggtaatcaagaataa

SEQ ID NO: 346157 - DNA, 2829 bp, Pseudomonas aeruginosa
gtggtacggcttcggatcgccataggactactcgtcagcttcctgctgcttctgctcggtccgatgtcgccggcggtcgcggacgacgccggcgtttccagcgttcccctgcaaaccaccgccaccacccccagcgtcaaccagaactggcgcctgctgcgcgacgagagcgcgcaactgcggatcgccgacgtcctccagcgcaaggagcagttccgcccgctggccaagcgctccttcatcttccccgccagcccccaggcggtctggctgcaggtccagcttcccgcgcagaaggtgccgagctggctatggatcttcgccccgcgggtgcagtacctggactactacctggtgcaggacggccaactggtgcgggaccagcacaccggcgagtcgcgaccgttccaggagcgcccgctgccctcgcgctcctacctgttctcgctgccggtcgacggcaagccgatgaccctgtacgtgcggatgacctccaaccatccgctgatggcctggttcgaccagatcgacgaagccggcctggtcggcctggagaagcccgcctacgccttcggcatgctgctcggcggcatgctcctgctgctgatgtacaacctgatccgcttcgcctactcgcgcagcgccagcagcctgtggctggcggcggtgcacgcggcgctggcggtctgcgccgcggcgaacctggggctggtggcgttctggctgccgggactcaagttcaaccagtcgctgaccgccgacctcggcgccctcggcgccgcggtgagcctgctgtggttcgcctgcagcttcttccgcggcactgcggaaagccgcctgaaccgcctcctgcaaggcgaggcgctgttgatcctggcggtcggcgcgatcatcgccttcacccagcaactctggttcagctggctgatctacctgctggtgatcctcagttcgctcagcgtcccgctgatcgcggcctggcactggtatcgcggctaccagccggcgcgcctgatcgttgccgggatgatcgtgttcaacgccggcttcatggtgttcctgccggtactgttcggcaccaagcaactcgatccgggctggctggtgctcggcgtgttcagcttcgccaccctcgccgggctggtcctgagcgtctcgctcaccgaacgccagcggctgatccagcagctcaacctgcaacagcgcaccagcgaggcggcgcacaccgcggaattgcagaccaaggccgagttcctggccaagatcagccacgagatccgcacgcccatgaacggcgtgctggggatgaccgaactgctcctcggcaccccgttgtcggcgaagcagcgcgactacgtgcagaccatccacagcgccggcaacgagctgctcacgctgatcaacgagatcctcgacatctccaagctggagtccgggcagatcgagctggacgaagtgcagttcgacctcaacgcgctgatcgaggactgcctggatatcttccgggtcaaggccgagcagcagcgcatcgagctgatcagcttcacccagccgcaggtgccacgggtcatcggcggcgatccgacgcgcctgcgccaggtggtcctgagcctgctggacaacgcgttcaagcagaccgaggaaggcgagatcctgctggtggtggccctcgacgaccagggcgagacgccacgcctgcgcatcgccgtgcaggacagcggccacccgttcgacgccaaggagcgcgaggcgctgctcaccgccgagctgcacagcggcgacttcctttccgccagcaagctcggcagccacctcggcctgatcatcgcccgccaactggtgcggctgatgggcggggagttcggcatccagtccggcagcagccagggcaccaccctgtcgctgaccctgccgctcgacccgcagcagctggagaaccccaccgccgacctcgacggcccgctgcagggcgcccggctgctggtggtggacgacaacgaaacctgccgcaaggtgctggtgcagcagtgcagcggctggggcctgaacgtcagcgcggtgtcgtccggcaaggaggcgctggcccagttgcgcaccaaggcgcacctgcgcgagtacttcgacgtggtcctgctcgaccaggacatgcccggcatgaccggcatgcaactggcggcgaagatcaaggaagaccccaacctcaaccacgacatcctgctgatcatgctcaccgggatcagcaacgcgccgagcaagatcatcgcccgcaacgccgggatcaagcgcatcctggccaagccggtggccggctacacgctgaaggcgaccctcgccgacgaactcgcccagcgcggcgtcagcggcgtcaccaactacctgcaaccggccaaggaagcgcaggcgccgagcctgccgagcgacttccggatcctcgtcgccgaggacaacagcatctccaccaaggtcatccgcggcatgttgaacaagctcaacctccagccggacaccgccagcaacggccaggaggcgctcagcgcgatgaaggcgacccagtacgacctggtgctgatggactgcgagatgccggttctggacggcttctccgccaccgagcagctccgcgcctgggaagcccacgaacagcgcccgcataccccggtggtggcgctcaccgcgcacatcctcagcgaacacaaggaacgcgcgcggctggtcggcatggacgggcacatggccaagccggtggagctgtcgcaattgcgtgagctgatcgcctactgggtcggcgaacgcgatcgccgccgccagggcgacgccctgccctcctga

SEQ ID NO: 346158 - DNA, 279 bp, Pseudomonas aeruginosa
gtgagcgacaacgccaacctgaaacagcacctcaccacgccgacgcaagaagggcagaccctgcgcgacagcgtggagaaggcattgcacaactacttcgcccacctcgaagggcagccggtcacggacgtttacaacatggtgctctgcgaagtcgaagcgccgctgctggaaaccgtcatgaaccacgtcaaggggaaccagaccaaggcctccgagctactcggcctgaaccgcgggaccctgcgcaagaaactcaagcaatacgatcttctttaa

SEQ ID NO: 346159 - DNA, 582 bp, Pseudomonas aeruginosa
atgaccgagtccgtcctcgactatatgagccgccttggccgcgatgcccgcgccgcctcgcggttgctcgcgcgcgccgccaccgcgcagaagaaccgcgccctgctggccgcggccgatgcgctggacgccgcccgcgcggagttgtcccacgccaacgagcaggacctcgccgccggccgcgccaatggcctggagccggcgatgctggaccgcctggcgctgaccccggcgcgcatcgacgacatgatcgagggcctgcgccaggtcgccacgctgcccgacccgatcggcgagatccgcgacatgcgctatgtgccctcgggcatccagatcggcaagatgcgcgtgccgctgggcgtggtcgggatcatctacgagtcgcggccgaacgtgaccatcgacgccgccagcctgtgcctgaagtccggcaacgcgaccatcctgcgcggcggctccgaggcgatccactccaaccaggcgatcgcccgctgcatccagcagggcctggccgaggccggcctgccggccgccgccgtgcaggtggtggaaaccaccgaccgcgccgggtcggcgcgctga

SEQ ID NO: 346160 - DNA, 135 bp, Pseudomonas aeruginosa
atgggcaaaatcgagcgtggggagcacatgcccactctcgccctgatcttaagaatcgccgccggactcaagctcagtgctgcggaactcgtcagcgcagccgaacgcaatcttcgtgccgcggcgcacgattga

SEQ ID NO: 346161 - DNA, 345 bp, Pseudomonas aeruginosa
atggagcatgagatgaatgaagtgaaaagcagagggaagtacaccctggagttcaagcaggaggccgtcaggcaggtgaagggtggacgggcagcgtcggtggtggccaagacgctgaggatgcccaaggccagtctgacgaactgggtcagggccgatgccaaaggccagttggggatgtccgcagaaggtaaacccgtggcgatggtgacccccgagcagggggagatcgctcggctgcgagcggaactggcacgggtaaagatggagcgcgacatcgcaaaaaaagccgcggcgtactttgcacaggacgtgttgcaaggtacgcctggatcaggtcgatga

SEQ ID NO: 346162 - DNA, 369 bp, Pseudomonas aeruginosa
atgaagagacgttggccgatcacgctgatgtgcgaggttctggaggtcagccccagcgggtacttcagctggcaagcatctgggcgcgggcctggacaaggccccaggcgcagtcttggcgatgaggcagtgctggcgcacatccgggccatccacgcgcagttgcgtggcgaatacggctggccgcgcatgcgcaaggaactgctgtcgcgaggccatcgggtgggcaaggagcgggttcggcagttgatgcagcgccacggtatccgggccaaggggcgcaggaagttcgtggtgaccacggacagcaaacatcgcctggacgcccttgcccgccaacttcgcatgccaacaactgcggctgcctga

SEQ ID NO: 346163 - DNA, 1935 bp, Pseudomonas aeruginosa
atgcaagccctgcgcatactctcagccgttctgttctcttggttcatggtcatctctgtcgcgcatgccgatcctctggctacgcaagacaaggctaagcaaacctggcaattgctggactacctagcggtcgattacggcggcgctgtgcgggatggcaaggttcaaagtgccagcgaatacgaagaaatgaaggagttcgccgcgacagcggggcagcagatcgccacattgccgagcacgcctgcacttcccgaactgaaacgccaggccacggcactgagcgaactcatcgcagccaaggccgacgcgaagacagtggccgacagtgcccattcactggcggcggcactggtcaaggcgtacccgttcccgctttccccctccacgccgccggatctcacgcgcgccaaggtgctgtttgaagccaactgcgcggcatgccacggggcgactggccggggcgatggcccgctcggcgcaaagctgaccccgccgccgatcgcgttcaccgatcgcggccgggcacgctcgcgcagcgtgctcgcgctctaccaagtcatttctcaaggcgtcgccggcacgtcgatgcccagtttcgccacgctctccgacgaggatcggtgggcattggcatttttcgccggaacgctgtcgcacgacgacgccatgcgggcgcgcggtgaagaatcctggggccgagacgccaccgccaaagccgtctttcccgacctggcggccgctgccacattgaccgaggccgccttgtccgaacggatgccacccgacgcggcgcgcgacctgaccgcctacgtccgcagccatccagaagtgaccgtcaccgccaacggcacgggcgggctggggttggcccgcgcacggcttcaggagagccttgccgcagcgcgcgcaggcgaccaggccaacgcgacgcgcttgggtttgtccgcctacctggatggttttgaaccactggaaccggcattgcgcgcgcgcaaccaggcgcttctcactgaagtggaaaacgccatgctggcctaccgcggcgcacttgccagtggcaagctggagcaagccgacgccacggcccaaaagctggactacctttttgcccaagtcgataccgaattgggggcggacaaagccgagccactgaccaccttcattgcctcgatcaccatcctgctgcgcgaaggcgtggaggcgctgttgatcgtcgtcggcatgctcgcattcctgaagaaagccgaacggcgcgatgttctggcctacgtccatggaggttggcttacggcgctcgcgtgcggaggcttgacctgggccatggcaacctacttcgtgagcatcagcggcgccagccgcgaggtgaccgaaggggtgtcatcactcttcgctgctattgttctgctgagtgtcggcctctggatgcaccagaagagcaccgccggtaaatggcaggcatatctgaaggagaagctctccgcagccatgacgcgccgctcggcatgggcgttgttcgcgctggcgttcatcgccgtctaccgcgaggttttcgagacggtgctcttctactcggccttggccggtgacggcaataacggtgcattgctcggcggactgctgagcggggtggccgccctgactatcctcgcatggctcatgctgcgcaccagcgcccgtatgccgattggaaagttcttcagcctcagctcgattctggtcgctgtcctcgctgtagtgcttgcgggcaagggagttgcgggtcttcaagaagccggttggctgagcgccagcccgatccattggccacgcatcgaagtgcttgggatttatccgtcggcagagaccaccttagcgcaagccgtgatcctcatcattgcattggtcggttttgcgctgaatgcccagactgctcgccggtcgcaggcggcgtga

SEQ ID NO: 346164 - DNA, 282 bp, Pseudomonas aeruginosa
atgaacctccagatcggagaacttgccaaacgcactgcctgtccggtggtgacgatccgctattacgagcgagaggggctgctgccgcaggctcgccgcagccaggggaacttccgcttgtatggagaggcgcatgtggagcgcttgcaattcatacttcgctgccgttcgctggacatgccattgagcgacgtgcgaactttgctgagctaccgcgggatcggcctgcgcaggattgcggtgaagtcaaccttcttctcgatgagcgcatccgggaggtga

SEQ ID NO: 346165 - DNA, 2400 bp, Pseudomonas aeruginosa
atgagtgaatgtggctccaagggatgtggctgctctaccgttgtggtgcccaacccgaaaccgaacatcgtcgaagcagcgttgccgcaggtgcgctaccgcatcgagaacatggattgcccgaccgaggaagcgttgattcgcgacaaactcggaaaggtgcagggcgtgagcagccttgaattcaatctggtgcagagaacactgggagtcagccatcagcttgcctcgttgcgccctatcgaagacgcgttatcggccatcgggatgcgagcggttcggatggatgagaaggcagcccagcaaagtacctggttatccatccagcagatggactgccccaccgaggaggcattgatccgcggcaagcttgccggcgtgccaggcgttgcgaatcttgaattcaacctcgtccagcgcaggctgcacgtcgcacatacacccgacgcacttcccaatgtgcttgcagccctgaaatcgctcggcttcgacgccgaggtgcgcacttcttcggccccttcggcagccgaggcgcaagcgcctgcacgcacaaactggtggccgctggcagtgtcaggcgtcaccgcaacgctggccgaggttgtgtactggctcaacggcggcaaccactgggtcgtggtcgcgctggccgtggtggccatcctcactggcggcctcacgacttacaagaagggctggattgcgctcaggaaccgcaacctgaacatgaatgcgttgatgtccattgcggtcactggggccatgctcataggccattggcccgaggcggctatggtgatggtgctgttcgcactagccgaggtgatcgaggccaagtccttggatcgggctcgcaatgccatccgtggcttgatggacctcgcgccggataccgcattggttcaacaagcggacggcagttgggctgcggtggacgccaacgccgtgcccgtgggcagccgtgttcgcgtcaaacctggtgagcgcattgccctcgatgggctgatcgtcgaaggccgctcctccgtcaatcaggcgccgatcactggtgagagccttccggtagacaaggctgagggcgattccgtgtttgcaggcacgatcaatggggagggttcgtttgaattccgcgtcaccgctgccgccagcgcatcgacattggcccgcatcattcatgccgttgaagcggctcagggaagccgcgcgccgacgcagcgtttcgtcgatcagtttgcgcggctgtatacgcctatcgtatttgcggtagcccttgccgtggcgcttgtgcctccgctggtattcggcgtgccgtggctggactggatctacaaggcgctggttctattggtcatcgcttgtccttgtgctctggtgatctccacgccggtgagcattgtgagcggtctggctgctgccgcacggcacggcatcctgatcaagggtggcgtctatctggaagaggggcacaagctcaaatggctggccctggacaaaacgggcacgatcacacacggcaagccagcgcagactgatttcgctgcatggggcaacgccgatcctgatgcgtccagattgctggccgccagcctcgcagcccgttcagaccacccagtgtccttggcagtggcccgtgcagccgtcaacgatgggttgacaccgcgtgatgtagccgatttcgcagcgctgcctgggcgcggggttcgtggcgacatcaacgggcagatctatcacctgggtaaccaccgcctggtcgaggaactgggcatgtgttcgccagatctggagtccagggtgtctgcgcttgaagccgagggcaaaaccgtagtgatgttgacgggacaggaaggagtgcgggcgctcttcgcagtggctgacacggtgaaggacagcagccgccaggccattgccgaactgcaccgactgggcatcaaagccattatgttgaccggtgacaacccgcacactgccgctgccattgccagtcaggtcggcattgaccgcagtcgtggcaatctgctgcccgaagacaaactgcatgaagtggagcgactgtcggcggacgggaaaactggcatggtgggcgatggcatcaacgatgccccggcgctcgcgcgtgcggacatcggctttgcaatgggggcggcgggaaccgatacggccatcgaaaccgccgacgttgcgttgatggatgacgacctgcgcaagctgccgacattcgtgcgactgtccagtgcaacagctagcgttttgaagcagaacatcgccctcgcgctgggcatcaaggcggtgttcctgattctgactttcaccgggcaagccacgatgtggatggcggtgtttgccgacatgggggccagtctgctggtggtcggcaacgggttgaggctgttgcgccgatga

SEQ ID NO: 346166 - DNA, 1095 bp, Pseudomonas aeruginosa
atgaactggaaagccattctttacgattggggtggcttgaatagcgctctgtttcagctcgtctacgaggccacgccgccgattttgataccgctggcctggatcttcagcaacgtcctgggcaactactggactgcgcccctagtgatgctcggactgtgggcatggtcaagatcaacggcagcagccgatcacgccttggcaattcggcggcagcttcttcaattcgtgatcggcttcggcatcgcgattgcaatagcctccatcttgaaattttggctcgattttccgcgaccggcagcggtatttggccatttgaatcacgtgcttggcacagtggaggagcactatagcctgccgagcggtcattccacttacgccgcacttgttgccggggcgttgtggccgctgacaggtgtacgccaccgattggcgttagttgcttatgtcgttctggtcggctggtcgcgcattgctgcgggcatgcactttcccgccgacgtgctggccggctggggcatcgcctccggcagccttgcgcttgctggttcgctgttgacgatgctggcgagtgcctggaggctgacgaggctgcgggcaatcggaatctggtacggcttggctgccgcagtgctatttggcgatcaggtcgcaaaggccgccgtctcgctttttttcggctatggcgatcaagtcgctgtaacccctttcttcaatctcgtccacttgaagaacaacggcgccgcattcagcctgctggctggtgctggtagctgggcgcgtttcggttttgccgcgcttgcgctgggagtctcaatctggctgatccgcctattgcgtcaaggagtatctaaatgggaaggcgtgggttatagcctgatcttaggtggcgcgctgggtaacgcagttgaccgcctgttgcgaggggctgtagtcgatttcctcgatttccattggcacggagcgcattggcccgctttcaatttggctgacgttgcaatatcccttggcgcgatctgcttgctttcggccaccatgcaccaaggaaaacgggatgtcgccgtaagcggacaaattcctatgaaaactccatag

SEQ ID NO: 346167 - DNA, 306 bp, Pseudomonas aeruginosa; identical to SEQ ID NO: 333150

SEQ ID NO: 346168 - DNA, 1323 bp, Pseudomonas aeruginosa
ttgagcgcagtcgtcacggttcgtgagtacgctcgcctgacaacagccgccgtcgcgcccggcaacctcgactgcgcgcagatttccgaaagtgccttcgactggctctgtgagctgagcgccagcttcaaccgcaatggcgccacgctgctgcaggtggaggggcggcgcgcgctgaaatgggattcttacgtgggcgtgttggaaacgccctgtggcacgcggctggagattctgcccaagcatcatgaacgggacgattgtctggtcaagagccgccagttactgcgtaagctgattcagagcgccttgcagctcaagccgcgcgaggcttcggtagcaagcctggagctgttcgataagtcgctcagcgagtgggtgatggcgcagtttctcgcggagctggatctgctggtgaagcgtggcgtgcgtttcgattatcagcgtatcgaggaggagcagcgctttctgcgtggtcagctcaatgtcgtggcgcagatgcgccaaccgccggggcgccagcatcacttccagattcgtcacgacgtgttcctgccagaccgtgccgagaaccgtttgttcaagctggcgcttgagcaggtagcaaagagcacgcaggatgccgccaattggcgcctggccaacgagttgcgcgccatgctggcggaggtgcccgctagccggcaggtgagtcaggatttgcgtgcctggagccgtgatcggctgatggcgcattaccaggcgatcaagccctggtgtgagctgatcctcaatcagcagatgccgatagccgtgagtggtgagtggcgggggataagcctgctgttcccgatggaaaagctgttcgagtgctatgtggagggctggctgcggcaacgcttgctgcacggtgcgaaactgacctcacaagccagccggcaccacctgtgcgggcatgacagcggaaagatgttctgcctgaaaccggacttgctgatcgacacgccggagcagcgttggattcttgataccaagtggaagcgcatcgatgccggtaaacctgagcagaactacgacctgagtcagagcgatttctatcagctgtttgcctatgggcataaataccgaagaggcgacgaggtgccggggctggtactgatttatccgtattggtctgggctccagaaagcgctgccggtgtttgattacggcaagggcatgcagttatgggtgttgcccttcgagctagatagcggccatttactggacgctgagtccgctgggattcctttgcgacaggaacgtggggtcgttgtggagcacagtgaattaatggctgtttga

SEQ ID NO: 346169 - DNA, 1401 bp, Pseudomonas aeruginosa
atgagttctgagtggcgtgtagcgaaagtcgaggagatcgctgctccctattcaacagcattagcgacagggccatttggatcggctatcagctcgaagtacttcgtcgattcaggtgtgccggttattcgtgggtctaacctgagtgccgatacatctacaaggctcattgatgctgatttggtctttgtctctcatgagaaggcaaatgaattccagcgatcggtggctaagcgtggtgatcttgtctttacgtgctggggtaccatcaatcaggttggtctgattgatggtcgctcgaaattcgacagctacatcgtttcgaataaacagatgaagctaacgattaatcctgctaaggcggatcatcgtttcatctattacgtgttctccgggcctgctaagcaaaatgaaattctcgaaaatggcatcggcagctcggtaccaggtttcaatcttgggcaattgaaacgacacgaaatcttgctgcctccagttcaagagcaaatacggattgctgacttcttggagacgctcgacgaccgcatcatcctgctacgcgaaaccaacgccaccctggaagccatcgcccaggcgctgttcaagtcctggttcgttgatttcgaccccgtgcgcgccaaggccgaaggccgccagccggaaggtatcgacgccaccaccgctgccctgttccccgatagctttgaaaagtccgagctggggttggtgccgaaggggtggagcttggttcctttcggtgagttgttggctcacacgatcggtggtgattggggcgatgagtcgccaagcgacaaaaatgacacccgagtagcgatcatccggggtacggatattcctgatcttcagcaaagcgctgctaatcgagttccgattcgctacacgtcctccaaaaagctttccacccgaaagctccaagatggagatcttgtcttagaggtttctggagggagcaaggatcagcctacggggcgagctctatacctgacggatcacttgcttggtcagtttggctgcccagttgagcctgccagtttctgtcgcctgcttcggccagcaagcagagatattggcgttctgctgggccagcagctgacctatatctactccattggtaagacgtgggagtatcagaaccaaagcacagggattgcgaacttccagactgctcattttctagagagtgagctcgtagtagtgccctctcccgaagtgctttcggaattttctgagatggttcgtccgatgattgatcgagcccaccagtctcagattcgtgagctcacccaactccgcgacactctcttaccccacctgatctctggccagctgcgcctgccggaggcgcaggctctgctgaacgatagggatattgcccaatga

SEQ ID NO: 346170 - DNA, 948 bp, Pseudomonas aeruginosa
atggccgatcgcaacacttacacccaccgttcccaatccgacatcgccatccagatcgaacgactcgtccacgccatcgaacggcacgacagcccagcatttcgattcaggcaaacccgtgcaggttatgagcgagttgaggagaccagactctccaagtacttcgcctatatccggcagatgatggacctgttcgatgatcgctgtgagtaccgctacagcgagcacctgcaagcgttcagggatgcctgtcaggacatccggctggagcgtcgccttactgggcctgcttgcctgaatgaagagcgtacgacctggctcgatcatcaccgcagcatgaacgtcctagtcgcgcggatccgtcagttgactcgtgagcaatggtatcgccgtaagaagggtgaccgtcgctatcaagccaagcagcaggatgagcttgtctgtgactactccgatgctgtggttgatcgctattcgcgtaccaccatcgtcagggtcaacctctactactactcagaggtccaggccaggttacgtgtcgagcatgtgttcgatgatctggatcgattgatcgccgagcataagcgcaaccccatcttcgaccatctcactggctacatctgtgcggtggagcagggtgaggaccggggctatcacatacacgctgcctacttcttcaatggcaagaaggtgcgtggagacgtttacaaggcccagcagatcggtgagttgtgggagcgcatcactcggggccagggcaacttcgatagctgcaaccacgacaaggaaaagtacgaggacgagtgtggcataggcatcatacagcggaacgaccgagcgattcggcccaatgttcacaaggtggtgaagtatctcgtcaaggatgctcagcatctgcgcttaaggccagagggagctcgatgcctgcggatggggatgctccgatag

SEQ ID NO: 346171 - DNA, 642 bp, Pseudomonas aeruginosa
atgaagtggcaggtgaaatatgcgctggaaaacatccggcgtgaaagcggcgtcacctcggcggagcacgctgggggcgacgctattcgcatctcggttcgtgagcaacctgacgttttggctgtcatcagtgacacctataagatggatgccgaattggctgcccggtaccacgagcaatggccggagatggatttcctctgcggttatcgcaaagaatgcgtttgggagggtggtgcaatcgccttcctggaggacaaaccgatcggatggggaaattatggaacacttggatcggcaattccgaagggctcagtgagaaaagcatctcacaaaaactacgcattttcttaccgaatgattttgcagctacgttacgtaacgaacatccgtcgtgagttcgatcgtgtgttcagccttaccctttctagtggtcgctcactcaggatagggatgatctgggagtatgagccgacagcagatgccgtccgcagtctctgggacgatttcggtgcggtggacattgcgtggaacaccaaccccaatggatcgccagctccaagcgccattgaggcgggccgggaactgggatgcaaagtactgaagtgggaagacttgagggcgattttgctgaagggctga

SEQ ID NO: 346172 - DNA, 693 bp, Pseudomonas aeruginosa
atggcagatcgaaagcacatcccaaaggaaatcaagcttcggcttttcgcggaggcggctggccactgccagcacccggactgcctgcaacctctgtttccggctgagatgggaggtgacaagcacatcgcggagatggcgcacgtgatcccgcatggtgaaaaggggccacgtcatgaggagcgacctgctggcgaattcgaagccgactcctttgagaacctcctgctcctgtgccccagctgccatacgaccatcgacaagaactcaccctcgtacaaccgcgccacgctgttgatgtggaagagcaaccacctcgcggcactggccaacaagcaaggcgtgcacgcctatgaggagcgctcgcaggtcagaagcgccattacgactgccatggcggagaacaaggcgatctggaagaggctcgctccttgcgagggtacgagcttcgagtatgacccggagtcagagtcagcgaacacctggtcgcacaggatgcgcaacgtcatcctgcccaatcactttcgtatccaacgcatcatcacggcgaaccagcaccacatgaacgaggccgaacatgaggcctttgcccagtaccaggagcatgttcgagggctggttgaacgtcacgtttgtggcgtctccggccgcgctattcgctatccggtacaaattgatggaatttttgcatga

SEQ ID NO: 346173 - DNA, 1761 bp, Pseudomonas aeruginosa
atgaccatcccatcgcaagatgaaatcgttgtagccgctgctgaaggcagactgcttgatctgatttttaaggacagctggcggcacgatagcgcgcctttttcccaagctttgatcgatgctcatcaatcaaaggagatcgatctccgcaccctgctccccctgcctgagctgccccgcttttccaacaacgagatttatctcggtatggaggttttcctgccggcactgggcgccattgcaaccggctgcgaggatttgcttgaactgatggcaggggcaattcctcacgaagaccccatgctcagccactcctcgtacgccgagatattgaagcggtgccaagcctcaccagagcgcctcatcgagctgctgcaactcatcaagtcggacgccccgctttctcaacgattccattgtgtacaggcatgcatcagtgccggactgcaggtagatccagatttctacttgacccaggctattgagtttctcgaacagggtgatgcccttcagcgcgcccaagcagccagggcactctgtaatttgtctgctggagtacgggacacgaatggttatctgttggaaaccatcctcgctgtgctcgagcgtgagaccgagccttccgtgcgaggcgcgctcctcgccttggcactggcctggcaaaaggatgctccggttgagctcgaacgatcgacgtacaggctgatcgagcgatccgcctgccccatcactctggaggcaaaaaaagcgatcggccttgcattgatgggaatctccaatggttacagtgtccaagttcgccgcgatctccttgcgcttctggcttcaggtcagccagaggacgaaatcgtcacgttgctggacgtcgtcttggccggattgatccggaaaggtgatgtatcagaagctcggggcgtggtcgagaagctgatcctcggtgttccggccgtaccattcgctcgtttcacttccgtgctgcatgagcttgagagcggagacgctgctgtcctggacaggtgggtggtgagttggctgcagtcagagtcactggatctgagtctggcactcaggcgcggcctgttttcagccagtgaggggcgggtgttcacgttcgacttcagacaggcgctggacgtaccggaaagcgattacctgttcatcgcacgcaaagcgcttggcatctttttctcgaagcccgtcttcattgcctccctgttagtcagcctaatgcgtaacgccacggatgcgactttgggtgcgctggggggcctgctgttcgatccagtgctgattaactaccccgggttgcgatcagattacctggacgaaatcgcagcaaatttctcggatccggcttcgaaggcagtccagcacgcattgcaagaactgcagggatacttggacgaccttggagacgagcacatccgcgagctgcaaccctcggagcgtgagcgtcagctggagcatcatcgacgtaatgaagaaatgcaaaatcagatggtggaggctcgcaagtcttcagtcttagcgagtctggccagcgaaaaaattctgctttacggcactggcatggccagctgggtgccggagtttccacctccacaggaaatagctgacggtggaacggggccaatgcgccgcattgagcaatcgctcgccactattcagcacaccttccagctacctcgacattcggttcttgagccctccacgctagagctccagatcctcaacttcttgtatgaggggcgctcgcaatga

SEQ ID NO: 346174 - DNA, 1878 bp, Pseudomonas aeruginosa
atgaaactcgtcttccgtgagtatctcgcctcccttcgtgaacgtaatgagctggacgtcgttttgcccgatctgttaagtgagctgggcttcaatgtcatctcacgtccatcgacggggccacgccagttcggcgtcgacgtcgccgccgtaagccccatggtcaacggcgagcaaaagctctacctgttcacaatcaaacagggagacctgacgcgagccgagtgggatgcggtgccccaaggtgtacgcacctcaatcaacgatatcatcgacgtatacattcccaagcggatttccgcccaatacgagtcattgaagatcgtcatctgcctatgcttcgggggcagtgtgaaagaggctgtgagagacaatctgacaggcatgatcagcaggcttagtagtgatcggatttccttccaggagtggaatggcgattacatggcgggcttgctcgctgatggattattacagcaccagcatgtgagcaagaccctgcagtcgcggttccagaagtccattgcaatgctcgacgagcccgacgtttcagtccagcatttcaccgcactcattgaagggctcgtgaaggccgacaacctagaagctctgcagcggctcgccacactgcgacaaatgtatatctgtctctcagtgctgttcgtctgggcacgcacgcaggagaacctcgaagccccctaccgagccagtgagctggtcattctgcgtgcatgggagctggtgaagggtgacatcgaagctgcatcggtcggacacacgcgcatcgggctgaccttcggcgagctgctggatctgcacaaaaaaatctgggcagagctgatggaagataaagtcctgccgctcacagcaaagcgagatgcgcttgccagctccgtaaacactcacagtgctgtggacatcaacctcaagctgtttgagaccttggggcgtatcgcagtaagagggctgtggattctctggccccacttggacggtaatgggccgcgagtccttgaagcctccgaggtaccggaggatgcctccaagctcgctctgcacatcgctgaactgatcaggaataatcgtgcactgctctcccctattgccgacgagcaagttattgagatcacttgcgccttgatgtttctgtcgatgatgagagattggcgaagctatgcgcaggattactgcgacgaacttctgagctactaccatttcaatttcatcaagcatcatcggtacccgaccatccatgccagctatcaggagctgataaggcacccccaggccaggactgaagagtatcgggtgcagcatacgaagggcagcgttctcattccgatcatgatgctctgggccactttgggtggcgaaacggggtctagcgaacaattctctcgattcgtacgaagcgagatgaaccattgcaatcagcagctctggatgcccgggcctgacaccgaggctgtcttgtatctcagtgatccctcgcatgggctagcgctgtgtgacatacccatcactgctgacggctcggcagccagaagtattctggagaaggaatgctctgaggattggcactacacgcgtttgtctgctgttcgcctaggacactggccggtctttgtgatggcttgccgtcatagtcggcttccactaccaccgcagctctggttcccactagtgatcaaggaagaccctgcttcaagccttgatgcggattcctggcagcctactgccagcactgtccgggctcactcggcattctggttttcgcgccgtgtcagcgcaaacctaaggtcagaggtggataaaacgattcacttcgtttcattgccaaaatgggaagcggaaccactgagtaaaatcaacccttcgtga

SEQ ID NO: 346175 - DNA, 1335 bp, Pseudomonas aeruginosa
gtgctgtctctggcccgcatcgagacgcatatctacgtcggctatattgtggtcgcccttgcgggcatcccggtcgtcaacgtgagcttcgacaccatcgagttcgaccaggcccgcgcccagcagtgccagtacaacctgccggcgccggcagacaccggctggtcgacctccttcagcagcctggccggcaagagtgcgcagatgccgctctggtgggcgatgatgcacgccctgtccaagggcttcaccgccggcgcggtcgcggccattccgtgcggcacggatctgcggcagatgcgaatggaagtggacaatacgcgcgtgaacaacccgctgctggcacaagaaatcgctgacttttccagggactgctacggaccttcccgtgcgcggctgttcatgcggcaacccgatctgggctccgtcggcgaggacaacaaggcgctgcaggacctgaactggatcggctcccgattcctgttgaacaccccggggtactacgacaccgactactcgaagagtccccgtcagtcgtggccctacaacgccacccgcgacgccgggctgccccaggtgggcggtggtggtggctacccaacctgcaagcagtggtgggctgactcagggatcggcttgcgtgatcggatcaagggccaggtggatccggacctgatgaccagcttcctcaagtgggcgaaatggctgaaccaggacgaggtaaccgaggcagtcattcgccaggtgatctccccctccagccaggtcaagggcaacgtctataccgattacggcgggcaggttggcggcaccgtctggaacggcatcgcgagaaccgcaggaaccttcggcgttgccctgggcagcctggcctatttcccggcgatggatatggtccgccaagcgctgccgatggtgatgtcgttcctcaagatggccatggtcatctgcattccgatggtcctggtcatcggcacctatcaactgaaagttgccatgacgatgacggtcgtcttctttgcgatgatgttcgtcgatttctggtttcagttagccagatatatcgatagcacgatacttgatgccttctatggttcgggatcaccgcatctttcatttgacccagtcatgggactgaatacggcgactcaagatgcaatcttgaacttcgtgatgggggcaatgtttattattctgccacttctctggatcacagcaataggctggtctggagtacaggcaggacaagtcctccaaggcctttcccaaggcaccaaggacgtccagacagcaggtggagaagcggcaaataatgccaaacggcatatattctaa

SEQ ID NO: 346176 - DNA, 351 bp, Pseudomonas aeruginosa
atggtcaagtaccgcatctcccatgatgctcaggcggacatcatcgacatcctgcgcttcacccacaaccgcttcggcgatgccgcgcgccgacgttaccaggcactcataggggcggcgctggaagcagttgcgacagacccacaacaggtaggcagcatcagccgtgaagaactgggagcgggcctgcgcagcatccacctcgtttactgccgctcgatgcccaacattggtaaggttgttcggcccaggcacttcgtcttctaccgggttgcgacagaccaggtgctcgaggtggttcgcgtgcttcacgactccatggatctggatcaacacctgccccaacgatga

SEQ ID NO: 346177 - DNA, 939 bp, Pseudomonas aeruginosa
atgaccagccacaacctccgccgcctggtagcggcggccgccaccttcagcctctcgttcacggcctcggccgcgatcaacagcgcggccatcgtctcctccaccctttcccctcagtgcctcgaatacaaggtcgtcgggatctgttactggctgctctgcggcccgcatggctgcaaagtgaagacgtcggtcaaggtccgccactacgtgcctgacgcagtcgtctccagctacgcgaataccgggagcaacccctggaccgaggtgtcggcgctgggtacaccgaatccactcgcccaggccggcaatgacgcgaccaccaactacaaggccgagaacagcatcggccgcttcaaggaagcggatgtgatcggccatcctggcggggccaccttcagccggttcgccagcgcctctgggtacgtttgccctggcgccaccttccctctggtgccgtacttcctcagcacactggatgccattggctggcggcatggaattcccgagcaggtgtaccccgaagcgttgatcccagggctgcgcgaggtgggtggaatcttctccggcgacatgtgggggaacctctatccgcgcagcggcttcctgcaccagaccgacgactacaagacggcagccgtcatcgcccagcgcgccggcgatatcaccacgcgaatcggccagctccacgtctacctccccatgcgcgcagcccccaaggacggctactggccggcgggcgagctgaaagagggcgatgcctcgaccgggaaatggcaggagctgaccccatccctgagcctcaactgcgcggtgtttcccaactctgggccgaagacgcaagccgtcgacggcgattacgcctgggcgctctggcgtccctactcctgctgccagcgcaaggggcagatcttcctcggcagtaccgacttccaataa

SEQ ID NO: 346178 - DNA, 741 bp, Pseudomonas aeruginosa
atgtccatcgcgtgcagcgttgccggtggcgaccttatcgggcttgctcccgcgcacactggtcgcgtggtctatctggccggcgaagatccgccgccggcgcttgtgtgccgggttcatgccatcggcaagcacctgagccagcaggcccgcgaagccatcgcggagaacctgacccttgagccaatcatgggcggtcagtgggacctgatggacacgaaatggcaacgccgccttatcgaaagcagcgccggggcacggctgatcgtgctggataccttgagtcgaatccatacccgtgatgagaacagcaacggcgacatggcccgccttatcgccacgctggaacacgtcgcggccagcaccggggcatctgtcctgtatctgcaccatgtcagtaagggcagcgcccgcgaatgccagaccgatcagcagcaggcagcacgcggggcatcggcgctgatcgacaatgccaggtggtgtggctttgtcgagaagatgaccgagaaagacgcggcacgtttcagtgaccgtgcctttgaccgtaagcccattgggaacgagcggcgcggacatttcgtgcgcttcggcgtgtccaagcagaattacgacgctacgcagcttgatcgctggtactcgcggcatgatggtggtgtgttgctgccggtggaactggttgaggtgaagcaggagggcgaggaccggccccgaggcaagggttatgccgcagccgcgtattag

SEQ ID NO: 346179 - DNA, 1029 bp, Pseudomonas aeruginosa
atgccgcagccgcgtattagaccggcctacgcccggttcgatcccgcccatgcgttcgatggccttttcgtgcctaccaagggcaagaagcgaggccggttgctggtagagccgcgccgcttcggcaagttggaagtcggctttcaggggttcgagcagcttggggcagatgaccaatccatattgctggccctgaccgcccagcttggcattgacgggctcgtgattgacgctgccccagcagggccgatgagcaagcagttacgtttcgctctggactttcgccaagacgatggcgctccgctgttgagcaagcggaccagcttgagaagcctgctgatcgatgccggatataaagacccggagagtggcgctgcgctggcaagagcgaaagagagtctcaaccgcctacgagcggtacagatacgggagatcgaccgggaaacgggctgggatcgagcctgcaacctgatttccgtcagtttcaaccacaagaccggggaaatctttgttgcggccaatcctcgcctcacgggcgcggtttttcgagggcagcacgtcaaagtctccctgttcgagcgcaatgaactggaaagcgaagtcgccaagctgctgcattgttggctttgctcgaacatccgacttggccgggcgctaggtaacggcaatggagcgcacctcgacaccctggcgcctcatgtgtggggtcggtcggcgtgggatggcttttccaaacagagccgcagccagaagcgtggccagttgcgcacagcattggaggaaatcgcagaccgcacacgcggtctgcaaggtggcatgggctgggccatcgacttgaccagcaccggactggcgatggtgagccgtccgaaggaactaccgtttcttgaggggcagcacgatatgaggccaagcgattccgtgagatcgcggtccatgccgcccgaaacgcagcccctcgactggcaggattggaccccaacgggatcgacgcacccccggcgcaaccctttaccatccccggcctaa

SEQ ID NO: 346180 - DNA, 306 bp, Pseudomonas aeruginosa
atgaccgagtttctgtacaccttcggaattgtgtttgtcctgttcgccatcatgtatctcctaggctgctggctgcgcgcgcgcggccacggtcctaagctcgatgccatcgccgacaagatcgaggctgcacgcgggttcgtggcggatcgcatcatgatcccgctcgggttcggaatgctcggcgcggcgcgggccatccatagcgtgccgctgctgggttccaagcagtcggcccaccaactcgcccagctcgtggcccagctccgggaacagcagcaggcgcaacagaagcgccggcagtaa

SEQ ID NO: 346181 - DNA, 1617 bp, Pseudomonas aeruginosa
atgaagcgctcactgcttctcggtttgaccgggattttcctgtcccttctcgcgggggccacgcttgcacaaggcgctaatctgacccagcccgacacgtcgatgcaaagtctgctggacttgatcgtaaacgcgtcgggtcaatggaccggccgcctcgaaggctacgcggtacggctcttgttcttgctcgcagcaatccagttcgtttggaatttcgtcccgatgctctttcgtggtgctgatctgggcgaaatcgcgcatgggctgattagcacggtgctggtgacgggctttttctatgccctcatcaaattctccccggaatgggcgcaggccattgtcgagagcttccgcaaagcgggcgctcacgcttccggcctcccaacggaaaagctcatgccgggcgacatgttcgcaacagcggttgagttttccgagaagatgatgagcggcatttctgtatttagccccgctacatcgttcttggtcagcattgccgccatcatcgtgctgctgtgcttcgccttcatcgcagcgtttatgttcgtgacgctcgttgaatcgtatttcatcatcaatgctgccgtctttttcttcggcttcggcggctcgcagtggacgcgggaatacgccatcgcgccgctccggtttgctgttgcgattggtgccaagctgttcgtgctgacgctgctcgtcggcctcatcatgtccgtcgcatcccaatgggaagccgcctaccgcaacgacagcgcgtcagtactgaccctcgtcgggttgtccttagtgtgcgcctatctcacgaagtccctttcggagctggtgcagagcatgatttctggcgcctcgatgggcggcggccacgcgattggcagcatggccgccgcaggtgccgcaggcgcggcggcagcggtcgccaccattgcgaccgcaggtgcggccgctccggccgcagcaggtgccctcggtgcagggggcactggcggcgctgctggggccgcaggcggggcggctggtggtgggctggcgagcctcatcaattcgagtttcgccgggcaagccggcgcggcgtcggccggaagcacggcgggcggcatggccagctcagccggcagcaacgcggcgaaggcggctgcgccgcgcctcggtggtggagcggccagcaacccggcccccaagccgaccagcagcggcatgaatcaggccgccgccaaggcggccgccggccaggtaccgcagaacggcgaggacaagagccagatgcaaacgcagcccgctccggctccgttgtctgacagcggccacagcaaagcccatacgctcgcctccggtgcggttcgtatggcgggcgtgctgtcagccatgtcggttccgggaatggaaggcgcggcaggcctgtcgctcaacgcaccggccgccggcagtgcaggcgaagcctctaccgaaaacgcgagcgtggcggatgaccccgaaaacgttattcgcccggcgagcgccgcgcccaccgaggcgaaggccacgccctcgccagcggcggatgcaccgaagccagcatcgtcccttgcggctctgcgcgtccccggcatggcctcgtaccctaatcctcaaggagcctga

SEQ ID NO: 346182 - DNA, 765 bp, Pseudomonas aeruginosa
atgattactcttttcaagaaaatcacccccgccgcgctcaccggtgctatcgccgccggcatgatgggtggaacggcaacgttctatgcaccgccagcccacgcaatctactgctcgaactgctcgaccgtctggaatcagatgatggagtacgccaaggcggtcgaaacctcgatcaacacggcgaagcagttgcagcagcaaatcaacatgtaccaagacatggtgaagcaaggcctgtcgctgcccaacagcatgttccagagcttccggaatgatctggcgcggttgcagggcatctacaacgacagccgggcgctcgcgcactccatgtcgaacctcgattcgcagttccgcgaccagttcaagggatacgacagctatctcaagagcatcgggcagggcaccaacaacatgcccgaccgctaccagaattgggcgcaatcaagcttcgacaatgcgcgcacggcgatggaatcggtcggcatgaataccagcatgttcgcctccgaggacgccatcattacgacgctcgtgcagcggtcgcagagcgcgcagggccgtttgcaggcgattcaggccggtaacgagatcgcggcccagcaggtgcagcagctccaaaagctgcgcgaaatgatcgccaccaacgtcacgctgcaaagcaactacatcgcgcagcagaccgaacgacagggtgtcaccgatgcggccgatcaactgttctggaatgttaagagcgcgcgtggcggtgcgaaggggtactaa

SEQ ID NO: 346183 - DNA, 309 bp, Pseudomonas aeruginosa
atgcgctacttcgtgagctacgccgcgcaccgccacggcggcggcggctttttcggaaacgtcatcgtcaactcgcgcatgatggaccgttggaccgtcgccgccctcgccgatgcgcaacgcatcgcgccgggacacgtgctgcgcgtagtgatcctgtcctatcacccgctcggcaccatgcgagcgaccgacgttatcggctactggctggcgacaaaaatcgaaaaagtattcaggcggcttttccgaacagataggccagtttggattgcgcaatccaaagagattgcccgtataggcggataa

SEQ ID NO: 346184 - DNA, 219 bp, Pseudomonas aeruginosa
atgaaaagtcagacctacgaccgagtgcagtcgctagcggcgacgataaacgagctgcaagcggccattggccgcgccgatctgttgaccgcccaacatctcgccgcatgggcggcggccgaactcgaagattggcaactggccctcctgcacatcccgccgaccgaacgctcacgctacgtctcggccaatccctatgtgaatcaaaggagtctgtga

SEQ ID NO: 346185 - DNA, 402 bp, Pseudomonas aeruginosa
atgcaccaaaaggagggcgcgcagcgcatgtcagatgacacaccaaaagggatagccgagaggccacggcggcaggtgccgccgatcaaggtatgggtgacggacagtgagaaggcagagatagccgaccgggccgcgcaggccggtctatcgctgtcggcctatctgctggcggccgggttgaaccacccgattcggtcggtgctcgacctgcgggcggtcgccgagctgggcaaagtcaacggcgacctcggccgcgtcgccgggctgttgaaactttggctcgcggagaagcgcggacagggtgcccggccggtggacgtggaagccatgatgaacgactttcgcgccctgcaaaccgagctgcacacgatcatggggagagcggttcggggcaagtga

SEQ ID NO: 346186 - DNA, 156 bp, Pseudomonas aeruginosa
atggccgacctgtttcgggatgacccggaactcgcggctgccgccctatccgcagtcgagtcagatggcgaccacgcggaactcaccatcatccgccgtcaattggtcaacgtcgccgggttggcaccaaagggaagaaccgaaacgcaatcgtaa

SEQ ID NO: 346187 - DNA, 204 bp, Pseudomonas aeruginosa
atggaagtcaaattcagccgctacgacacggcggactatctaaagaccgaggatgacattgcggcctacatcgaagccgtgatggaggaaggcggcgacgatccggcctatgtcgcccgtgcgcttggagacgtggcccgtgcccgtgcccgcaacctgagagggctggacaagactctgccgggcggcggcaaacagtcatga

SEQ ID NO: 346188 - DNA, 201 bp, Pseudomonas aeruginosa
atgaagaagcaaggccgccccggcccgtcgaaaaaagaggccgccatgccttctaattccggcgggggtgttctgatgaagcgtgtgaacttcctgctaccggctgaccaacacatgaagttgaaggtatatgccgcccagcgtggcaagacgatcactgaacttttaactgagcacgtcgagcagttgatctgtcagtag

SEQ ID NO: 346189 - DNA, 1149 bp, Pseudomonas aeruginosa
atggctaatttctatgagtttttcgctggcggcggcatggcccgcgctggccttggccccgactggcaatgcctgctcgccaatgacttcgacccgaagaagggggccgcctacgccgccaattgggggggcgatcatctgcgcgtcgccgacgtggccacgctgtccacggccgatctgcccggctgcgccgatctcgcctgggcctcgttcccgtgccaggatctctccttggccggtgccggcgccggcctcaagggcgagcgctcgggcaccttctggccgttctggaagctcgtgaaggcgttgggggaggagggccgccctccgcgcttggtggtgctcgagaacgtctatggcgccctcagctcgcacggcggcaaggacttcgccgccatcggcaccgcgctggccggcgcgggctatcgcttcggcgctgtcatcatcaacgcggtgcattttgtgccgcagtcgcgtccccgcctgttcatcgtcggcgtgctcaagacgatgcctgttccgggcgcgctcgacgccggccagccagatgacgaatggcacccgccggcgctggtggaagcctacggcaagctctccaagcggtcgcaaaacgcctgggtctggtggcgcctgccggcaccgccggcgcgtgcctcgatcttcgccgacctggtggaggacaaaccgcacggcgtgacctggcacacagccgccgaaaccaagcggctgctcgacatgatgagcccagtcaaccgggcgaaggtcgaagcggcgaagaaagccggcggccgcatggtcgggacgatctacaagcgcacccgcgccgatggcccaaacggcgagaagatgcagcgcgccgaaatccgcttcgacgacgtggccggttgcctgcgcacgccggcgggcggctccagtcgtcaaaccatcatggtcatcgagggcaagcgcgtccgctcgcgcctgctgtcgccgcgcgaagcggcgcgcctcatgggcctgccggattcctacttgctgccgaagacgtacaacgaggcttatcacctggccggcgacggcgttgccgtgccggtggtgcgcttcctcgccgagcatctgcttgagccgttgcttgcggccgctgcgccggccgaaaggaaagcggcatga

SEQ ID NO: 346190 - DNA, 930 bp, Pseudomonas aeruginosa
atgatggcggatttggaatcggcgctccaagccttcaacaaggaacggaagttcagtcgcaaaggcccgctgtgcgtggcgctggtcatcactcagcacgcgcgcaagatgggcctgccgctcgatcccgataagctgctgaccgaagccggcggccaggttctcggcctgggcaaaggcgcggtgcaagccgtgcttaaccgtcacggaatctcccgcgttctggcggccgaaggcgggcgcaccagtcgcggcagtatcagcaacatgcgcgaatatgtggccttcctcaacggcctgcccggtgctgtcgacctcgatgccgtcgaagccttctggatcgcgcgcgttcatgagttcttttcggctaagcccttcaagattcggcttgatgcctcgcgtagcctgcgcaccctagtccgcgacatggttggccaggccgaggaacggcagcgcaacacgcccggcatgcagtacgctggcgcggtgctgcaacacctggtcggcgcgaaactggattgcgccctgggggctggcaacttcgagcacaacagcttttcaacgtcggacgcgcagtccggccgggccggcgacttcttcatcggcgatgtggcgctgcacgtcaccacggcaccgggcgaggcggtcattgggcgctgccgcgacaacatcgatgacggctaccgccccatcatcgtgaccacggcgcgcggcctgaccgccgccgaagtcctcgcggaaaatgccggcctgggtgagcgtatcgacgtgttcgaggtagagcagttcgtcgcgctgaacctgtacgagttgggcaagttcgccgccgaaggccgccgcgtggcggtcggcgagctggtgacgcggtacaatgaaatcatcgaagaagtcgaaaccgatccgagcttgaaaatcgagtttcggcaatga

SEQ ID NO: 346191 - DNA, 138 bp, Pseudomonas aeruginosa
atgacacgcgacgctcgccacctcgtcgagctggaagcggctggctggacgcccttagtaatctgggagtgcgagactcgcgatctgcaatgcctcgtcgcactggcggcgcgcatcaaagcgagcgaaaaggcatga

SEQ ID NO: 346192 - DNA, 378 bp, Pseudomonas aeruginosa
atgacaatagtcaatccgtacggcagaaaaacaacatatcactttcaatttatccaaggtataaaatacataacgtctatcgaaggcgaaccctcgcccaactgccccagcagcaattccaccttcacctacgatgaccagggcctgctcaccagcaaacgcgacaacaacggcaacctgaccacctaccagtacagcgcccgtggcctggagacctcgcgcactgaggccgccggcaccccgcaggcgcgcaccatcacaaccgactggcacccgaccctgttcctcccggtgcaggtcagcgagcccggccggatcacccgctaccagtacgacgccgagggacgcaagaccggcgagaccgtcaccacccgctga

SEQ ID NO: 346193 - DNA, 2463 bp, Pseudomonas aeruginosa
gtgccgctccacctcatccgccagatgttgcgcgctccactgtccggcgtcgccgagcaggacccgggctcctgccagcaggggtacgaagagttgttcggcagcggcatcgaaactgatcgaggcgaactgcaattggcagtcgccagggccgacgccgtaggtccgtgctgccgcctggcagtgcgcgacgagcgccgcctggctgaccgccactccttttggctggccggtcgagccggacgtatagatcacgtaggccagcgtctcgccagctacctccggcagcggccgcgtatctgcactcgccggccaggcggcggtctccagcggcagccgctcgacctctgccgggcagggcagccgctccgccagggtttcctggcagatcagccagcgcgcgccgctgtcgcgcaacatgtacgccaggcgctccgcggggtagttcggatccagcggcaggtagccggcaccggccttgaggatacccagcaggccgacgaccaggtcgaaggagcgctcggcagcgatcgccaccagcgcttccgcggccacgccgcgcgcccgcaggccacgcgccagacgctcggcgcgcatatccagttcggcatagctgagatgctcgtcgccacataccagcgcgatcgcctcaggcgccgacgctgcctgatgcgcgaaggccgccgcgacgccgccccgcggcagcgcctcgagcggtgcctgccaatcccgcagcgcctcctggcgttccccggcgtcgagcagggccagctcgcccagcgctgcctggggggtctcggccatccgctgcagcagatgcagcagatgacggtccagttcggcgatgtccgctgcgtcgaaatcgcgccgcgcatagacgtactgcaggctcaggcgctcacccagggtgacacccagcgtcagggggtagttggtctgctcgtggttgcttggcgtggagaactccagatcggcgggagcctggcgcagagcctcggccacggggaagttctcgaacaccaggatgctatcgaacagagcctcgccgccatgcccggcccagcgctggatgtcgtacagaggcgtatgctcgtgttcgcgcagcgccaggttgagcgcctgcatcccctgcaggtagtccgcgacgctctgctgtggctgcggcgcggtgatcaccggcagggtattgataaacagaccgatctgcgcctcgatgcctggcagttccgccggccgtccggccacggtggcgccgaaggctaccgtctcctgcccgcagtgccgctgcaggagcagcgcccaggccgcttgcaccaaggtgttgagcgtgaccttctgaccttgggcgaaggacgccagttggcgggtcgtctgcggatccagttcgcgcagatgctcaccctggccaggctgctccgtcctcgtctggcgcgccaggcgtgtcggcatctccagggaggccagccgatcgcgccagaaggactcggtcgccttcgcatcgcggctctgcaaccaaccgatgtagtcgcggtaacgcccaacgggagcggctacctcctgccccgcatagcgctgcagtacctcggcgagcagttgggcgttgctccagccatccatcaggatgtggtgatagatatagatgaggtgcatccgcccattcgccagcggcaccaacaccaagcgttgcaacggcgccctggccgggtcgaaaccggcttcgcgctcagcctctgcctgccgttgcggatcactgcctggcggggccagccgcagctccagcgtcgcctgctcgaataccacctgcaacggctgaggccagccgtccttccagaggaatccgctgcgcaggatctcatgggcatcgagggtggcctgccaggctgcgcggaagcgatccgggtccaatccgccgatatccatgcgcaactggttgacatagtcgccttccgttccatgaagactgtgaaacagcatgccctgctgcatcggcgacaacggatagatgtcccgcaccgaatcaggatccaaggacaattcatcgagctgcgtctgggaaagcccggccagcgggaagtccgacggcgtcacaccccgatgccgcgggtcgagacaatgctcgatcagcgcgtgcagctcccgcgcgtagtcatcgaccaggcgctggacggtcgcctcggcgaacatttcccggctgaagctccagtgcaggctcagctcgccaccgtagacctggccttcgatgctcaaccagttggccagcggggcgcacggatcctgggcggcgccggcgctttccgtggccggtaccagcagcgccgccccatcgaactgacggtcgaaccggcccaggtaattgaaggtgatccgcggctgcggcagcgcggccaggcgggccgcagcctcctctccagccaggtagcgcagcaggccgtagccgacgcccttgtccggcacgcagcgtag

SEQ ID NO: 346194 - DNA, 339 bp, Pseudomonas aeruginosa
atgatcgaagagctgcaagtcggcgcccgcgaggcggtggccaccatgaccgagagccagcgctacagcctggagagcgtggagatcgccaaccgtgccggcgaaagcctgggcagcgtgacccggcggatcggcgagatcgacgggatgaaccagtcggtggccaccgccaccgaggaacagaccgcggtggtcgattcgctgaacatggacatcaccgagatcaacaccctcaaccaggaaggcgtggagaacctccaggccaccctgcgcgcctgcggcgagctggaaacccaggccgggcgcctgcgccaactggtggacagcttcaagatctga

SEQ ID NO: 346195 - DNA, 291 bp, Pseudomonas aeruginosa
atggccgccagtccctactacctgcgccaaacccacgccccggactgcgcctgctctgtgtgctggtccgcaaggcaggccatcccattgcacaacccgtcgccgtgtccggactgccggccccctgggctgccctatctggaagatggccgctggctctgccgtccccgttccttctgcgcgaaacacgacccgtcccggcgtccgccgaagtactggcacgttgtgtacgacagcgggaaacccacgccctttgtgcccgtgcgcgaagcattccatctggagggctga

SEQ ID NO: 346196 - DNA, 276 bp, Pseudomonas aeruginosa
atgagcaagccattcgatatggagttgttcttggctggcgtgctgaccggttcgcacgccactcggcaacgccatgtgcgacaggcgaaaatcatccaggctgagattgcagagcgctgggagctagagacgccttgggcgtggcagagaaagcatgtggcttggtttcttgagcatcgcctacgtcgacgcagcaaggacgcgcgctattactatttgctgaccgtgcggctgctcactcatcgtttagaaaaatcatgggtgttctatctctga

SEQ ID NO: 346197 - DNA, 987 bp, Pseudomonas aeruginosa
atgaatatagatcttccgaaacgctttgaaaaagagtacctagagccttttttcaagctactggatgatgcaaaagatcacccaaagagagtcaccataaacctaggaacccttgagttttccacgccaatagcaatgttagttgcgggagtcgtactacgtaactgggtcagctatcggaagtcactgaatcttgacacatggcgatcggaggtaaaagaaaacaatcaagctcactcgtatttaatgcatttaggctttttcgacttcataaatattcaagcaggaaagaaggttggcgaagcgaagggatctcttacatatctgcctatcaagattataaaaagaccagataaatctgcagaagtcaatggcaaagacgaatggtatgcgtctatagagtcgatagctcgtggtctcgcaggcgtgctggccggatcacatgatgacagcaaagagctaagagtttacacctactccatcagagaaattgttagaaatgtttttgagcactcaggagtggatgaatgctgggtatgcggccagcgctgggcaaatggcactgcagagttcgcagtggttgatgagggcattggtatatcaagctcactcagagacgttctcaaaattgagagtgacgaggaagctttgacacaagctataagccctggtgttagtcgaacaataggcctcagtgaagagaaaaacatttatgacaactctggttttgggctttatatcctgagtcaagtcggaagtaatttcggatggttcgcgctgggtagcggccaagccaaactaataggctcgaatcgcgagttcattacgtcaaagttcttgtttcccggaacgtttgtaggaatgcggctaaataaaagcccatcagactttagagagttactgagcgatattgttagcgccggagaacaagaggccaagctttcaggtatagagagaaaggcatctgcagcctctaagatcgcgtga

SEQ ID NO: 346198 - DNA, 999 bp, Pseudomonas aeruginosa
atggctaccacagtaatctctgctttcaatgagttcttgaaggaaaaagttaatctggatccggaggatacaaaggcagcccgactggatagggataacctacgtacacgtatccaagggcttcaaaattcagtcgactatttccctacactttacaccgaagctgacataaattacgggtcattttctcgccgcacaaaaaaaagaccactagatgacgtggatatgtttttttgtttaatggctcagggcgccgtctacaatgattatgaccaaaataacattacagtgacgattgaaaatacagccagcaatctttatcaatatacgaaagatgacaacaaaacgataagctctataaaaatacttaacaagttcaagagaagcttggaaaacatctatcaataccgaaatgcagaggttaacagaagacaagaagttgtcctcttggatttaacaaacaaagactggtcttttgacattgcgccgtgctttagaactgtcgagcagtacggcaaaagcttttatctcatcccaaatggaaccggggattggaaaaaagccgaccctagaattgataaaaatcggaccattacaatcaaccagcaaaacaatggaaacatacttaacctaatcaggattattaagtattggaacaaccgtgcgaccatgcacacgatgagctcttatttactagagaacattattctcaattattaccaataccgcacagactgctctagctttgtagatttatcgctggcggatattttccatcatatatccttagcggtatatcaagtagttcctgaccctaaagggtttcaaggcgacttgaacaacctaacatatgaacagagggttagtataagtacgagagcccatcaagactatctgaaagcacttgaggcgcgccgactagagcaaaataaagatgagcagtcatcaataaacaagtggcgcgaaatatttggcttggaatttccggcttacgggtga

SEQ ID NO: 346199 - DNA, 933 bp, Pseudomonas aeruginosa
atgggcattagaacacagcaaaatgagtacgcctacattcagaggcttgcctcattccgacgcttatattcgatagccaaaaaatacagcaatgggtatgtgatgctcaatgtcgtcatgatgacgacgttgacgctgctatccatcggactaaacagtgaagttcttgccaagaaatttggcttcactcaaacagattattctagctggctagcagttatttcaattattgtccttacaatcgacaagctaataatagcggacaggatagacgtccacagagaaaaagccgcaaaaatccaagagtcgtttgacagaggattattcaaactggactggaatgcaacacaggcggggcctccccctcgcgttgaagatattgtaaggcacggagagtggtacttaaaaaaacacaaaattactgagcttcttgattggtatgccataaagtcagacctcgtcccgcattattttcaagttttaatctgtcaaaattcgtcgctatattgggacgtaaatcttagagagaaaataaactacgcggtcatcgttggtggcgtaattgtcctagcaagcgcgcttgcgctgtgtatgtacttcgatctttcaacatcggcaatacttaccaatcttacagccctacttggcccaattcttgactacggttataacaccctaaaggaaaacaaagcctctattgagcagtctcagagactactagatagcattgagtcctccatcgctaatgcagaatcaaacccaagcgaagattctatccgtcgctcagtatattccatacaagaccaattgtttgttaaacgaaaaacagattggttgattccagatttattctataaaattttccgcgaatcagacgaaactgtcatgcgcctctccactcaacaacttgaggaaaaattcacagctcgttga

SEQ ID NO: 346200 - DNA, 843 bp, Pseudomonas aeruginosa
atgcaggcgcgaactggcatctccgagcgtcgtgcctgtcagttgatcgggctgtcccgctcggtgttgcgctaccagccgcgagccagtgtgcaaaacaccgagctgcaagcccaactggtggaactggcccaagagcgccggcgctttggctatcgccgcctgcacatcctgctgcggcgtgctggcgtgcaggtcaaccacaagcggatctatcgcctgtaccgcgctgccggcttgatggtgaaacggcggcgccgccgccatggcgtcgcggtggagcgcgaacgtctgagtttgccgagcgcaccaaaccaggtctggtcgatggacttcgtcttcgatgcactgagcaccgggcggcggatcaaatgcctgacggtggtcgatgacttcaccaaggagtcggtcggcatcctggtggagcacggtatcagcggctttcgcgtcacacgggcgctggacgagatggcgcggtttcgcggctacccgaaagcgatccgcaccgaccagcggcccgagttcaccggcaaggcactcgatcaatgggcctatcagcgcgacatcaagctgaagctgattcagcctggtaagcccacgcagaatgccttcatcgagtcgttcaacggtaagttccgggacgaatgcctcaatgagcactggttctgttcgctggccgaagcgagaatccgcatcgcggcctggcggcgggattacaacgaacaccgaccgcacagcgcgattggcaatctcaccccggcagaatttgctgcaagttggcgaactcgccagcagcagctgaagcaggaaaaattaatatcaaccccagggcctactaactag

SEQ ID NO: 346201 - DNA, 642 bp, Pseudomonas aeruginosa
atgaagacacgacaagaaattttcgagatcgtaaaagctgcccgccaccggctgaaagagatgccatccagagttctatcagagtcaactattgatggttacgtccgcgaatacaatcgcatggttggcgatgaagggacagatccacaaaagctatggtccgcgatctgttctactcgaagtaagtccacatatcgcagaagagtggctgcagcaatgtactgctgtcgcatccaacttcgtgaggccttaattagtcaagacgcagctcaacgagctaatgatatatcaagccttgcacaccaagccctagttttagaaggtttgataggagctatggatatgattgacagcaacaaaggacaatgcccacttgaaaatacagttcgacgaaagtcaaagcgatccgacttaaagtatccccctgataattggcgaacccaactgcataatcagttgaagggaagtaagtatgaggcttcttatctgactgaagtcttatcagggtgtcgaccaggtgaacttgaaaaaggtgtaaaagtaatatgtaccagagggggcgagctcactatacggatcgataacggagtaaaagttaccgaccagaagggtcaaccatggcgggaggaccttacaaagtag

SEQ ID NO: 346202 - DNA, 1065 bp, Pseudomonas aeruginosa
gtgaggcatatcccgcagattttgtctttcttgtctgacaagagtagtgttgaacaccacatttgggggttcgaggaaccagaaaattcgcttgaactcgctagtgctattgaggaagcccagacgttcaaacagtttggttctgacaccaataagcagattttcctcaccagtcatagtccggcttttttctccttgacagacgacgatgtggagcgtttttttgtttcgaagtcagaagtgaatttggatcgatataattcaaaaataacagctattgggcacgatctggcaagtaatccaggagaactgatgggggaaacacctcatttgcctgtgattagctcttaccttttagaagcacacgaaaaaatccggaaacaacaggctgcgtccgatgagcttcgtcaagaggtcttacagcgtactatgcctgtcgtattcgtagagggtgtgacagacaaagcagtgtttgagaaggcatgggaaattttaattggtggggatatgcccttcaattttgtgtctggtggtggcacaacaaagatggaaagcctagggcaagacgggagcgtattctcgcagctggctccgggtaggaacgtcttttgccttgtcgacaacgacaaagaagggcgtgagatgtttcgtcctgctaatggcccaggtggaagctggacaaagcataaaggcaatggtgtttattggtgccgtcttcctctaaatggcgaactctctcagctcatgaagagtttgagaattgatgagaagttttggcctggttgtttagaaaatttcttcagtgcagaagtcagggcgcgtgcagttagagacggagcatatgcaactgaggagacacctcatcctgctttatttggtgaaatgaaaaaaataattcaatatactaaagagcgggaagatcttttgcactactatgtccttgcgccaactgccgaggcgaaggaaagctttgctgagtggcttatcaatattgcggatgacgaaccgcaagttttcgaacctcttcgaagtacttttgaaggccttcgtgatctgctttcttaa

SEQ ID NO: 346203 - DNA, 417 bp, Pseudomonas aeruginosa
atgagaatcgctcccaactcccgctcgccgctgctgcagtggctgagcttcgccctctgtgcctgcgtgctggtcaacgcgctggcttgcggcgtcctgcacctgcaggcgctgggagtgggcagcgacaaggggcagaaggccagcgtcgggctgttctgcgtcgccggtgccagccaatggctatccctggatcccgacgacgggtccgccggcgatccggcaccggtcaatccccagttgccgatgagctgcccgatgtgcagcgctctggtgctgttcgtcgcgcttggggtgatctggtcctggcgcttgcaacggcgacgccaggcgcgtttccgcccgcccgccacgcgcgagccggtgccgccccgatacgtctggccgccggccaacccgcgcgcttcccccgcctga

SEQ ID NO: 346204 - DNA, 1365 bp, Pseudomonas aeruginosa
atgaagctcgaaaaacttcacctgaagaactttcgctgttttgaagagttgtcgctgaattttggtaagcgattgacagtgattattgctggcaatggggcgggtaaaaccgcaattttggacgcgattgcgattggttttggtcgctatttgactaaattgcctggggtcaaaggcattgcggtcaaagatactgatctgcgcgttgttaatggggaacgtgccactccatttacgatgctgggctgggaagcaaatacggttgatcagaagtctatcatctggaccacgggtcgtagacgtgacggctcagttacagcatctaatattaaaaatgagctttctgatcacctcctggctttgttgccaaagggtactaaagaaattgatgagttggccttaggacttgcacatgctgatacagagcagcagccatattttcttccggtcatcgcatattacggtaccaatcgagccattagggaagaggttcagcgtcgtcgagggtttaagaagaaattttctcgatttgatgcgctaagtggtgcgctagagtctgacgcacgtttccgttctgcatttgagtggttcaatgccatggaggatgcggagcggcgcgagcagaaagaacgtcgggattttgattacaaagatcctgatttggaagttgtgcgaaacgctattgggcgagtacttccaagttttaaaaatcctcgaacagaaattcgtccactacgctttgttatcgatcacgccgctccaagtggccaatcgcgtactttgagaatcagccagttaagcgacggctaccgtattgttctaggtgtggtaatggatttggcgaggcgcatgacggaagctaacagttgcggtcttccgctgagccagcaaggaataaatccgctggacttgccagcgattgcattgatcgatgagctggacttgcatcttcacccaaggtggcagcagcgtattgtgaccgatttgatgcaaacattcacgaacacacaatttattgtcaccacgcacagcccccaggtgctcagtaccgtcaaacgcgagaacgtgcgtgtgattagtacggattctgcagggaggtctgttgtctgtctgcctttggctgctacgtatggcgaaccaagcggcgatgtgatgcacagtgtcatgctagtagaccctcaacctcctgtggctgagaagtccgatcttgaacggttgactgaaatagtcgatcaaggggcatacgacagtgattcgaatgctccgattttgatgcaacagctgattgccgccttcggggagcaacatccacaactacagcgactgcaacgcagcattttgcgacagagggcgctcaagggatga

SEQ ID NO: 346205 - DNA, 741 bp, Pseudomonas aeruginosa
atgaggcatatccgaaagcaagggaatggtggataccatttaaatcagtcacacacgaacccaccacagacgcatcaaactgcaaccagtcgttggagcagttttggacgtaaggcagatgtgcaaggttgtctgctttatgagcagtatcagctctgctgctatagcgaggtgcgtgccgatttggagggcttgggttaccacgtagagcatgtggagaacaaaagccagtatccccaacgtaccttcgattattccaacctagccgcaagtgccttggagagtgatgaacttgctccctttgtggcagcgcagccagtagcaaaccagccgcaagctgtattcggtggtcatgcttctggcaagcaacgtgctgtcgatatgcagcgatttgtttcgccgcatcaggcagatagtgcgcgcttttttgcatatttgtcggacggacgaattgttccggctattgggcttgatgctgtggatacagatcgtgccgaatacaccatcgatctacttaatctgaacagcccgtaccttattaccaagcgccgcaattggtggggcgagctagacgacctgtttactgaccacgttaccaatgaaatggatttggagtgtctcgcttccattgatttgactccgcgcaatcgtgctctaagccctttttttagcctgacccgccagttctttggccatattgccgaagatgccttgcgtcggtatgcaccggaattgatatga

SEQ ID NO: 346206 - DNA, 1527 bp, Pseudomonas aeruginosa
atgcgctctctcaacctgcatctgaaagtcctgatcgccatcctgctgaccctgggtgtggcgatcaccgcctatcagattttcgtccagggtattcccgttaccgaagccgaaaccgatgacctctggaacatcgatgccaaggtcgacttcgtcgccacgccgaaaaccccggtcaaggtgcagatgttcgttccgccgttgagccaggactacgtcagcctcaacgaaagcttcgtctccaacaattacggcgtcagcatcaatcgcgccgacggcaatcgcaaggtgacctggtccgcccgccgcgccaacggcaagcagaccctgtactaccgcctggtgctgaccaagcgctacaccggcgagaagaccaaggagaaaggtccgatcttccgcgacagcctgcccctggaaggcccggagaagatcgccgcagaagccctgctggcccccattcgccagcactcggccgacgtcgagaccttcgtcagcgaagccatcaagcgcgccaacaacggcaacgacgacaacgtcaagctgctgatggccggcgacaccagcctggaaaagaaagcgcatatcgtcgaaaccctgctgtccatcgcccacgtgccgatggagcgggtccataccatccgcctggtcgccgacctgcaacagagcccggaactgtggctgcgcagcttcaacggcgagaactggctgtatttcaacgtggtcaccggcgaacagggcctgccctccgatcgcctgatctggtggcttggcgatgagccgctgatgaccatcgacggcggcaagaaggcccaggtcagcttcagcctgaacagcagcgagatgaacgccatccgcctggccaagctgtccgacgagaacaccgaggcggccttcctcgagtactccctgtacggcctgccgctgtccacccaacagaccttccagatcatgatcatgatcccgatcggcgtgctggtgatcctgatcctgcgcaacctgatcggcctgcagaccctcggcaccttcaccccggtgctgatcgccctggccttccgcgagaccggcctgcaatggggtatcgccctgttcaccgtgatcaccgccctgggcctgtcgctgcgctcctatctcgagcacctgaagctgcagatgctgccgcgcctctcggtggtgctgaccttcgtggtggtgatgatcgcggtgatcagcctgttcagccacaagctcggcttcgagagcggcctgtcgatcgccctgttcccgatggtgatcctgaccatgaccatcgaacgcctgtcgatcacctgggaagagcgcggcggcggccacgcgatgaaggtggccatcggcaccctgttcgcggcatcgctggcgcacatcctcatgcgcatcccggaactggtgtacttcatcttcaccttcccggccgtgctgctgatcctggtcgccttcatgctcgccatgggccgctaccgcggctaccgcctgaccgagctgttccgcttcaaggccctgctcaaggactga

SEQ ID NO: 346207 - DNA, 639 bp, Pseudomonas aeruginosa
atgtcgatctggaagacctggaaagacctgaccgcgaaaggcgtgatgggcatcaaccgacgcaatgccgattacgtcctgaagtacaacaagcggcacctgtatccggtggtggacgacaagatcatcaccaaggaacgcgcgctcgaggccggcatccacgtgccggagatgtacggcatcatcgagaccgagaaaggcatcgacaagctcaacgagatcatcggcgagcacaacgacttcgtcatcaagccggcgcagggcgccggcggcgacggcatcatggtgatcgccgaccgcttcgagggccgctacaagaccgtgtcggggaagatcgtcagccacgaggagatcgagcaccacatctcgagcatcctctccggcctctactccctcggcggtcatcgcgaccgcgtactgatcgagtaccgggtgacccccgaccagatcttcaagagcatcagctacgaaggtgtgccggacatccgcatcatcgtgctgatgggctacccggtgatggccatgctgcgcctgccgacccggcagtcgggcggcaaggccaacctgcaccagggcgccatcggcgtgggcgtcgacctggccaccggcgtcacctcaccctgcgcggcacctggctga

SEQ ID NO: 346208 - DNA, 276 bp, Pseudomonas aeruginosa
atgaagctggcggccggttgctacgagttgtcgggcctcggctacatcggcgtggacatggttctcgaccaggagaaaggcccgctgatcctagaactcaacgcccgcccgggcctgaacatccagatcgccaacgacagcggcctggtgcaccgctgccacgccgtcgaggcacgactggaagaactcaaggcgaaaggcatcgaagagtccgcggaagagcgcgtacgcttctcccagcaactgttcggccacgtccagcagcaacagggctga

SEQ ID NO: 346209 - DNA, 762 bp, Pseudomonas aeruginosa; identical to SEQ ID NO: 319066

SEQ ID NO: 346210 - DNA, 1392 bp, Pseudomonas aeruginosa
atggccctcgacatattcgtcgttctgatctacgccgcgggcatgatcgcgctgggctggtacggcatgcgccgcgccaagacccgcgacgactacctggtggccggccgcaacctcggccccggcttctacctgggaaccatggccgccaccgtcctcggcggcgcctccaccatcggcaccgtgcgcctgggctacgtccatggcatctccggcttctggctgtgcggcgcgatcggcctcggcatcgtcggcctcagcctgttcctggccaagccgctgctgaagctgaagatctacaccgtcacccaggtcctggagcgtcgctacaaccccgccgcgcgccacgccagcgccctgatcatgctggtctacgcactgatgatcggcgccacctcgaccatcgccatcggcaccgtcatgcaggtcctgttcggcctgccgttctgggtctcgatcctgatcggcggcggcgtcgtggtgctctactccaccatcggcggcatgtggtcgctgaccctgaccgacatcgtgcagttcctgatcatgaccgtcggcctggtgttcctgctgatgccgctgtcgatcaacgacgccggcggctgggacgccctggtagccaagctgccggccagctacttcgacttcaccgcgatcggctgggacaccatcgtcacctacttcctgatctacttcttcggcatcttcatcggccaggacatctggcagcgggtgttcaccgcccgcagcgagaccgtggccaaggtcgccggctccgccgccggtatctactgcgtgctctacggcatggccggggcgctgatcgggatggccgccaaggtcctgctgccggacctggagaacgtcaacaacgccttcgccagtgtggtcgagcacagcctgccgaacggcatccgcggcctggtcatcgccgccgccctggcggcgctgatgtccaccgccagcgccggcctgctggcggcgtccaccaccgtcacccaggacctgctgccgcgcctgcgccgcggccgcggccagtccgacaacggcgacgtgcacgagaaccgcatcgcgaccctgttgctgggcctggtagtgctcggcatcgccctggtggtcagcgacgtgatcagcgccctgaccgtggcctacaacctgctggtaggcggcatgctgatcccgctgatcggcgcgatctactggaagcgcgccaccaccgccggcgccatcaccagcatgaccctgggcttccttaccgtgctggtgttcatgatcaaggacggcctcgacgccaatacgccgatctactacagcctggcggtcggcctgctcagcttcgtcctggtcagcctgttctcgcggcgcccgacgggtgtcgccagcgccgcctga

SEQ ID NO: 346211 - DNA, 252 bp, Pseudomonas aeruginosa
atggcccgcaaagcactcgcatatcacaccccttccccctacgaactcctggcccatcggatccagcgccagctgttggcgccagctgcccagctcgcgcgacgggcggtgatctgcagaatgcccgacgagcccgaggaggcctggttgcgattgctcgacgagctgagccaagaggacgcgctgacgatcacacgacaacaggatggctccatcgagctggcatggccccaccctgcaaccgactggtaa

SEQ ID NO: 346212 - DNA, 909 bp, Pseudomonas aeruginosa
atggccatacccgccacctccacgacgaagtacttgatccgtttttatgaagccaagctttaccagaacggaaaagcgattcgactttcgaaactatttggagccctaataaatcggggaggccaactggccattcgggcattgatagagaacaagtcggactaccaagttcgcggacttacttcacacgatggtggaaaggaatatcgtggcttctttgtgcgatttcgctcggacgtccccctgactggcagcagaaaaagcctcgacgaaaaacctgtcgaactcgctgacggccatgagattcttgagaagaatcacttcagcctcttcgtaggggcaaactatgaagttttggtgtttcaacaatcactagaagggggaagcatctctggtttagctcgttatctatcggcgatcgcaggtgacacctttgttgttcagtttaacgacattctcaccactgaatcgctggatcagttgctgagcggaaacacgattaagcacgtagattttcggatagctaggccgcggaacaaaaaatacgctccggaccctgacgacacctggactcagaagggcctcgattttatgaacgaaacaggagctacctcattccaagccaagctctcgatcaagtcgcccacccgcgggctttttgccgacatcaaaaatcctatccaaaagctgctatcctcgtcgcagacgcggaaactgaaggtcaaactttccgatctcgcggatccaatcgaccttttcgcggacaggatcaaggacaaaattgatgtgaccctgtataagggccttccaaaatcggaagaggtatacaaatcaatgtgggcctctaagatgcgactggaaaagcgactagtcgagtactttggtaaacgcgatgaagcattggattaa

SEQ ID NO: 346213 - DNA, 258 bp, Pseudomonas aeruginosa
atgacgtcacccaccccgccgagcttccctgacggcacgccgatcctgataaagccggaaggcttcgacctgatcagcggcaagttctacatcgccaagcatcgtgacggtgagaccaccttcaagcagtacatctacgacagcggccgcgagtacttggtaccgttgaacaaggaattcaaacaagtcgagatggatgacgcctgggacgttatcggccgcgtcatcgacgccaagcagccgcgcggcgtgctctaa

SEQ ID NO: 346214 - DNA, 924 bp, Pseudomonas aeruginosa
gtgcctgagaagggaatcagaaatcgatattcgcaagcgccattccagatattgatgtatgacgatcaagggatgacttcgacggggtccgcgtttttttatgagtttaatgcagagctctttttaataactaactggcataatgttagtgggaggcactttctgaccaaggagcctctttctggaaggtttccagtttctattgaaataaagctcgcgacttatattccgcatgagcttggtgagcgttatgtatatacttcggttgctcatcggcttgaagtttataaagactgcaagcctatctggtttgaacatccggtccacggggagctggtcgatgtcatcgcgataaaaatttcacgaccgcaagactgtgctgagaattttcatgttccagttaacaatattagcaggctcaaagttccggtaatgccaggcaacacggcgtttgttatcgggtttcctagctcgatcagtacagggttcggtttgcctctttggaaatcaggctttatagcttctgaaccctattacggaataacaagtggcggtcgtccgtcgccgataggagggctcactgggggcgttgaattaccggctttcttccttgatactcaaacacggcaaggtatgtcaggcgctccagtattttgttcatttacgggtacatggaatgtcaacgatccgtacgaagaagtggatgtgggttctccgggcttctgggatagatcggatgtggctttgaacgagacgaggatggagtttgttggttgttacagcggaaggattggtagagatgaagaaggggcggcgctagggatttgttggggtgtggaagttattgatgaaatctgctcttcccagaagcttggcaaaaatccacatttcaacgagctctgtgaaaacgcgcgctcagattga

SEQ ID NO: 346215 - DNA, 525 bp, Pseudomonas aeruginosa
atgaacgcaaggatcgccgcattgggactgctcctgcccctggccgccggcagcgccgtggccgcggaggagggcagctcggtcaaggatgcggccaaggccgcggtgtcctcggccatcgagaccggcaagaacctcctcggcggggtcagcgagggcatcaccagcggccgccagtcggcccagggcgccgatggcgccaaggtggtctccgacaacgctggcttcgccgagatcggccaggtcgaagtgctcaagaccgagccgcgcgaccagcaactggccgtcaccctcggcttcaagaacgacagcgacgccaccgtgcgcctgatcaacctgacccagaccggcgcgctgctggtgatcgacaacgacggctactccaacgccctggtcgccctcgccaaccccgacgacgtcaccgttccggccaaggccggcatccgccagaccttcgtcttcgaaggcggcgcggaagggatcaaggcggtgcgcctgtggggcaaggacctgccggtgaagtga

SEQ ID NO: 346216 - DNA, 342 bp, Pseudomonas aeruginosa
atggagcaggaacttgaaatcatcgatgtccatatcgcggaagctgcgcaggaaattctcaaagccgaacgctgcgcagtcttggtggccctggagcgcctggaagaacaatgggatgcgtcggtaaaagagcttcttgatctaggggcgaagctgtatgcagcgaagcgctacatggggcgagaagggatggcctttcatcgcttccacgtggggagccaagtggaaagctctacccaatgggacgatacagatttggccgctatgagttacgattattcacccgcgcagatcattgatattgagacaatgcaaaaataccagatcagcgtacctgcttaa

SEQ ID NO: 346217 - DNA, 6423 bp, Pseudomonas aeruginosa
atgcctagaattgatgaagatgtcgaatccgtacgtgcatcgcgcgcagggcatgccttccacgagcgatgggctgctagaagagcgctacaactcgttttcccgaacgacaatctttccgcgatagccgtcgagggcatctcatcaaatgaaactgccaagcctggagcccaggctgaagaagttgcggaccttgtcctctattatggccaaggaaataatttcaatgaatgcgagagactcgagaccgttcaattcaaatataaggtacgggaggaagctgtcactgcctcctatctaaaaaagacaatcgaaaagttttccgcaactatcattgggtacgagaaggactacaccgcatccagcgtcgacaacaaagcttcatttatatttgtaactaactctcgtttcaaggatagcctttgggaggccatacaggcactagttgacggaaaaccccctgtctcctcagacgcagccacccaatatagtaaccttcagaaatggtgcgcaaaccaaggacttttagactcaggtcgacttttcagaagaacagtctttcgtgctggtgaaaagagtctcgcggctcaagataatgccctcaagcgtacactcaccgactggtccgctggtgctgatttggtggcaagaggcaggatccttgggctacaagagttagtactaagaaaggctggtccaagtgggcaaggcaagaatttgattctccgcgaggatgtcttggatgctctcgattgcgagccagaggatctttttcctgctgaaacaagattcatagacgtcggcgatactgttgagagagccgagctcaaaagcgcaagcgacctactcaagcaaacagacttaccggtctttattcatgcagaaggtggggtaggcaaaacagtattcgtccaaagcttggcaaaaatcatgactacggattttgaagtagttctatttgattgcttcggcggcggatcttaccgctcagagaatcatgcccggcatttaccaagggttggtctaattcaaatcataaacgagcttgcttcgcgaactctctgcgaccccatcctccctaacggagatgactcccgcaaaataattagagcagcttgcaagaggctagagcaggcagccaacgcaattcgtacccaatcaaaaaaattgggtttaatcattatcatcgatgccgcagacaatgcacagctcgaagcagagtatcgccacgaagaatcgtttccaaaaaggcttctcgctgctctcaacgacgagccgattgatggtgttaagttggttcttacagcgcgcccatatcggaaagacaaagtaattgagagatcaaaggtaaccgaaattgaattaggcccatttacgatagttgaggctcgagaatttttaaaaagtcgaaaaccagatgctgacgaggtcgaaatcactacagcgcttgcccgctccggaagaaatgcgcgagttcttgactatcttgtgcaaacatgggaaacgaacattctcgaaaaaaattcaacagacagcatatccgttccagaaattatcgcagaacgttgcagtaaaattatttcagagctacatatagccggctggtcggattcggatattactgaattcttcgtagccctatctcttcttccgccgcccattccattagaagaacttgcccaagccctaggctggtcaatagtccaagtcagaacagccgcatcagacttggcacctatgcttgaaattacatcgcatggggcgattttcagagacgagcctaccgagtcttatatccgagacacattctcagaacgagctgaggcgcaaattgctatcgcagagcgcctcttagcatcacaaaaaacctcaacttacgcggctgaagctctacctcatttccttgttgtgataaaggatagtgatcgagccttcgaattagccgactcttccatcttcccaacttccattcaatcagagtttggccgaaggcggcttattctcgctcgccttcgggcagcattcagactagctgtagcagaagatgactttgaccgtgtgcttgggctaagtatgagactagggcaagttgctaccgccaatatgcgaggcgacgaattcattcgtcgctctccagcgctagcaatcgtgctaggagactcggactcttacagacgccttttttctgatcgttcaggatggcgtggtgctcgtagtgcgcgtctaactgtagcataccattttgcgggtgattctcaggaagcacaaatacaatgtgaaagcaccgtacgctggatcaattggcatgtaaagcagcctcgtgatgagcaccatccagggtcagatggtccagaaatctgcgacttttctgctgtgctttttcaccacgttgttcagggcagttacagtagagtcgataaaaatatcgatcgatggaattatcagctctcaatgtcggctagcgaagaacttttagaattactagcattgtacgatcaggtcaatcacacgacactacttggagaattcgtattattcatcgttagtgaagactgcacttcgctagccttaaagttatcgatactatcgcatcctcattacgtccagaaagaccaagtcattctactatctaaccagattatcggcataacttctcccttgaaagaggtggagcaccctccgacaggtttagaacaacgtaggagctatattgcagacgctgctttgacagcgctatttagtggtttgcggcccgctgcaaaagctatggtccgccgggctcaattaactcgccctgcggcctacgagtatagcgaacgtttcggacatacaagtatttggggatcaatcttaagctcctgtattgcggcatggtcagtcggaaaggccgtttcttattgtgacttactacctagggaagtgaaaattggtagcaaggcaaaagccatctcgactaggacagaattactaatatttctaaaggacattaaagaacctattcctaagcacgcccgtgtagagggcgacagcaagaaggaacggttgaaattcaaagatcatgaacgtgagaatataagcaaaggtatcgatattacgctagagctaattcgtccaatagagcacgttatccttactcaagcgtccgtcacagacactgttataagcgagttcgtacagacctggcgtaagcatttacgaaacaacacccagtggcaaaatgaaaacgcagcggactccctcgttcgctcagtcggcttcggttgcatgtcaattttactagatcatgcactcactctatcatctgagttaattcaaacaattaccgaagctgtcgccgaagggaaattcgttgtcacacaaaaaattcatttattaaaacagatctcacactactcaaatgcgcatgcagttgctggcaatttcgcacaacacattgcacaagtaattcgccaagatgacaacataagccaacgcggaaacacctacgtaacgcttgcctcttctattacccatatcagtattgatgaagctagagaatactacagacagggattggctcaactagatcaactaggcggcgagagctatgattcaatatacgcacttctcgaatacgcgagcgcgcagcgaggcggccatcttaaaccgaaactcgctcagcgctttatgaatctttgccagcctataatcagttacgatgcaagaaaatttggttggactggatttgcgcgtgccgccgcccagtcaataggagtatcggcaatcgcgaagcttgtgcgctggcacgaccaggatctagcggatttctcatacggattgccacaactggcctgctacctagcggaaaatggaagccttgacccacgccgtgcagcctttattttaacgctatgtgaggatcatggctggtgggattggcgatcaggggaggcagttgctaccttaataaaatcacttccccttgaaactcaaaaaacgatctatcacattattatctccaatctgaaggatcaatacccctccggcggctggccctcattatgggaaggcttcctcaaaacagctgatcagttccaaaacttaattactcctcaagagcgcgccgatattaaccaattatggttagactccaagcagcgccaagacgaattcaacaatcgcaacaattccacacgaaatgcgtttgacacccacattcaaaacgagagcgaagaagcagaagagcttctgatcattgacaccctagttaaaacttgcaacccgacactggccaactcaatcgaccattgtctaaaaaaaataacccaagacgaaaaactttcgtacaaggaacgaaaaaggtttattgaaaaactttctactagctgcccatactctaaacgccttgattttttaatggcagtctgcgaggcgcaagagctagacttcactcaatcattggaaatactcaacgagtattattcagcctggaacgactcttccatttatctagcatccagcactagaccgctagtagaaaaattatttgaaagtaaaagcaccgacttattcgacgaccagttttctaatatcaatcgtgacctccgaaaactttcagatttttgcggtgacaagcactttgtattgcgacttactcttcagaaaatcgctgctgacgaggtagagtttggaggcgaagaatggatacaactctcgaccgcattgtgcgacctggcatcaggtcaagcttgtctcgactcactagagttccttttatccggaccgacagcccgcatcgcagatgagataggcgagggcccccttcgtcctgagcaagaaatctgcctcaccgaagaaaactttgttgccgatctaatatggcacttgctaggaaatgatgacgcctatattcgatggaatgtcgcaagagggatcagttcattatttgaactaggactcactaacgaagtcaccatattacttgaaaactttgacagacgagaaattaaatatcttgagtctacagagctcaagctctcatttcaaaactctcaacaatggttactaatggggcttgcccgcgccgcactacatcacggctcatcaatctcatcaaccaaacaaaaacttacttatctagcgcaacgagaagacttacacattataaataaactacacgctgtcagatgccttagaaatatttgcgacgagactgagctggcagaactagccatcctattcgatgctatcaatcggcctccgctcggtgtcgttactgacgacagctggccagcgccaattaaatcaacttcagaattccatttcgactatgagttctcgaagcatgatgtaggtacccttgctcgactgtttaacatctctgacggcgtagtcgaagatgcaattgcagcggagattacgcgactatggccaatggcgacatcgatggattttttccctggccgcgagcgtcattatcgggaccacggcaatcgctttgaatcttatagagaacacatccaaaggcacgcattaatcagtgctgcaacaaatctgtcgaaaattttcccgatagttattcgaagttatgattgcggcgtttcaccttggcaggattggcgggattgctacgatgtgacattcgatgatggttcgtggctttcagatcataaagattcgatccccgaggaagcaaatgaaaatctcttaggcgaaagagcaaaccgtcaagtaacactacacaaccaagaagtgttaatcagaaaactcggatatgacaactctacaagcgacgctctgttccccttatatggacgctggacttcacctgatggagtaatagtaaaaattacgtctgctttatcccaaaaaagtggagttattggtcgctgtcaaaacttcgccaaacagaacagccatgatatatggctcccagagttctgggacgacgggttttatgactatcgtcaccgcaaggattcccctttttcgccgctagtgtggaaacctgaacatcgcggtatcggtatcgacgttactgacgagattgctgcggaatgcgcagcagaaagacctcgcctcggaatagacattactaagcatttgggcttggtaaatgacctcagtggtaactggtacactgaaaatggcgacttagctatgcacagtaaagtgtggggtagttggaagccagatcctgataaccatcgaacacatttccatgacaatggagaaattctctatgcttcgaacgactggctagcaaaaactttgtccgcactaaacaaaaaacttgtattcacaatcaacctatggaagccaaagccctcgcgcagttacgaaacattaaatgagattaaatccattcttgtaggcttacgccttgacgacgggagagtgaggatttggcctgcagttaggccttcaaaaacgaagaaccaataa

SEQ ID NO: 346218 - DNA, 915 bp, Pseudomonas aeruginosa
atggagtctgctcgggatagggtgacattggagcctgtagatgctgaagatctgtggcttttagcagaggtcgataagaacggctacatctgtcgtgggtgtgaactgacggtgtacccggcgtcttacctgaagtcgaatttgcagcgaccacattttcgaacaccccgcggccagcagcatttgcagggctgcgatatcgaaggtgaggaaaaaactgtatcgagtggaaagagaggctccgttcggaacgagctactgacaagtcctggcttatcgcctgcgcggctgctactcaggaatgagcggtccgttgttgatcccacagctcatccttcgccatcagggtcaacccgaagcacacggtctggctcttcaggaaacggagaagcccggccccaaggacgtaggtctgctcaaagcatcaggcgtatctgccgagctttcatcaattttccatacgaccgagcgctttctctggaggtgccgggagtcgatgtgtcgacttaccagcaggttttcaaaaagctccgagggaacggaattgaagtgatgccttcactgagaatcttctatggagagctcagttggggtcgggctgatgctaacgaggacaaccttctaatcactctctctgcgggggagtgggggaaggcggataacaaatacgtgcgcccctatagggttaaagtgtcttgggcggattggtccaaggcaaagcggactacagtcactaccgagctggacgtcgttcgacaagagggtatcgacgccaagaaaagcggtagcaaagatcgaccctacgttttcttcctaggccgtcaggacgacgaagacccctccgtatttcatgtggaggaccatcgtttgatttgtgggctgttggccacgatcacgtatccggtaaacgactag

SEQ ID NO: 346219 - DNA, 630 bp, Pseudomonas aeruginosa
atgcctatcactgagcagcaactgctgcagatactcccgaacgccggccctcgagccggcgtttttgttggtgcgctgaaccgcgggatgacgcgcttcggtatcacgtcgcctgtgcgcgcggcggcgttcctcgcccaagttggccacgaaagcggccagttgacccacctggtggagaacctcaactacagcgcccgcggcctggcttcgacctggccgagccggtacctcggcgccgacggcaagccgaacgctctggctctgaacctggcgcggcatccgcaggctatcgcgaaccacacctatgcctcgcgcaatggcaacggagacgaggcgtccggcgacggctggcggtaccgcgggcgcgggctgctacaggtcaccggccggtcgaactaccgcgctgccggcgccgggctgggccagccgctggaagcggagccggaactgcttgagcaaccggagtgggcggcgctgtccgcagcctggtggtgggccagtcacggcctcaacgatttggccgaccggggcgagttcgccgccatcactcggcgcattaacggcggcacgaacggccaggccgagcgcctggcgctgtgggagcgggcgaagagggtgctgtcgtga

SEQ ID NO: 346220 - DNA, 1023 bp, Pseudomonas aeruginosa
atgccaaaagagcatacaaaactggaaatgccaacggatggtgaaagacttattcaggatgttcttgccgaactagggtggagcgcagaccctaaaacggtggccgagggagtacgccgtttagacataggcctgcccttggaggatgaattctcggtggtctgcgcttggctagggaaatgccaactactgcataagctcgaccaacaacagattcccatcacatcaaagcaagagttccaagtacctgatttgctggctagattctcgtctcagaccaacacatccccagtgttaattgaggtgaaatctaagagaaacaagctcctgtcattcaagcccgactacttgagtcgcctacaaaactatgcagatctaatgggcatgcctttgctaatagcctggaaatttcacagtatttggagtttgttcgaagcacgacacatgaagaaatccgccaaaaattttaacattactcttgaaacagcaatgcgagaaaatcttctaggagtaattgccggagatgttgcatacaagattggcactggtgtcggcgtgcatcttcgatttcgcaaggacaaaattatcgagacaaaagcaacagaagatggtcacgaagaacaatggatgatgactatcgatgatgtggcctttaccgatcgcgaaggcaagcgacgcatggatgtcgatagcgaggttcaatcactaatcaccgcgtgggatttagaaaaaaaggaagactacaccgactcgcatgtgcaacttagctttgtcgccggcgataatggtatacagttcgctcataccgccttagttcagcttttgaattgggaatcgtcgcacgacaataggccgcactggcgtgggctgctgcgcaaggaacagatcacaaaaaacgtggtgagcttctcagctgcgctagaagttgcatacagccaaaaatttgtatcccacattttccacatgcagcctcatacaatgccaaattttcttccgacggaggctaagagagagcaattttaa

SEQ ID NO: 346221 - DNA, 630 bp, Pseudomonas aeruginosa
atgtttaatccagccgcaattactccagacgaaattggagaatactcttggatagccatgtcttttcgtgactctccttcagctcacgactatctagacttcgcacaacaagatatccgcgacggaaatacatctcgtcaccttatcaacgctctctctaatgcaaagagatccttacacatgcgtctggaggatctatgccttggatttggtgcgcgagatctgaaaaagctaggcagatatccatcacttatagacttcacaagaaagtgtggttttgtcgctccgcgaatcctagacaaaatcaataaagccagaaacagcgttgagcacgaatttaaaatccccacactcgaagaaactgagaacttcgtagatattgtagagctattcctgagcgcgaccgatagatggagatttaggcaaccttgtgacgttgacattaaccacatagcaagcagtggatcgattgctttacatggtattagcttcaactggcaaaaaggcatctgcactttatatatcggaccaccagagcaaaagaaaatacactgcaccacgcaaatgataaactccgaacagcccatcttctttgagtgggtaaaactaacactaaaaaacgactactga

SEQ ID NO: 346222 - DNA, 855 bp, Pseudomonas aeruginosa
atgtctatagcgccatcatttgtcacgccgctgcgctatccaggaggtaaagcgcgcctgggccactggctatccgagcttctgaagttcaataaattagaaaacagcacttacatcgaaccctatgctggcggagcaggtgcagctgtataccttctaaccaataagctagttaaaagcattgcaattaacgacatagatcctgccgtttattctttttggtgggcgctgctcaatgagacggacgctctaaaggaaaaaatccttcacaccgaagtcagcattgagacatgggaaattcaaaagcgcattatatccaaccaagacaatccatgcagggttgagcttgggtttgccgctttctttttaaacagaacaaatcgttcaggaataattaatggcggggttattggcggaaaaaaccaaacgggcaaatacaagatcgatgcacgttacaataagatcggacttctgagccgcatagacaagatcgcctcgctccgagaacatattcacttaaccaatctagatgctttagagttactccacaactggagagacaggaaagataccatcctctatctggacccaccttactatcaaaaaggcggacaactctacaggaatcactaccagcctgaagaccatgcgatgattgccgaaaaggtttgcagcttacaggccccttggcttgtcacatatgacaactgcagtgaaatccgtgaaatctataaaaactctaatcatatggagttttcatttcattactcgacgcaccttcaacgcccaatcgggcaagaagtaatgttctacaacaacatcgacctacactcaaccccgaagatgcgaagatga

SEQ ID NO: 346223 - DNA, 1701 bp, Pseudomonas aeruginosa
atggccactactagactgaaaaatatccacataaaaaaatttagagcactcgaagatgtccaattcgacctcggcacccaaatcaccgttgtatgtggaaagaatggaacatcaaaatcttcaatactaggaattgcagcacaagtattcagcttcgaaacaaatcccgtagccgaccaagcaataaccaacagaacgctgacaggcgacccgttcaaatccttcccagctgaacactttagattctctgaaatatacgacacccctggctcgatggatgtcaatttcaccgtacacgatggctatacagaaaaagatatatctcctgacttaagactaatacaacgaaagggaagcaaagctcgccccgtagtcagaaacaacacatccatccctggtaaaaatacaagccgaaacttaacccacccggtaatttacctaagccttaagcgcctaatgcccatcgctgtacgcgataagtacgaggtaaaagacaacgaatacctcacccaaaatagagcgaaatttgtacaattaaacaatgaacttctaaataaacgctcaaccaacgccactgccacgattggaactatcaagtctgccgtagcccacggaacaaattatgaccaagactctgtctcagccggggaggacaacgcaggtcaaatagtcctcgccctgatgtcttttcgcagactcaaagaagaatatcctgactataaaggagggctacttctgattgatgaagctgacgcaggccttttccctgctgcgcaaacgaagctactagacatactcgtcagagaatgcaacgagctaaacatacaagtactgatgacctcgcactccccgacaattattgagcacatacactcgcttagccaaaaatatcaaaggcgcttcaaaacaatttacctgagcgatacatacggaaaagtacaatgcctgcaagataaatcatggatagatatctattcagaccttatgacacaaacgataccagcccaagatgagctatcgataccaaaagtaaatatttactttgaagacagagaaggatcagatttcttcaacgaactactatttcgacacagcatcaagcaactaaccaatcccttgagcgacatctctctcggatgcggaaattacctacatctaataaagcacaaaatcccggaattcacatacaaaagcatcatagtacttgacggagatgttgagcagacccacaacgccaacagcattattttgcttcctggagaactgcctcctgatcagcttttatttgaattcctttacaacttaccagccgatgacactttatggcaaaacaaacctaaatatacaaagcccgtcttcgacagcgtaacccgagacataataaacgcacttaacatcacaggcgacaccgtaaacctctccgaagcgctatcagagtactacgaagggatacacgacaaaacaagagaaaaagaaagcgagaagctaagaaagcttttcaaagccttctacaaaaatgaaaacacccaaaagctcctaaaactcagaaccaaacagcaaaatccttggaaacgctggatagcagacaaccaacaagcatgccaaaaatttaaagatgatttcatcgacaagtttagacacaccttagacaaaggctttggagtagagcctgggatactagggaaaattgatgctctttga

SEQ ID NO: 346224 - DNA, 279 bp, Pseudomonas aeruginosa
atgaacaagcaacgacgtacgttttccgccgagttcaagcgcgaggccgcggccctggtgttggaccaaggctacagacatatcgacgcctgccgttcgctgggggtggtagattcggccttgcggcggtggatgaaacagctccagcaggagcgcgatggcgtgaccccgaagagcaaggcgctcacccccgaacagcagaagatccaggagctggaggctcggatcaaccggctggagcggcagaaagcgatcctaaaaaggctaccgctctcttga

SEQ ID NO: 346225 - DNA, 207 bp, Pseudomonas aeruginosa; identical to SEQ ID NO: 328919

SEQ ID NO: 346226 - DNA, 213 bp, Pseudomonas aeruginosa
atgccgaacgcctacccgacggagcaagcccgcgaggcagcccgcaaacacatatctcgactgggcctttcagtccgggaatgggccgaaagaaatggcctaggagaaagcaccgtctacgccgttctcaacgggcaaaagaagtgcctgcgcggcgaagcccaccgcgcagccgtgttgctcgggatcaaggacggagtgatcgcacagtaa

SEQ ID NO: 346227 - DNA, 2115 bp, Pseudomonas aeruginosa
ttgaccagtctaaaaatgcgggtgcagtctcatgtactgaaattgctcggtgatcagttgataggccacgataggcttgccgtgtttgagctggtaaagaactcatatgatgccgatgcgacaaaagtcgatgtgactctaaacctggagagtcctacgccatttatttccatatccgatgatgggtgtgggatgaatttaagtgatattgaatcaaagtggctagaagtagggacggattccaagcgaagctctgctggcaaaaagccttcgcctaggttcaaacgcctcccgcttggcgagaaaggggttgggcgcttagctattcaaaaactaggtgaaacagttcatgttgttacaaaaaagaaaaatgaggatgaactagagtttacaattaactgggacgacttggtcggtggggggaagtatctcgatcagggtctttctgtgtctatcgtaacgaattctccacctaagtttatcttgggtgaatccggcactacgctgacggttacagacctgtctcgaagtgagtggagtaagagagaggttagggacttgtatcgtttaattacctctcttgggaaccccataaataaaattggatcgtttgaggtggtgcttaacctacctggccgcgaaggcgatattgaggatctgccatcagctaaggatatgttaaatgctgcaatgtggacttttgactttagcttgtctgatgacggtgttttctcctgggattataagttcagccctcctgcatacaaagggctaaagccctcgtctgaaagtaaagcaggtgacaggctggagcttgttaaggcggctgaagaggacgacacggatggtgtgccagcaatcttcctttcccctgaaatgcttcaaggtataggtcccataaaggggaagatttatgcatatcaccgtcgaaccgagatacttaaggaaacagggtctgcaaagctcattaccgactggatcagatcccaggcaggtgtaagggtttatcgagaccaagtccgcgtattcaactatggggagccgggagatgactggctcggcttgaatgtccgtaggattaacaggcctgctggaaaactgggtacggacagtttgctagggtatattgatcttgacttgtctctcagttctgggttgaaagaaaagacgaaccgagaaggtttcgatgagaatttaacctatagaaatcttcagcgggtagtgctcagcatttttgataagtttgagcgtttgcacggaccgcaccggaaagaaattgataaggccatcaagggtgagactaaaatagttcctgttgaagaggcttttgagtcgttaaaagaaattgcgaagaaaaataatattgagtctgaggttaaaccggtagttgactcattgcaagcacagttaaatagctatcgcactgtaatgctcaattctggcatggcaggtttgaacctgtctttggcctttcatgagatggttcatggggtcgataccctcacaaggcagcttgaggcgaacagtggtaagagtactttagaacaaacaattaccaaccttcgaaagcttctcgatactttcaaacctttgctgaataaagagcgcccaaggaagataactgccagggaactagtggccagggctcttgatatgaactcaggacgcttcaagaggcacgaacttgtactctcgaaccgcgtttcggatgatggggtttctttccctgtaagtgggcctttgaatcttttgatgggggctataaataacattatcgataatgctatttattgggcaagatatcaagctcaaaaagtcggaagacaaggcgcagtgctaattatgtcgagttgggatagcgagcgcaggagtggttcgttggcgataattgataacggccctggcttcgaacttcccctagatcaactgtgcacgccgtttgtttcaaaccgagccgagggtatgggattaggtctctattattcaaaaatggtaatggagtcgattgatgggagcctggtcctgtgctcggcggaggaactacgagacgaatttgagttttctgaagcttatgacggcgccgcggttattttccagttcaaggaggaaaaatga

SEQ ID NO: 346228 - DNA, 1353 bp, Pseudomonas aeruginosa
atgattccgaaatttgttcgagttgctgctgttgataatgagcgcgatcatttagataaaatacattctgctctagtttctgctggtttttgggctatgccatttctttatgatcttggctcggttaagcctctcccgcctagcccatacaatggagtaagaataatcttctcggatattcatcttgttgatggtgggatgaataatatggcacagcaggcacttgcaattattgcctgtctgaagaagatcgtatgtgatggcccttatgcgttaatcttttggacccaatttccacaggacgcggagcaggtgtttcgcgagattcttgcacgtacaggcgatgatcttattgcccctgtcggtttcggatgcatagataaaagtctggtgctggggttagaggaaaatccagaacgactaccggaactcctgacacaaatcaatttggctattgagagttgcggggctctattgctttcgatctcatgggaagaacgggtctcacaggcagcgatccgttcgacttatcgcctatttgatttggctcaccagaaagcggctggtggctcgcttgagcagtggcatcaactattagcatacttggcagtagaagctgtcggtgagccacaagctagaagaacacctgtttccgcgatggatgcagcacttttacccatattagaagatcgtcttcatgtatccgctgaagatgttgcacccttgaatgcattacttgagcaaaaaattggcgctggaacgggagccgtatccaagtcgagcctaaatgcccattatcttgtttcgactctaggaaatgcagctgctttcgcttctagtcgaggtgtagtctcagtcataaacaaagaaggctgggatgctgatcaattagaattgtgggggcaaacctgcaatcaagttctggtccaggaattctttttgtccgggcaccagaatgtcgatgaagcgctgttaggtactctaaaaccgtgtgtagtaacactgaccccagaatgcgacgatgtgcagggtaaggttggaagttttagatatctattgggggtcctgataccgtattcagaggctgtaaggggtcgctattacagtaaaagtaagaggcagtattctaatctttcaatattcgacgtcggagttctatctgttgatgttggagacggtgtgaaggattattgtcttctgatctcctgcaataggttttttgcaaaacctactgcagaacttttaaatgttgaacctaagctgaggctacggcgggcgactcttgaggagctgagtcatcactatgcgactcatgctcggaggcctggggtgatgcgtttttcagtgtattag

SEQ ID NO: 346229 - DNA, 1050 bp, Pseudomonas aeruginosa
atggaaaggattagggtttttgacatgttctgcggcgggggtggtagcagtctcggagcccggctggcaggtgcagaagtcgttgggggcgtagacatgtggcccgtcgccacccaagcgtttggtctcaatttccctcgtgccgcagtcttcacgggcgaccttcgcctgttggccccatctgatgtgatcaagcagaccgggccgattgatctcctcctttcgtcgcccgagtgcacgcaccacacttgcgcgcgaggtaacaaacctcgttccgaggaaagtaaggaaaccgcgcttcaggtggttagatacgcaaaagaaatgaagcctcggtggattgttcttgaaaatgttacacacatgaagccctggcctagatatccagaactaaagtctgaactggagttgcttggttataaccttcgtgaacagatacttgactccgcagactttggcgtaccacaacgcaggaagcgtctattccttattgctgacttaatatcagagcctgcaacagtatataaaacaaatgagaaggtgatatctgccaaggacatcttagaccctgacggaacctggccaatgaccccccttcgaaaagaggggcgtgcagcggatacaattacacgagcagagagagcgattgcagctttaggcgacagcgttccatttcttcttgtgtactatggtaacgacggtgcaggaggctggcaatctcttgatgtcccgcttcgcaccgtcaccactgtggatcggtttgcgcttgtagtgccgactgactcgggccactacatgcggatgttacaaccaaacgaattacggcgcgcaatgggttttccaggaaattatatattcccggaagtcaccaaacgaaatcgaatccgtctattgggtaatgctgtatgctcccccgtaatggccgctattatcaaaagtcttagcaccaaaactaatacactgaaaaacgcatcaccccaggcctccgagcatgagtcgcatagtgatgactcagctcctcaagagtcgcccgccgtagcctcagcttag

SEQ ID NO: 346230 - DNA, 156 bp, Pseudomonas aeruginosa
atgcagtttgccaaacgcctgagcagctactggcgcggcatcctcagccgcgtgcactggcccatgcacactggccaactggaaggtatcaataaccgcatcaaggtgatcaagcgtatggcctatgggtaccgggacagcgagttctcttcatga

SEQ ID NO: 346231 - DNA, 870 bp, Pseudomonas aeruginosa
atgaaaaactcactaaatcgcatactgagatacttagcgcttccgatttgcgggggagtcgtagttgctttcgccttcggtagtgttgggcttccaactacgattgtaaacgcgaaaggtgtcggtgtcttctttatcgctggcgcggttcttacaatgctgttgggttggccactaatagctctgctcgaatggaggttccacagctaccgacttcgatatgtctttggtggactagtatgcgcacttttgacatggatattcatagaaggcgcattcttttctggcgcttgggagaagatctggactagttcgcacttttggtccaagcgggcacctcgcggtgtaccattcttttcattggtcggattgggagctggcctagcgtatacggccgtagtggctctcatcaatcgcagatttccgcagggcgataatcgtaccaagcaagattcaatatcgcacaccgaactacgaatgctagcagcaccgctgtgcggtggctttgcagcggtcgttgtttttaacggcgcccaagtagcatttggcggaagcgtgcaactcagcatgctcagcgttgacttcgtcaaaggtgcgttttggtcaattgcaatcggctggccgatgctggcaatctttcggaaaagtatcagtcgatctagatggcacaacatcggtgtcagcacactatgcgccttccttgtttggctcattactcagaacgtgatttctggaaacttctggaccgagctgcgtggagctgagagcctttgggatattcatgccgttcgagaactgttgaaattcgtgctgatagggcttgctgccggaactctgctcttcagcattgcgcgccaatatgaaacgtga

SEQ ID NO: 346232 - DNA, 768 bp, Pseudomonas aeruginosa
atgcgaatggcgccgagctggtcaagggtatatctgcgcagggtcgagcgatttattccgtgcgtaatgcgatctgctcccaacatagcaatgctacggtcatcatcaccgacatgcagacggggaaggccttgtcaggtgaaagtccatacaagtgccgctgacacgactgttgtgaggtaccccatgtttactaaatggaaactcgctggactgtcagcgtgtgtactagccttggcaggatgcgggacggcggcgatgctgaagtctttctcaagtttgtatgccgaaccaagcggtggtcaggtagcacaattgcgcatttacgcgaatggtatggtcagggcggttccgggtaagtcttgcatcgactggaacgcaccaggcgcaggcatcatgattgctcctagaaagggcttttctagccacaatggtcgcgatctgggtctgccgaagaccctgatcgtgcataagcctgtgtcatcgctgggaagtttgattacaaccgaactacgagcagcagcaggtcaaccgattgcctttagtttcgatagcgaaggatatcgaagcggcaattaccggcgttcgtgcaacgtcagcttttacttcatcccgagtgcaggagcgaattatcaagttcttcttgcggacactgcaaaagaatgccgtgtggaagtaagcgaactgcgccctacggaaaacaggcttgctccgatagcgattgagacacaggtcgctggactttgccatgtccgcgatttcttgtag

SEQ ID NO: 346233 - DNA, 11991 bp, Pseudomonas aeruginosa
atgaacaagaacttctaccgcatcgtattcaaccgggcgctgggcctgttccaggttgtcgcagagattgcacggcgtaatggaccaggcggaagcgacggcaccactgctgccggcagccggttccttgccaccgtcagacccttgcgcttcgccatggcgctcgcgctcggtcaggcggttatcgtccctatggcgaatgcccaggtcgtggccgacccgagtgcgcccggcaaccagcgcccgacggtactggaagcggccaacggcgttccgctggtgaacatccagacgccgagcgcggcgggtgtgtcgcgcaacacctacaggcagttcgacgtagaccagcaaggcgccatcctcaacaactcccgcgccaatacacagaccgagctgggcggctgggtacagggcaacccgtggcttgctcgcggcaccgcccgcgtcatcctgaacgaggtgaactccagcaaccccagccagttgcgcggctatgtcgaagtggccggtgaccgtgcgcagctcgttatcgccaacccggccggcatttcctgcgatggttgtggcttcatcaatgccgatcgctccactctcaccactggcaagcccatcatcaatggcggctcgctggagggctaccgcgtggaaggcggagccatccaaatcggtggcaacggcatggatgccagtaccacgaactacacggatctgattgcccgttccgtgcaagccaatgccggcatctgggcgcaacagttgcaggtcaccaccggtaccaacgaggtcagcgccgaccatacacaggtgcagaaaatcgccgccagcggcgacacgcctgctttcgcgctggacgtgggggccctcggcggcatgtacagccagaagattgtgctggtcggcaccgaacacggtgtcgggatgcgcaacgtcggcaccattggcgccggggtcggccaactggtggtcacggccgatggccgcctggaaaacagcggcacgatgcaggccaggaccgacacccgcattgacgccagcggcggccttgccaacgccggcacggtcagcgcgggccgcgagcttctggtcaacactgcgcaggacatcgacaacagccagggcacactcaacgcacgccgcatcgaggccaacgcgcagtcgctgaagaatcgtggcggcgccatcgagcagaccggcactcaggacctggtgctgagcgctgcgcacgccagcaaccgtgagggaggccgcattggtctggcggcggccgataccggcatgccaccgggcgatggtggaacaccgggaaccggtacggatggcaccggcggcggttcgacgggcaacggaggcaccggcggcgaccggccaggcaccggcgtcgcgccgctggccaatggcgcgctcaatattgccgccacgttcgacaacgatggtggccgcatcatggctggcggcgatgtcgacctgaccgccaaggctggcctcgacaatgatggcgggcacctcggcacgcgtcggctcgacgtgagcggtggcgacgtcagtaaccgcaggggtgaaatcaaggtcgccggcgatgcgcgcattgccgcggggcagctcaacaacgacgccggcctgatgcaactggccggccccgtcgccttgagcgcacaggacttctccaaccgggccggcaccttccagcacagcgacaagtccgatacccacatcaaggtcagcggccggttcgacaacagcgacggcacgctggccagcaatgccaaccgtctgaccctggacgccggccagttggtcaacaccgacggccaaatcgcccactcgggcgacggtggtcttgtggtcaatgccgggacattcagcggtgcgggcggtgagacggccacggccggcgcggcccggttgcgcctgggtgatagcgaccatcgcaacgctaccctcagcgcaaggcaggttgacctccaggcgcagtccttcgacaaccgcggcggcaaggtcatcgcaacgggcaaccaggccaatcgcctcgacgtgagcggcacactcgacaacggcgacggtggcaccattgtcagcaatgccgaccttggcattcgcgccggctccctcggcaatgcgcagggcaacatcctgcacgctggtgatggccgcctcgatatcgacgccgataccctgcgtggcgagaacggttccattgccagcaacggcaaactgaccctgaaaggcgacaccaccgacctgaccggggcgaccacgcaggccaaggccatcaaggtcgataccggcgttctgaccacggcccagggcaagcttatcgcgagcggcaccggaccgctggagttcaaggtacgtggtgcgatggacaacaacggcggcatcgttgctggcaacggcgccgtggatctccgcgccaaatcactggacaaccggggcggcacagtgtcggcagctggtacggaggctacccgcctcattgttaccgacaagctcgacaactccgacgggacagtcgctgcggccggcgacacgacggtgaaggccggcgcgctggtgaaccagggcggcgccgtggtggcgtccggagactcgaccctagccgtcaccgtcgacggcaagctggacaacagcgccggcggaatgctggccgctggtggcgatctgaccctcaagtccgcttccctggaaaaccgtaaaggcacaatccagcaagcgggcggcggcagcacgctggctgtcaccacgggcgaactggacggcgctggtggcacccttgtcagcaaaggagcgcttgacctgaaggctggcaacgccgacctcagcggcgggaccacccaggccgacaagattgctatcgccgccgacagcctcagcacggccggcgcaagtctggtcgcgctgggcagcgacaccctcgacgtaaccgtcgccggagcgatggacaaccgcggcggggtcatcgccggtaacggtgcggtcaacctgaaggttcaatcgctggataaccacgccggcaagatttccgccgccggttccgggccgagcacggttcaggttgcacagcagctggacaacacggacggcagcattgcggcggctggggacaccacggtcatggccggcgatctaaccaaccggggaggctcggtcgtcgcgtccggtcaatccgcgctgaccgtcgatgtggccggcacgctcgacaaccgcggcaaaggcacgctggccgcaggcggcgacatgaccgtctccgccaatacgctggacaatcgcgaaggcagtattcagcacgctggcgacggctcgctgctgctgaccgccaacgccctgctgggcgccggtggcaccatcgccaccaatggcggactgaacctgtccggtgagaccaccgacctgcacgatgcaaccacgctggccaggcgcatcaacatcgacaccggttcgctgaccactgcgggcggtagcctgacggctacgggcacggacctgctgacggtgcgtgcgcgcgaccacgtggacaacacgggcggcaccattgccaccaacggcggactggatttgcaggcgcggtccctcgacaaccaggctggcacgatgtcggcggcaggttctgcggccacccgcgtcgcggtcaccgatgacttcgacaacaccgatggcaccctggccacggctggagataccaaggtcacagctgccgaactgcataaccagcgcggctccatcgtagttgccgggcaagcggccctggaagtcaccgtggacggcctgctggacaaccgcgccaaaggaacgcttgccgccggcggcgacctgaacgtcagcgcgtcggtgctcgacaaccgcgatggtgccatccagcatgccggcgacggcagtgccaccatcgtcgctgctgaccttcaaggcgctggcggcagcattggcagcaacggcgctctcgatatcagtggcaataccaccgacctcagcgacggcagcacgttcggcgaacgcatccgcatcgacaccggccgcctgctcaatgctggcggcaagctcatcgccactggcgccgacctgctcctggtccgcgcccgcgacagcctggacaacaccggcggcaccatcgccggcaatggtgcgcttgatatgcacaccgcctctctcggcaaccgggacgggaaaatcagtgcggcaggttccgccgatacccgcgtggaggttgacggtaagcttgacaacgacggcggcgaactggtggctggcgggagcacccacatcactgcgggcgacctctccaaccggggcggcaccgtcctcgcagcagaccacgtggcgctgaccgtggacgtcgccaatcgcctggacaacagcgccaagggcacgctcgccgcaggtggcgacctgaccgtcagcacgtcggtgctcgacaatcgcgccggtgccatccagcacgccggtgaaggcatcgcgaaaatagcggccggcgacctgcaaggcgcaggtggaaccatcgtcagcaatggcaccctggcgctgagcggcaacaccaccgacgtcagcggcggtatcacgcaggccagacaggtccaaatcgacaccggcacactcaccaacgtggacggcaccgtggcggctaccggcgctgacccgctggtcgtgcgggcgcgcgagcgcatcgacaacaccaacggcacccttgccagcaacggtgcgctggacctgcgcacgggagcgctcgtcaatcaggcgggcaaaatccaggccgcaggcaacggtgacaaccgcatcgctgtcgcgggccagttcgacaaccgtaacggcaatgtcatcgccgcgggcgacaccacggtaacggcgggcagtttgaataaccagggcggcaccgttgccgctgccggccaatccgccttgaccgtgcgtgtggatggcgccttggacaacagcgccaagggcacgctcgccgcagacagcgacctgaccgtcagcgcgtccgtcctcgacaaccgcgacggcgccatccagcatgccggcgatggcagcgccaccctgttcgcgggcgacctgcaaggcgcgggcggcaccatcgccagcaacggtgcgctcgatatcagcggtaacaccactgacctcagtcagggaaacacgttcggcgagcgtatacgcatccacacgggccgcttgctcaatgccggcggcaagctcatcgccaccggcgccgacttgttgctggtccgcgccggcgacagcgtggacaacaccggcggcactatcgccggcaatggcgcgctggatatccaaaccggttcgctgaccaatcgcgacggcagcgtgcaggcggcgggcgatgcggccacccgtgtcgacgtggcgcgcaccctggacaacaccggcggcacactggccgcggccggcgccaccaccgtcaaggcgggcgaactcgtcaaccaggccggtaaagtgcaaaccgccaatgacgccggcctggccgtggaagtcgccggcaacctggacaaccggggcaacggcgtcatcgtcagctctggcaagaccgatgtgcgcgccggttcgctcgacaatcgcggcggcgcggtcaatgccgcaggcccgttgaccaccaccgtccaggagacgctggacaaccgtggcggcaagctcgtcagtgccgcagacctcggcatccaggccggtatgctggacaaccgcgacggcggtctggtcgtctccaccgacggcaaactggccgtggacacacgcggccgcaccgagaatgccggcggcacgctgcaaggtggcggccatgtcagcctcgccaatgccgggctcgggaatgccgggggcacggtgctcggtgccaatgtcgacatcgacacccgtctggcctcgctcgacaacgccggcggtaccatcgccagcacccgtggcgcgcttggtgtgaacagcggcgctctgaacaacgcaggtggtctattgcagtcggcgcaaggaatgcgcgtggacacccacggccaggcgttggtcaataccaatgccggaatcaccggcggcatcctgagcggcgacacgctggccttgaacagtggcagcctgaacaatcgtgggggcgtggtgcatggccagggcgacttcatcgcccgcaccggcggcatcgacaacaccgccgggcaattgggcggcagcgccaatgtcgatatcggcgccacgtcgctcagcagcgcaggtggcaaggtccaggcgggcaagaacctgaccgccaacctctccggcgtggcgaacaacaatggcggcctgatggtcgcgggcgatgacctcaaggtcaacgccgcagagattctcaaccgcgacacgcaaagcgcggatgccaacaagccgctgggcttgcagggcgatagcgtgctactgacggccaatcgcacggataacaccgccggcaccatcgccgctgacagccacatcggcatccgcggcaccggggcggcaagcctgctggacaacacccgcggcagcatatcctcgggcggcagcatcgacgtggccgtcaaccgcgtgctgaaccaggcgggcacgctgctggccggaaaatccctcggcgtgactgccgataccctcggtggcgacggcagtctgctgtccaagggcgacctgagcctcgtcctacagcaggacttcaccaacctcaaggaaatcaccgtcaacggccgcgcgctcatcagcagcgccggtctattgacgaaccacagcctgctccaggcgggtgaccttgaagtgcgcggcactaacgtcaacaacaccgttaccggtgaaatgagcggtggacgcaccaccgtcgtcgcaagcaacaccctgaccaaccgtggcctcatcgacggcggccagacccgcatcgacgccggtaccctggacaatgtcggcaccgggcgggtctatggcgaccacctcgccatcagggccggcaccctcaacaaccgcgaggaaggcggtcgcgctgccgtcattgccgcgcgccagcgtctggatatcggcgccagcttcatcaacaatcgcgagcaggcgctgattttcagcgccggtagcagcagtgacgccatgaacatcggcggcacgctcgatgccaactatcaggccacgggacgcgccggcctcatcctcaacgacagcgccaccatcgagtcgctgggcgggctgaccatcgacagtgcccgcctgctcaatcgcaacctgcatttccgcaccgaactggcccaggtgggcggtcccacaaagtacctctacatccagcccaagggtgacccgaacaagcacagcgccgacgaataccgttgggagaaatggagccgcgccggacgttaccgccacaaggaaaccggcgcgcaggttcgggcctggacccaatacgacgtcacccagaccgagtacgaaacgcaggtgattgaaagcgcgcccgcgctcatccgctccggtggcaacatgaccctgcgcggcgacgaactggtcaacgacaagagccaggtcatcgccggcggcgtcctgcaaggcgaccttgaccgcttgaacaatgtggctgccttcggcgagcacgtcacgcggcagattgggaccagccaatacacctattcaaggtggcgcggtggactgaggcgttaccaccagcgtcggtgggacggcaagattgcctacaccccggccgaccttgtgcaaacggtcgaactcgacgtctccagggtcgtgcagaacgccgcgggcggcggcagcggttttgtcatgggggggcgccagaccggtcaggtcagcgccagcgtgggcgacagcgccaacgcagccggcggcgccagccagaagcagataacggaagtccaggcgcaggtaagcaacgtcctcggtccgaatgccgccacgggcacgcaggtcaccggcggcaatggtcctgtccgggtcagggaacaggatgtggccggcaacaacggaccccatcaggcacaggccgataccctcacgtcgacggacggcccgggcttcagccagggagccccggtcgatgcgctggccggccccggtcaggccagcgggcagaatgtggccgaccaaaacaatccggacaaccagcaaggcggcacggtcaacggcgccagcagcgacgcgccgatggtcatccgcaccgtccaggtggacaccgacgtacccgccaacagcctgttccgcaccggccccaacgcaggcggctacctcatcgaaaccgacccgcgctttgccgactaccgcaactggctcagctccgactacatgctgtcccagctcggctatgacccggccaacatgcacaagcgcctgggcgatggtttctacgaacagaaactggtgcgcgaccagataggtcaactgaccggccgccggttcctcgaaggttacgccagcgacgaagcgcagtaccgcgcattgctggaagccggcagcaccttcgccaaggcatggaacctgcgcccgggcgtggcgctgagcgccgaacagatggcccagctcaccagcgatatcgtctggctggtcgagcgggacgtgacgctcgccgacggcaccaccacgcgcgccctggtaccgcaggtctatgtccgcgtgaaaccgggtgatatcgacggcaggggcacaatgctggccgccaacgccatcgacctcaatctcaagggcgacctggtcaactccggcaccatcgccggacgcacggcggtcaaactcaccagcgagaacctgcgcaaccttggcgggcgtatcaccggcgatgccgtcgcgctcaccgcgcgcacggacatcgacaacatcggcggcacgctagacgcgagcagcaccttgctggtgaacgccgggcgcgacctcaacgtcgccaccaccacccacagcgacgccaagcaggccgggcgcagcgatttcagccggacgaacatcgaccgggtggcgggcctttacgtcaccagccccggcggcattctgttggccagcgcaggtcgcgacgccaacctgatagcggcgcagattattaacagcggccgggacggccagacagccatcatcgctggccgcgacctcaccctgggcaccgtcaagattgccgaacaggaaaacaacgtccgcaacgccagcaactacctcaagcagggctatgtccaagacgtcggcactaacatcaccaccgcgggcgacgtgcgcctgcaagccggccgtgacctgaccgccatcgcggccaccgtcaccagcgaacacggcgccctggtcgccgtcgcgcaaggcgacgtgaacatcctcgcaggagaagccagcagaaactggagcgaaggccgccagcacaagtccaggagcctgctgggttccagcaagaagaccagccgcgacagcctcgaagaaaccaaggcagtatccagcaccttcagcggcaacaccgttgccgtgcaggggcagaacgtcaccgtcaccggcagcaatgtcgtgtccgatgccggcaccgtcatcgtggctcgcaacgacctgaccattcaggccgctaccgaaaccagcagcgaaagccacttcagggaagccaagaaaagcggcgtattcagtggaggcggagttgggttcaccgttggaaaacaaatgcagagcgacgaccagaaggtcattcgcactacggctgcatcaagcacggttggaagtattagcggcgacgtgaatcttgcagcaggaaatcagtatcggcaaatcggcagcgacatactggcccctgaaggtgatatctcggtggtcgcgaaaaacatcgaaatatctgaagcacgacagtcgagccaggcagagcaagagtcgaagttcaagcaaagcggtctgacggtcagcctgtcatcgcccatcatcaacgcagtcgaaacgacaagcaaggtggtcaacgcgacccgcgagaccgacagtggtcggatgaaagctctcggttcagcgatggctggcctaaatgcctacgacgcctacgcggccggcagcgacatcgccaaagcggttaaaaacggcgaagatcccagaaaggccgcaagtgtggggatcaacatttcggcgggctcctccaagagtgaaagccgcacaacccaaactactgaaaccgcacatggctcaacggtaaaggccggcggtagcgtcagcctggttgcaacaggtgcggggcaggacagcaatatcctcatccgcggaagcgaaatcacagccggcaagaacgctacattgatggctgacaatcgtgtggacctcgtggccgctgaaaaccatgagcaaatgcagggcaagagaagcagcagttcagcaagcgtgggagtgggcatcaacttcggaggagaccagaatggcatcacgctgaatgcgtcaggctccaagggacgcggcaagtccaacggaaaagacaactggtacacgaacagtaggctcaacgctcgtgatacggtgctgatttccagtggcagtgataccaacatccgtggtgccggagtggcaggcaataccgtcaagctggatgtcggcggcgatctcaatattgagagcttacagaacaccaacacatataccagcaaggataagaccacgggagccggcattagtgtctgcatcccaccgctctgcgccggcacccccgtatcggcgaatatcaatatccagaaggccaaggctaccggcaactatgccagtgtggaagagcagtcaggaatccaggcgggagacggtggtttcgatatcagggtcaagggaaatactgaccttaaaggtgctctcatagccagcaaccaagccgccattgatgctggaaagaaccgacttgaaacggcgtcgctcacgactagcgatattcaaaaccgagccaaggcgagtgcgaagagcagtggcatcagcctctcttcggactatctgagccagggcaagtatggcatcggcaagacgcttatcggcaatgtcatggatagcggcagtgctgccgactcatctaccggaattaccaagacagcggttagcaatgcgaccgtgataattactgacgagtccaaacagaaagagctgacaggcactgatgccgagacgactgtcgccgctcttaatagggatacggtcaatgctcatgtcgctgcgcaaaagatagacataaaagaactggagcagcaagcgcgtgctgagcaagtcattaagacagctgtcactgcccaggcattcaagttcagtgatgacgtttaccgtacgatgttcctagatgagcatccaatttatcgtgtagagctgaacgcagaaggaaaggtggttttcgacgagtttggacacgcggtagtgcacaaactgtcgccagaggaaaaagcgaacatgcaagcaggttcgggtggtcaggtacgagttggggtcaatgggattttcaatgatgctgatgctgccgcctactatgctgaccagcataacggaggtgtcgtccagcctctttacattgttcatttcccacaggccgacagcatggtgggtgagctgatggtagcgggctatcagaaattcctggagaacaacttttggggtctgagcaactccacccaggaagttcaaaatctgatgaggcaatatggaatcagtggcctgctcctggatgctcacagccggggttcaatgacggtgggcaatgcgatggggtcacttatcaatgatggtgacagcggaattctcgccaataccgacattaatttttatggaccggctttcagcgcccagagagcagctgatctcctttatcagcttagtggtggcaccaaggaccttgtgaaccttcaaaaccacaaggatgactttgttggctcgatactaggcggaaacccagcgacgcattcgcttcgtcccgacagtagcaataaagtcaaggagtggattcgtatgttctcaagtcccaatactgttcatagctgctatggctttgcagggcgagaatgcaccgatagatataatgatgcgaggactatagaaatcaggacaaggatcgaaagatga

SEQ ID NO: 346234 - DNA, 1704 bp, Pseudomonas aeruginosa
atggctagccggattcgacgagtgcgttgggccttgttcggcctgttggcgtcgatggtgccagccttcgcgcagacgcaggacagcaccgcgcaggagctgctgcgtcaacaggagcgcgagcgcgtcctgcgcgaacagcaggagacgacgcccgacgtgcggctgcgcccggcgcaggctccgccgccggacctgctgccgccgaacgagacgccctgctttccgattgaacgcattcggctcgatggcgaagatgcgcatcgctttctctggtccctgaaagcggccgaccccaggaatgatcccgccacgggacgttgcctcggcaccgacggcatcaacgtggtcatggcacgcgtgcagaacgccatcgtcgcccgcggcttcgtgaccacccgcatcctcgcctcgccacaggatctcaaaaccggcacgctgacactaaccgtcgtgccaggccgcatccgccacatccgttttgcgcccggcacttcgcccaaggccactgcctggaatgccgtgccggccaagcgtggcgacctgctcaatctgcgcgacatcgaacaggcgctggagaacttcaagcgcgtccccaccgttgaagccgacattcaaatcacccctgccgagggcgacgatgcgcgccccggcgaaagcgacctggtggttctctggcagcagcgttccccgcccgtgcgcttcagcgtgtcgctcgacgactccggcagcaaggcgaccggcaagctccagggcggggccacgctctcgctcgatgacctgctcatgtggaacgacctgttctacgccaacttcaaccacgatgtcttcaatggcaacagcaagggcacccggggttacaccgctcactacagcgtgccctacggctattggactctcagcgcgaccgccagtggctacaagtaccggcagaccgttgccggctacagccaggactatgtctacagcggcaccagtgacaacgccgaactacggctgtcgcgactgctctatcgcgatgccacgcgcaaaaccgccctctacggacgcggctggatgcgcaagtccgacaacttcatcgacgacaccgaaatcgaggttcagcgccgccgcaccggcggctgggaactggggctgacacaccgggaatacctgggcgaaagcacgctggatgcgagcctggcctaccggcgcggcacgggcgccttcaatgcgatgcccgcgcccgaagaagacttcggcgaaggcacctcgcggatgagggtcattaccgccgacgcccatctcatggttcccctcagcctcggttcgcagcgcgcccgctacatcagcagttggcgtgcgcagtgggaccgcacgccgctggtgccgcaagaccgcttctccattggtggccgctacaccgtgcgcggttatgacggcgaactgacgctaatgggcgagcgcggctgggtctggcgcaacgagatgggcctgctgctgggcggcggccaggaactctacttcggggccgattatggccacgtgtccggaccgtctacgcgctggctgcaaggacgcaatcttgccggttcggtgattggtctgcgcggtggtgcggcggggttctattgggacctcttcgccggcacacccctctccaagcccaagggcttcaagaccgactcgatcaccaccggcttcaacctcagctggtcctactga

SEQ ID NO: 346235 - DNA, 933 bp, Pseudomonas aeruginosa
atgaccgtgaagatttcccagactgccgacgtccagcgcttcttcgaagaggccagcggccagctcaacgaacgcggcgatccgcgcaccaaggccctggtgcggcgcatcctcgacgacacggcgaagttgatcgaagagatgcaggtcacgcccgacgaattctggaaagcggtggactacctgaaccgcctgggcagccgccaggaagccggcctgctggccgccgggctgggcctggagcattacctggacctgctgctcgacgcccaggacgccgagtccggcctcaccggcggcacgccgcgcaccatcgaagggccgctgtacgtcgccggcgcgccgctaagcgacggcgaggcacggatggacgacggccgcgaccccggcaccgtgatgttcctccagggccgcgtcagcggtcccgacggccagccgctggccggagccatcgtcgacgtctggcacgccaatacccaaggcacctattcctacttcgacagcagtcagtccgaatacaacctgcgccggcgcatccgcaccgacgccgacggccgctaccgtgcgcgcagcatcgtgccctccggctacggttgcccgagcgacggcccgacccaggaactgctcgaccgcctcggccgccacggccagcggccggcgcacatccacttcttcgtctcggcgcccggccatcgccacctgaccacccagatcaacctggcgggcgaccgctacctgtgggacgacttcgcctacgccacccgcgatgggctgatcggcgacctgcgcttcaacgacgatcccgccgcggcccgcgaccgcggcgtggagggcggacgcttcgccgaactggatttcgacttccagctccaggccagcccggcgcccgccgccgagcgccgcagccagcggccgcgggcattgcaggagtaa

SEQ ID NO: 346236 - DNA, 291 bp, Pseudomonas aeruginosa
atgctgttccacgtgaagatgaccgtgaagttgcccgtcgacatggacccgcaacaggccgagcggctcaaggccgaggagaaggaaatggcccagcgcctccagcgcgagggcagctggcggcacctctggcggatcgccgggcactacgccaactacagcctgttcgacctgcccagcgtcgaggcgctgcacgacaccctgacccggctgccgctgtttccctacatggacatcgagatcgacgggctttgccggcatccctcgtcgatccatgccgacgaccgctga

SEQ ID NO: 346237 - DNA, 228 bp, Pseudomonas aeruginosa
atggccgagatcatcgaccttgatacccgccgcccccacgttactatcacgacccactcaaacaaggctcatgtcgttccgctttccgtgttcgagtcgatcgccagaggaaacatgaccgtcgactctctcgatcatagggatgaactgatgcgcgtgatcgtggctgaatggatgggatatctcggcgtgcatggcgctgatgctctgcgagtaatcgaggattga

SEQ ID NO: 346238 - DNA, 207 bp, Pseudomonas aeruginosa
atggaggaacccgatccggggtccatggctggtgtgcagcggcgtgtagaactggacgggcagatcgtgggcggtgacgcggaggaacagctcagtgctgtccggctcgcagcgattggcgagcagcaccaggccaagctgggactgcgtgaaggtaaggccgcctaccaccccgccgaagctagagctcgattgctcgggagttaa

SEQ ID NO: 346239 - DNA, 1590 bp, Pseudomonas aeruginosa
atgtctaaatcagtcatccgttacgagcttcatgacgtctgctattggtatcactgcctggatcgtattctccgggccgtacaacacgtactgctctccctgttcagcgactcttactgccttttcgtagacctgaatgtttccctcagtgtcttcaatcgctactgccattttctctcctccgcaggctacgtgccaccggagtactcatatcccatctggtaccaaaaatccaccccggtgaggatcaccaccatgtctattacttacggaagtgtctgcagcggcatcgaggctgcgagcgtggcctggcacatgctggggtttcgcgccagttggttcgcagaaatcgagcccttcccctgcgcagtactggccaaccgctggccggcggtacccaacctgggcgacatgaccaagctcgcccgcgaggtgctgcttgggatcatcgctgcgccgctgatcctggtgggcggcacgccgtgccaggacttctccgtagccggcatgcgcgccggcctggccggcgagcgcggcgccctgacaatgaaattcgtggagctcgcagatgcaattgaccatgttcgaccagacggagacgagtgcgtcgtcgtctgggaaaacgtccccggcgtcctgtccgacaaaggcaacgcgttcggcaacttcctcgcagccctggtgggcgaatccgaagaactccagccgccagggggcaaatggaaggacgctggttgtgtgtatggacccaagcgaacagccgcgtggaggattctggatgcccaatatttcggcctggcccaacgacgccgccgtgtgttcgttatcgcaagtgctcgagcagacttcgatcccgcagcggtactttttgagcgcgaaggcatgcgcagggatcatccgccgcgccgaggcgaggggcaagaccttgccggacacgctcctttcggccctgcgctccagtgcggctgcggatatctcttcgacctgagccttggtcagtggggttgcccaaactgcgagggagacgaagggcctgccgtcgaagtaatggccggcgtccctgccttcggcggggagaaccagagccggtctctattccaggccggcgcgctgaccgcccatggcgttcggaacgacttcgcatccgagacgttctgtgtccacggcacacaagacctcaacaccctaggcgacatggctcacacccttggccgaaacagcgggcaagaaaatgccgttttcgccatacaggccggagccctccgcacaaacccagacagcggccccgatggcgtcggcgtacaggcgaaccatgcctacaccttggaggcccacgcggaggttcaagcggtcgccgtagcgctgcggggtcgcgaacatgggggaacgatagagctcggcggcgacgtagcaggatgccttcgcgccagctccggcggcggtgacaagccgcatgcccttgtccattccgccgtccgccgcctcaccccccgggaatgcgagcgcctgcagggattccccgacgactacacgctgatcccctggcgtgggaagcccgctaccgaatgtcctgacggcccgcgctcctga

SEQ ID NO: 346240 - DNA, 780 bp, Pseudomonas aeruginosa
atggcccgacctgaacttcggcttgccgtggacgagcttcggccgcctgcgcccgctgcacaccaacgcggtgatcttcgccttcggcggttgcgcgctgttcgccaccagctactacgcggtgcagcgcacctgccaggtgcgactgttctccgacaccctcgcctccttcaccttctggggctggcaactggtgatcctgctggccgccatcagcctgccgctgggctacacctcgtccaaggagtacgccgagctggagtggccgatcgacatcctgatcacggtggtctgggtcgcctacgcggtggtgttcttcggcaccctggtcaagcgcaaggtcaagcacatctatgtgggcaactggttcttcggcgggttcatcctcaccgtcgccatgctccacgtggtgaacaacctcgagctgccggtgaccttcaccaagtcctactcgctgtacgccggcgccaccgacgccatggtccagtggtggtacgggcacaacgccgtgggcttcttcctcaccgccggcttcctcggcatgatgtactacttcgtgcccaagcaggccgagcgtccggtctactcctaccgcctgtccatcgtccacttctgggcgctgatcgcggtgtacatctgggccggcccgcaccacctgcactacaccgcgctgccggactgggcacagtcgctgggcatggtgatgtcgctgatcctcctggcgccgagctggggcggcatgatcaacggcatgatgaccctctcgggcgcctggcataa

SEQ ID NO: 346241 - DNA, 1872 bp, Pseudomonas aeruginosa
atgaatccggcaacgactgagcatggtgatcgcgtccgtgatgcagatgaggtgatccgggattgcctggacttagatcgcccacagagcttcttcctgtacgccggcgcagggtcaggaaaaacacattccttagtcacagctgtgagcgagctgaaatcgcgtgagcacaaaaggctgaccttcgaaggacgccaagttgccatcatcacctataccaatgcggcgtgtgaggagatcgcccgtcggctggagcacgatcccttggtggtcgtatccaccatacacgcgttttcctggcgaatgatccaaggcttcaatgacgacatccgtgaatggctgcgtatcaaactcgcagaggatgttgctgagctgaacgataagctcgccagagccaggggagacaacaagacggcacgtgcaaaccgtgcgtccctcgaaagcaaaacacgacggctggcagcactgggcgacgtcatcaactttacctacagtccaacgggggaaaaccgggggcgccaagcgctgaatcatgccgaggttgtccagatggcagcagcctttattcagcggcctccgttgctggatgtgatggccgatcaatacccggtgctcctgatcgatgaaagccaggacacctacggcccactcatggatgctttcctgaccgctcaatcactgattccaaagcggttttgtcttgggctgctgggcgacaccatgcagcggatctacaacgatgggaaagagcatttgaagcaggccatccctgctgactgggccatcccagagaagcccgtgaacagacgatgcccaacaagggtggttgaactgatcaacatcatccgccgggccgccgacgatcaccaacagactccacgacccggtgccattcgaggggccgtacgtatgttctgcacccggcaggttgctgctggtggatttgagttggaggcacagatctctcagcggatgtcgcaagtcactggtgatgagctgtgggccgctggaacctcggcgcgaaaaacgctcatcctggagcacaagatggctggcaggcgcctcggttttgagggggtctttaccccgctctacgcagctgagcatctgcgcacaagcttactggatggcacgctaccggtactcagacttttctttgagggcctcatgcctatcttggacgccgccaatagcagcgaattcgccctcatggaagccgtacggttgaggtcacccctactcgatgctgagcacatgaaagttgctcccaaccaacttgcactgcttcagcaggttggtgctgcctgtcaaactctgtgtgggttgttcagcgacaacgaccctcccctggccgagattgtgcgggtgctagcggaaacggggctgctcgaaataccagatcggctcagagcggccctcgtgctaggtgtgaccgacgaggagccccctgagaccgtcgaccgtgaagcgcttgaggtgcatgcctaccgggtgctgttggggcgacattattcagaaatggccgcattcgcagggtatgcccaaggcttgtcccctttcgacacccaccaaggggtgaaggggttggagtttccaagagtcatggtgattctcaacgatgaagaggctggagggttcctcttcagctacgagaagctgctgggcgttgagccgccctcagcgaacgacatcaggaatcagcgcgcaggtaaagatgacgcgctgtcccggacgcgacgtttgttgtatgtcacttgcagccgggccgaggaaagcctcgcgattgtggtgtacaccgcgcaacccgagctcgcgaagcaacgggttatcgaggccggctggttagagcctgaagaggtggagatcgtatga

SEQ ID NO: 346242 - DNA, 840 bp, Pseudomonas aeruginosa
ttggatatccccactcccttcaatatcatcgtaaaggccgtaaagtggatttggcagcgtgtgacaaaagttctgctgtacaaaacctataccgcatcacaccgaaaatgggtcgcccgtcatcgcctgggcgcgcagtggcatcatctgggagcacatctggagtattcagtacgacttgctcagcccacagactcagaacctcagatttcccgccttgcacttcgatccactgaagaaagtcttgccaaagtcgacttgtatttcgaggcgcttggtgcgggcaatcgttaccaggaaaaaatttcggtgtgtgatgttgatcaccgcccgattgtctgcagcctgaagagcattcctgttcaagcgttcgtgggcggacaggaccgaggcatagctttctcagtggagcatgtacagttacgacaatgcgtagttcagcgctcaagcggtgaagtcttacctgcgcgtgactcggtaatattcaccatgtctcatagctggatcatgcatgatgaatgggcgcgtgggtgggggcgttggtggaactgcaatgcgatcaaatttgccaagggtgagttagctgtttattggcgctttgcttttggattaccgcagtaccgtgtgtactcaccctatgcttcctactcacggtataaattcggcttgagccctgtgttgcaagggtttggttggataatggcccagccactcttagtgacggtgcaattttggctggcgatctggtcagggctttgtgtgatggataaggatgacaaacttcgttttcgttggaatgccaacaaggcagcgagcgaacagcaggaagatctggcttga

SEQ ID NO: 346243 - DNA, 4362 bp, Pseudomonas aeruginosa
gtgacaagcagagtgaaaaggagtgcgataccagccagtggctatatgtaccagacgctcgtaggcattcgtgttctgtgcagctggctggataacccagggatgtacgaatgggtgcagttcgaagcagatgatttacaggaagcccgcgggctggacgacatcatcgccagcagagctgacaagctgctggagctcatccaagtcaagttcacagtcgctccattcgaaccagtcaatgctctctcatgggattggttgaccgaacgcaagggtgttagagggaagtctctactggagaaatggtcaagcgcagcttttggcgttggccttgagaatactgctgagctgcgtctcatcacgaatagacgcccagacgcagaatttactgcgcacctacgtgacggaaaggtgcttctcgaggcattgcccgaggctttgcgtgaagaaatagaggtgcatgttgggggacgccagaacgctgtgcgcttctttgaaagatttgagtttgctcacagttacgtggggtatgaatcgctggacagaaccctcagcgcagctctggaggggcgccacacagatcacttgggctggctgacgctgtgccggcgtgcaatcttctggagtacttacaaaaatgcccccgcccctgatgggcggatcacgttggaagtcttgagaagcactatttctgagcggcagcctcgacctctagaccaagaattccgagttcctgcaggctacctaccgcctgaccccgagtttgcggatgagtttctcaagcaggccgaagagggggcgtgggacttgcgcgtactgtggggctcgccggggcagggcaagagcaccttcttgagttatatgtgcaagcgtttggaggaaagcaatctgccgttcatccggcatcattatttcctagatctacaggactcgtcagagcgcttcaatctgaagagcgtggctcactctctgatctcgcaaatgcaggccaacgatggcgaagaattattgcatttgaacgaccagccggaaaacctgcgccaatggatcactgcttgtggcgaaacttatgctgcccaaggcaagcgcttcttcgtgcttatagatggactggatcatgtttggcgcgagaatgatgaagagattgcacctctagaggcactcttcgtacagctactgccacttccgccgaatacgtccctgatcttgggcacgcaacgcgtagacaaggcacagctacctgcccgcctgaatcgatacttggaaccggagcattggttagagttgccacgtatgcacttgcgctctgtgcaagcatggttgtcgacccagtacgaggcggggctatttgagacaaatagcgatgagttgccacagaaggagttgtctctactgtcggcggcattcgagcgcgctagtgaggggcacccactggttctaacctatacgttcctggctctgacacgtgatggacgagtgttgacacctttgctcttggagagcagtataccgacgcccatgggagacgcgcgggcctactacaacgcgttgtggcaacggctttcttgggaagccaaggacgcgttgcatctcatggccgaggacggattcatctggccggctggtgcgcttgagcgctgccttggctcagtgaactcgagtctggaggcggaagtcggccacctcctatctacggtagacgccggtttggtggcctttcatggcagcctatacgtctttatttcaggccaggtagatcacgcgaagcgtgttagagctcttctgccaagggtacagtcctggcttgagacggaagcttcaccatacctgcgctgggcttggttgtggctatataaatcaaggcgtggcgaacacgatgagcttcttgcgaaaactacccgggcctgggcagtagaggcgctaacgcgtgcttatcctccatcgcagattgaccgtatcttaacggcggcagaggaggttgctttttccagtggagactacgagcaggccattcgtaagcgggcactcaagactagaattcacaacggtctgagctatcagctcgatgatgcgaggatcctagaagactgcgcactacgcttgaccgacgatccttaccctgcagtgttacttgcgtctgaagtcaatcagtccaacattgctggcttgcaccaattagcgatgctttacatatcgttagaccagagggatcacgcagcagaagtccaagagcggatgcggcaaagaatcaacgaccgcattcaatcaaggacaatccaggcgagcgagtatgacgatatttttgaactgtacttggaggttgcagcggggactggacgttacgaaccacagcgagtggttaaactattgtggcgacgggattcggctgaagaggcttttgcccgcttcctgaatcgtgcttgccgcgctgccgacctttcgccttgcatgacgttctctaaagtaccgatgcctgctcggctgcggcgtattttagaggttgaagccctgcgaactgcggcttggacaggagccaagatacacgagtggggcgaattcaagtacttcaaaaagcacccgctttcgatgtgctggcgactcttacaccataccgcctctgaaactcagtctttgccgtttttgcctgcgcatgaagcgctcagcatggagtacggccattacgacgaaggcgggtttgcacagtaccttcacttcatcttcttcgctgcagtggcgcgctcgctacaacttcgtgaggcgaagaacgttatcggcctgggggttcgcaccaataggaagtggcttagcagggtgttagatcggctggcggcagtggcgcatgcctgcggaggcgtgctgtggcgtggtgagttacctgcattctcctttgtctatcaacagattggccttgagcgccctgctgtgaatgaccatgagagttggtccgatcttcgcagcttacagaaggcactggtgttgatctcggcggatatcttctttctcgcccggtcgcgcgctcatcctgagcatattcctccatgtgagtggggaagggctaaggagtcaggtttctttgtggaagagcactggagggacttattcctgagacggcattatcggttgttacatgaggatgccgtggccttggatattcaggctcaggaaagggttaacaactcagctgtcgaaccattcaatgaaaaggccagcgagctgtcgagcctgtgcagctgggcgactgcatacggtttgaatgacattgccgatcgactgcttgcatcgacctatagatgcgcaattggatatgggtggcgcaaggactaccaactgtcccaattgctacagaccgtagaggaggtgtcagagtacagcatcagtgcggcaataggtgcaatcgagaagctcgcacccatctatacaagcatcgacaagatgacggagaagtccggcgctaacaaatcggatttagctatcctgcttctgaaactaatgccgaagacttacattcgcttctatcgatatttgctggatcaatgtgaatggtatgaggctgagagaacatttgctgcctttgctcagcagatggatcttcaggctccggcgacgaaagcagcggcagcgtttttgtgggactcgcaaactcagaatgcaatccgctcgaacacgcatgtgccaccagacgtgctgctagcgccttgggggaacaggacgaaggcagagtcggacgagcaagctagctatgtgacgcgctctgaaccacctgtggacgaatcggtgatgccgcgtattgaaagcttcccaccagagacgttgccggagtttctggaggcagttgagtccgcgaagcagtaccaactcggaaacaaatggattaccgcttggttcgagcactgggtgactcatggccgcggcgttgagttgcttaccgcacttgatgccgcacacaaacggcatctcttgaagaagcgaggtacgcaactgctcgatctggccttcgcgttgagcctgagtctgcaaggtccggccaaggccttccagtggattatcgaagcccatcggtaccgtaggggctggtctgagcattatcacgggaagtccgcttcagcccagcgcatcgcacttgttgctcatcactatcccaagcgctgggccgaattcgtagccaagtccgcagtaccgattcctgatccgtatgagtcagggctgataatcccggatacagctctagtcagcttattgctgaaagtcggtgagatagagcgcgcagtgagcattttgcaaaccttggtagagattacccaggaggagttcgaggtgcagccgcttgagcgcccttcttggttggaaggggatatgaaatga

SEQ ID NO: 346244 - DNA, 1431 bp, Pseudomonas aeruginosa
atgacgcctcagcaagtggcggaagttggagtggcgcgcctgggcttacctattcctatggccaagctagtgactatacaagccattgccgctgcactagacgataaagagactgcggagatctacgctgatgcattgaccgagtggatcaggactcgcgagctggaatcacagtgcctagaagctttgtgtccattgctgatttctaatcctaaaccagctctggttgcacgtatccagcatgcgattacgcggccctctctggcgtctgatctcttaatgtcaatcgctacacatacgtcggctgagtcgccatcttgggctggatgtcattcaggtctagcaccaagacatcttgatctgaccaaggaagaacaggcgctagtcgcgagctcattcataccgccaatcttcacgcacatgctggaggagttacaggaggcttcaggtctccctttccttcgccaatgtgcgttcgagtacagagtgctgtcggagcgcatggacatcatgagtgatgggtacctggactattttctcgactcagaacgaggcaatacaggccagtttgtggcgatccatggacacttagcccggtccgcttaccttcggaccttagcttgcgccgtccagcactggaaaatgcctgatgacgatgccttttactatgcatcgactgcattccccgcagaaccgatcttcttgcgaattgcaccacaacctgctccggcctgggcttcgtttgttcatacccgatcaatgcgtaacgcttctgatgcacaaattcttgcgcgtacggtagttcaacacattgagcaggcagaacaggcaaggatcatgcactgctcactggccgtggtagatgagtctaggtatcacgcggagctcgaagttttcgcagtggtgcagaccaagaaggccgtcgatgctggcaagatcataagcttttaccaccacctacttggtagagtcatgccctctcggccggggcaccgctcattcgtttcgggaggcataggacgtgaggattttcaatcgctggggtttgctccggttgttgttccgctaattggggaaagcgtcgggtacctgcaaaccgaatctattgccagagtgccttatatgccgttatcaacccggggggctccaatgatggagctcgtccccttggatagtcgtgctgttttgcgctcagggggatatgacgtagggacatggagttggtggcggtggaactggaagcccagtcatcccaagggatggctgccctcgacggcatgctgcgcgtgcctcagaccggctgtagcacaacagatggctgaggatctggatggacgcattgagcaggtgtggaagctcaccacctggcagcgggatagtgattatggagagtggagctgtacggaacaggtcggtagattggagcgttga

SEQ ID NO: 346245 - DNA, 621 bp, Pseudomonas aeruginosa
atggcatgcatcaagcttcgaaatccttctattcccaaatcgaccaagggttggctcctgattgatgatctgagccttcccaggttctgggcgactgtgtgggccgatgtcctcaaggcctgcatggggtccacaacgcgaggccatcatctttacgccgttgagcgtttctaccaggcaactgatcggcagttcgggtcaggcgctctggatcgaatgctctccgagctagacatgcctgcgctcgaagctgccctaagcagttttctagtgagtctcagaaatgacggcaatctgcgtggtgtcgataacaaccaagcatggggttctgcgaaatcatttgtcgccgacatcgtcagccatttgagcgcttcgtcagccggtgactacagcaagattcacggtcggctcttaagacttgatcgcctctattctcaggtttcccctgcgaggccaaagcccccagccgctattcgagctctacctgctgtggtggtcgaagatctttacgagatcttctcgccggaatccttacgaaaacccattccggaccaaagctcttcagtggctaaacttcctaatgtttctgctgatgctgcatcttggactaaggcgcagtga

SEQ ID NO: 346246 - DNA, 1308 bp, Pseudomonas aeruginosa; identical to SEQ ID NO: 330438

SEQ ID NO: 346247 - DNA, 510 bp, Pseudomonas aeruginosa
atgactcgtcgccgcagaacctcgctcatcgaggacctcatagagatcgccagccgcttgccctggtgggtaagcctgctcattgccgtgggcagttggctcatccttcatcctatcgccaacactcagcccgacgttcccaaggatctgcatcagatgggacagtctgctgttggtcagcttatccgcacctttgcctttttcggccagtttgtgctgccagcggtattcgtaatcggcgccatcggctctgtgcttgccagggcggaacgtaagcggctgcgcgcaaacgtggcgaatgcgagagagtccggacaaaccattgacggcatcagctggcgcgagtttgagcaactggtgggtgagaccttccgccgcaagggcttcaccgttatcgaaaagggcggcaacgggccggatggcggcgttgatctcgtattgcacctgggaacggacaagtatctgttcagtgcaaacagtggaaagccatcaatgttggcgtcacggtga

SEQ ID NO: 346248 - DNA, 1113 bp, Pseudomonas aeruginosa
atgacccttgttagttttttgtctgactatgagcgcgatattgaaattacagatactcttggggatgatgcggatgatttaatagcttttggtctctttggtgaggttggtagtgttctttctgtttctaagaaagcgagacgggatgcgggagcttttgataagaaccactcattcatagaggagcttggagatgttctctggtatttctgtcgcttgtgcaagaggaaagggttttctttgaatggtgtagccgccccatttattagtgggaagccttatcaaattgcgccgacaggaataaagaactttccattagcacttgtcccgtcgccggttgaaattggagtaattgaagcaagcactgctcttggtaaaaatgctgcggtaattttagaaaggttgtcgtcatctgtcgatcaagaagttctttcaaatttttttgagagttatatagcgttgatgtcggcctcgggggttagcttcaaagctgtggttgacttaaatctagagaagtcactaagcagattctccccgctcaatatacctaattcgccagattttgatgctgaggagcatgtagatgaacaattaccaagagagtttgaaatcgaggtaagtcagaggtccaatgggaggacgtatatgaaaatgcatggtgttttcatcggcgatcctctgactgacaatatagctgttgaagatggctatagatttcatgatgtatttcatatggcctacgccgccattctgcattggtctccggtatttcgagccctactaaagcataaaaggaaaagcaatcctggaatcgatgagtcggaagatggtggtagagcgattgttattgaagaaggtctcagtgcatgggtcttttccctggcgaaagagaataattacttcgaagggcaagacagaatttcttttgatgttttaaaaacagtgaagcaatttgttaagggttatgaggttgagcaatgctcttataagttgttcgaaaaagccattttggatgggtacagtgtttttagggaaataaaaaaatataagcaaggaaggataattggtagtagaattgagcgttcaataacttttaagcctgccgagggctga

SEQ ID NO: 346249 - DNA, 666 bp, Pseudomonas aeruginosa
atgaaaccgaaagaatttgtccgaaggctgtcggcagtttctactaaaaatagctttaatccatattcgcaagtatgcagcacctttgatgtgaaatctgcagataagattagatttcaattgcttttggatatgttagaaaaagcatctagggttgaggttgatgctatatggataggaagagatttaggatacagaggtgggcgtcgtaccggcctcgcattaacagatgaggtccatgctaaagaatatgcagaacgctggtctctttgtgcacagaggactactaaaggggacccatgcaaagagaggacggcgtccgtgatatgggatgcattgaggtgtattgaagataatatcttcctttggaatgtatttccgctccatcctcatgaggcgggagatccgttctcgaatagaagccataatgctgccgagagaaagataggcgaggaaattcttaaggatttagtttctatgattaagcctcggcgtctgattgcagtcggtaatgatgcggtctcatcaatagggaagattgcccccaatattccatctgctaaagttaggcatcccagctatggggggcagaatatttttctgcaacaaatagaggggctatatggcgtagtgtgtcagccagtgattcagcgggagcttttttaa

SEQ ID NO: 346250 - DNA, 1416 bp, Pseudomonas aeruginosa
ttgctggcgccctaccaggggcgctgcctgggcgtcggccagctcaatgcgctgctcaaggccgtcaccgaccattacctggatcgcggctacgtcaccacccgcgcctacctgccacagcaggacctggcctccgggaccctgcgcatcatcgtcgtcgaaggccgcctggagggcctggacagctccgcgctggccagcccgcgcgaactggcgatgagctttccgggcaggaccggcgagctgctcgacctgcgcgagctggagcaactggtcgaccagttgagtcgcctgccgtcgcgccaggcgcaactggagctggtgcccggcagcgaggtcggcggcagccgggtgcgtctcaagggcgagcgcgacaagccctggcgggtctccgccacgcgcaacaacgacggcgacgtcagcaccggcgagcagcagatgggcctgggcctggactgggacagcccgctgggcctggccgaccagctcaacctgcgcgccaaccgcgacgcggtgaccgaccgctggcgccattccgacagccagagcctgttctacagcctgccctggggctggtggaccttcacctacggctacagccagagcgactaccgcacgcgcaacgaggccagcggcttccccttcaagctcgatggcgacagccgcagccaccagttccgcgccgaacgcgtgctgcaccgcgacggcgtgagcaagaccgccatgagcctggggctcagccaccagcgcaccaacaactatgtcgaagacacccgcctggaagaccagagcacgcggatcaccgagacccagctcggcttcaaccacggccggcggatcggcagcggtttcgtcaacctcgacctcggctggcagcagggcatcggcgcccttggcgcgcagggtcgcggccacccgcaggcgggcgatccgcatgcgcgctacgacaagtacagcctgaccctcagctacctgcagccgttccagctatggggcgagcgcttcagcttcgacagcctggccaccgggcagaggagcgaggacgtgctgttcagcccgcagcgcatcagcctcggcggcaacagctcggtgcgcggcttcaaggaccagaccctgaccggcgacagcggcggctactggcgcaaccagttgcgctggcggcgcgcggtggaatgggcgccgctgcggccctggctgcaggaatacggcgtggccttcgcctacgacgtcggcgtgatccgccacgaccgctacaacgacggcgccagcgggcgcatgagcggcaacgccatcgaactggatgcccgcggccgctatttcgccgccagcgtcggcttcgcccgctcgctggagcggcccagcgccatcgagcggcgcgagcacccgatctatttccgggtcgacgcgttcttctga

SEQ ID NO: 346251 - DNA, 309 bp, Pseudomonas aeruginosa; identical to SEQ ID NO: 327388

SEQ ID NO: 346252 - DNA, 309 bp, Pseudomonas aeruginosa; identical to SEQ ID NO: 327388

SEQ ID NO: 346253 - DNA, 1443 bp, Pseudomonas aeruginosa; identical to SEQ ID NO: 339534

SEQ ID NO: 346254 - DNA, 4845 bp, Pseudomonas aeruginosa
atgatctcgtcgttctacgccatgttcatgctgcgcggagtgaacgcgaagcagccggatgccagccagttgatcggcgaattcagctccggggtgctcaaccgctatgaggaatatgcgaacagttggctctggggctgggcactcgacgtccagcagaccatcgccctttccgatgggaacggcaacgagttgaccaggctgaaagccgacaaggacgccaacatcctcgaagacgtcgcctcatgtccggtcaacggtcaactgaaactgctgcatactttcgaatcgaccagtttcgtgcccatcggcaacacgccttacgaaatcactcggataggcagcaggacaccgcagttcaagggcgtactggatgcagatgggatggcgagcataagcggctgcgctcccaatacgctgtaccaggtcaagttctacccagaggtaagcatccaggagatcgacgcgctctaccgctcctacgacgacgtaatcgccaagctgaacgagtggcttctggagcaatggaacggcccgctttccgccgaatggaaaaggctcgcgccggttggcgaccgtaggcggatggagcagataaacgacgcctatctggacggcatgggcaaagcgctggtcaatctctgggatgatgtggtcgagctgttcggcatcctcgcgaacctcgacgagcacgcggcgaaactccttgagttcatcaacgaagcggatttcgaaaagctcaaggctcaggccaaggaactcctcggtaccgccttgctgatcgccagcgacgaaccgcttctgttcatctatgccagcgccatcgtgtgctggatccagttgctgccgcccacgactgccgcggaaatggtcgcggaactctccaccggcctgctcctcgatattctgctcggcatcatcctgaccggcggagccggtctcgccgttcgcctggccgtcaagggctcgaaagcaatcaaggcctccgaaggtgcgatgctgctgcgcaaagccatgcaggtgctgatcgataccagctgtcggcattccctccagttgcacgcggaaaagctgaaacctctggccgtccgcggtgaagtgatggccaacagctccaacaagatcaccgcacagatccagagcaccgcccaaggcatcgcccgcaccgagcacgacaccctgccgctgagccgaggaaagcgcgcgaacacctcgctctccagcagtcaggcgacgcccgatgcctccgcacccggcaggacgcccgccggcaaacccgccgaccaggccgcccagacctgcgtcaaggactgtcccgtttcgatggtcaccggcgaggagctgctgaccctgaccgactgcgagctggacggtccgctgcgtttcgcctggacgcgcctgtaccgcaccagcgcggcggaaatcgacaatggtctgggcttcggctggagccatgccctctcccatcgcctcgatcgcgacggcgacgagctggtatggaccgatcacgagaaccgccggacccgcttcccgatccctgacgcccagcgcccggcgatcaccaaccgactgtcgcgcgccgccatctacctcggcggcgacccatccgaactgatccttgcccaggccggcgaaaagccgcgcttctaccacttccgcaaagacccggacggcgcttacctgatcgccatcagcgacgcctacggcaaccgcctggaactgagtcgcgaccgcctcggccggccgcgccgcctcagccacaaggccgggcgcgcgctactgctgtgctaccagggcaggcacatcgagcgcgtcgagtatcaggtgtaccagcccgccgataacctggaggcctgctggcacaccacccaggtactcgcccgctaccgctgcaacgaacgtggccagttgatcgaagccggaaacgcactctacgaggccgaacgctatcgctacgacgcgcgcaatgtcatcctcgagcgccagttggccggcggcgcctcgttcttctgggaatgggaaggcgaaggcaagcaggcccgcgcggtccatcactgggccagcttcccgcagatggactcgcgctacgtctggaacgaagacggcagcgttaccgcgatcaacgccgacggcagcgaggaagtctatgtccacgacgacaacgcgcgcctggtacgccaggtcgatcccgacggaggcgaaaccctcaggcactacgacgagaagggccaactggtcgccgaacgcgatccgttgggaacgatcaccgagtaccgctacgaccaggccggacgcttggaggcactgctcccggccgaaggcgagccaacctgctatagctacttcgacggcttcgtgcgcagcgtgcgccgcggcgaggcgcagtggaagtacgagcgcaacactcagggcgacatcacccgccagaccgatcccgaaggcaacgtcacccactacgcctacgaccaccgcggctgtctggtggaaatcacccatgccgacggcagcctgcaccagttgacctggaatccgctcggccagttgatagaagaacagcttccggacggtagcgtgcgccgctatcgctacgacacactgggtagacagatcacccgccaggacgaaagcggcgccatcacccggttccagtgggatgcagcaggccgcctgagccagatcaccctgcccggtggcgccagccgcatgtaccgctacaacgcttacggcaaggtcaccagcgagtgcgacgaacagggccggatgacccgctacgaatatcttgacgacctgcacctggtcagccggcggatcaacccggacggcagtcagctgcgctaccgctacgaaaacgcccggctactgctcagcgagatcgagaacgaacgcggcgaacgctatcgcctcgattaccacggcaacggcctgatcagccaggaaaccggcttcgacggccgccgcaccgcctatcgctacgacctcaaaggccagcttctggagaaaaccgagtacggcgacgacggcagcgaactgcgcaccacctaccagcgcgacagtaccgggcgcctgctggcgaagacactgcccgacggcaatcgggtcgactaccgctacgatacgctcggacgcctggtcgccgtcgacgacggcacctggccgctggcctacgaatacgacctacgggaccgcctggtccgcgagcaccagggctgggccacccttcactacgcctacgacgccctcggccagttgatccactgccgactgcccgacggcaaccgcgtcgactaccgctaccagaccggcggcaccctctcggcaatcgatctcaacggccagtccctgacccggcaccagttcggtagcggtcgcgaacgccagcgccagcagggcgaactgctcagccaataccactacgatgagcagggccgcctgctggcccaccaggtcagtcagcggcagcgccatctctaccagcgccagtaccgctatgacgctagcggcaacctggccgccatcgaggacagccgcaagggcattcgcagcttccactacgacccgctggaccgcctgctcggcgtacgcggtgaaaccccggaaagcttcgtgcacgacccggccggcaacctgctcgcccagggcgggcaattcgacgcgcgacagatggaggttcgcggaaatcgcctgctgacgcagggcgaccggcatttcgactacgacgcccacggcaatctcgttcgcgaacgccgcggcaccgggcagaagctggtcaccgaatacagctacgactgccaacaccgcctgatcggcgtcagcctgccggacgggcgccaggtcgtctaccgctacgacgccttcggccgacgcattgccaagcaggtcgacgggcgcaataccgagttcctctggctcggcgaacgcctgctcgccgagagcggcgaccggcactaccgcacctatctctacgaacccgacagcttccgcccgctggccctgctcgacggcgaaggcccggaacaggtcgaaccctgctactaccaactcgaccacctcggtaccccgcaggaactgacccgcgccgatggccgcctctgctggtcggcgcgctaccgggcttacggcaatgtgctcaagctggacatcgccgaagtggataacccactgcgcttccagggccagtatttcgacgccgagaccgggctgcactacaaccgccatcgctactacaatccaagcacgggacgctacctgacccccgatccgatcaggctggcaggtgggttgaacagctaccggtacgtgccgaatccgacggggtgggcggacccgttggggctggcctcaaataaaactcgctgtcccgaagcattagacaataatccccgcaaagggattaactccacatccggcagcaaaaagccggcaggaccaatcgtagagctggatgcgcagggaaacgagatttactaccgaacactaagcgagcagcaccttgagatactgaggaacaactttgaagtacctccgacgagtgagaccttcatctccccgctacaatcctactcccaagagtatgatgggaaattagtaagacttacagccagtccaggcaccatgaatgagctgtctaaaattggagtaactgcaaattccggaaccggcctattgcttccagatctccctcccgcccgaaagggctggaaacagaacaacgcactattcaaactcgaagcactaaaaaagccaacgataaatgaaggaggcggcgttatcaacactggccttggggatggaaaagccctagagattttcaacaagaacctaatagacttcgaagtaatagactag

SEQ ID NO: 346255 - DNA, 972 bp, Pseudomonas aeruginosa
atgcgggctgaagtaatgcagcactacggactggcgttgccactgaaccaggccggctattttgaaaccgcccaccatcagcagttgatcaaggacatcaagggggcgatcttcgaaggacggctgattgcactgtgcggcgtcatcggcagcggcaagaccgtaatgctgcgccggcttcaacaagcgatggaagaggaaaagaagatcacggtctccaagtctctcgccattgaaaagcacagcatcaagctggccactttcatcgcagcgctcttctatgacctctccaccgagaagcaggtacgcatccccacccagggcgaaaagcgtgagcgtgacctacgcgagttggtgaggaagaacaagcgcccggtcgccctgttcgtcgatgaggcccatgacctcaacggccataccctgaccggtcttaagcgtctgatggagctggtggaggacggtgacgggcggctgtcgatcgtgttggccgggcatcccaagctgcgtaacgacctgcgccgaccgacgatggaggaaatcggctaccgcaccgacatcttctcgctcgatggcattgctggcagtcagcgggaatacattcagtggctgctggaaacctgcactgcggggaaggtcgaacccgagtcgattctgaccgaagacgcgatcgacctactcgccactaaactgcgcacgccactgcaaatccaactgcacctcagcctggcactggaagccggctacctgaccggcgagaaacccgtttcggcggaactcgtgcaatcggtgctgtcgcgccaactggatgatctggagccaaccctcactcgtcacggctaccgcatcaaggatctagtggagcaattcgatgccaaacccaccgaaatcaaggctctgttcagtaatgcgctagacccggcgcgggcggttgagttacgtgacaagatgctggcagcgggcttgcctatctga

SEQ ID NO: 346256 - DNA, 1662 bp, Pseudomonas aeruginosa
atgcccagcgggcggcgtaaagccatcccgaccgattcgctgatgcagttgcggcagcggctcgaccgtctgcccaagaaaagcccggaacggattactcaggtggccgcgatagccgagttgtacggcgtgtccccaagcaccgtataccgggcgctgaacctcatccataaaccccacgcggctcaccgcgccgaccatggtaagccgcgggtattgcagcaggccgagctggagcgctactgcgagctaattgccgcgctgaaactgcgcaccaccaacaaacaagggcggcacctatctacccgccgtgccatcgagctgctggagggctatggggtggaaaccgagcaaggcttggtcaaggcgcccaaaggggttctgacccgcagcacggtgaacgagtacctaagccgctggcacctggaccagtcgcggctgttgcggcaaccaccggccacccgctttcaggctgcgcacagcaatgactgctggcagttcgacctgtcgccctccgacctcaagcacatcgataagccggactggatcgatccggctaggggcatgccgacgctgatgctgttcagcgtggtggatgaccgcagcggagtggcctatcaggagtaccactgtgtatatggcgaggacgcggagtcagcgctgcgcttcctgttcaacgccatgacgctgaaggcggacccgacttttcccttccaaggccgcccgaagatgatctacctggacaacggcccggtggccaaacgccgagtattccagaacgtcatgcaggcgctggacatcgaatggcagacacacatcccggccggcaaggatggcacccgcaccacggctcgctcgaaaggcaaagtggagcgccccttccgcacggtgaaggaagcccacgagacgctgtatcacttccacaaaccggaaaccgaagcgcaggccaatgagtggctgctgcgttatctggtgcgcacctacaacgtgcaggatcatcgctccgaaccgcattcgcggattgaggactggctggccaacctgcccgtcgagggcctgcgcgaaatgtgcacctgggaacagttttgccgctttgcccgcgagccggaacgacgcaaggtcggcgtcgatgcccgcgtcaccatcgacggcacggcctacgaggtggagcccgacatggcgggcgaaaccgtggtgttgctctggggcttgttcgatgacgaactctatgccgagttcgagggggagcgcttcggaccttactaccccgtctccgggccaattcccctacatcgttaccgcgccttcaaacgcggcaaggcggatgagcgctctgatcgcatccgcttgctagccggccagcttggcctgcctatcgccgcattggctggcgacgatgtgcgactcacaccctctattattccgacggcactgccacgccaacccttcgatgccgaggcgcacgaataccggtttcccaatgccatcgccgccaagctcgccattgccgatgacctagcgcagccgttggctaagctctctcccgacgatcaagccttcatccatcaggtgctgagcgaaaccctgacacgccgcattgtcttggagcgcgtgcggggctacttccgccataagaaaacaggagaagaacatgcgggctga

SEQ ID NO: 346257 - DNA, 576 bp, Pseudomonas aeruginosa
atgttgattggatatgcccgcgtctcgaccgacgaccaactcctcgatctgcaacgcgatgctctggcgaagatcggctgcgagcgggtgttcgaggataccgccagcggtgccaaggctgagcgggttggcttgaccgctttgctggccacgctacgccgtgacgacaccgtggtgatttggcgcctggatcgcctcggccgctcgctgaaggatctgatccggctggttgagcaattggacgccgccggcgtcggcttgcgcagcttgcaggaaaacatcgacaccgcctcgattggtggccgcctggtgtttcacctgttcggtgccttggccgagttcgaacgcaacctaatccgcgagcgcacccaagccggcttatccgctgcacgggcgcgaggccgcaagggcggacgcaagaaacggctcgacccggccaagcaggagcttgccctgcgcctctaccatgagcggaaacataccgtggcggaaatctgtcggatgatgggcatcggccgctcgacgctctacaactatctcaccgaggccgagcgtgatgcccagcgggcggcgtaa

SEQ ID NO: 346258 - DNA, 408 bp, Pseudomonas aeruginosa
atgcgcattggtcaacttgcacagctgacgggagcggacattcagaccattcgtttctatgagcgccagggcctgcttgcatcgcccaatcgccaggcaaatggctaccgagcctacgaagcggatcatgtggagaaactgctgttcatccgccgttgccggtcctttggcatgtcgttggacgaaattggtgttttgcagagcgttcaagcacagccgcagcaaccgtgcgcggcggtcaatacgctgcttgatagccatatcgcccaggtcagggcccagatcgcatccttgcaagccctggaaaaccagttggtgacgttacgcagctgctgcgatgacgaacgacaaagcctggactgcggaatactttcgggtctagtggagggaggcaaacggcttccataa

SEQ ID NO: 346259 - DNA, 348 bp, Pseudomonas aeruginosa
atgaataccgccctccgcaatgccatcgatgaagcctttttccaggcaaggacagcactccgtgaaaaggcgccaaccgaggcattcccctggctcgagcgcgcccacatcttgagccagcacatgcccgtcctgcatgcgcggagccattggttgatgctaagggctggctggcagttgcgcgactaccgggaaatgttcggccaagcaccacggatcatcgctgccgtgttgttctcgaagatctgggtaccgctcggcaataccggacgcgcgaggatcagtgcattcgcgccgatgcccgtctcacccggattgcagcgactgtttcagggagcgaaacaatga

SEQ ID NO: 346260 - DNA, 510 bp, Pseudomonas aeruginosa
atgaaatcgccacttggaatggcgcaccgtatcactcccgggctctggtggacgctatcgctagccgttgccctggccgaccaggcgatcaaatatgtaattgagggttcgctctcggtcggcgccgtggttcctctgaccccagtcttcaatctggtccatttctggaataccggcgcagcgttcagcttcctagctgacgcgggcggttggcagcgctacttcttcattctcctcgcactggttgtttcgattgggctcgcgttgctcttgcgtaagcccagggccaagctcgaagcgctgggctatagcctcatactgggaggggcagtggggaatctgatcgatcgcagcttccgaggccatgtgatcgactatctggattttttctggcaatcctggcattggcctgcattcaacttggcggacatcggcatcgtgggcggtgccgccatgttgctcctgagcagtgtgctgagtcccagcgcggaactggaccggggcagataa

SEQ ID NO: 346261 - DNA, 747 bp, Pseudomonas aeruginosa
atgcgaagctcggatgccgcagaagtggctcgctggtcaggccatgcctgggtcggccccggtatcggcgtctttctcggccatgccgcccaccaggattggcaccatcatcaagcacatcaaattgcagtggggctcgacgccgcgataacggttgaaacgccgttgggtgggcaatctggggctgccatcttgattccggcaggcttgaagcaccggctcagtgctgggcaggtcctgtcgatctacctggatgtgctgtccgatgaggcgcgtgccttgcgggtgagcggagccgtgaggctgatggagatcgtagcggccgatattgctgcgatggtcgaggcactgagggcgtcggggcattcgcctgtccagttgcaggcgcaggtacgtcggctgttgcggcttgccgatccaccaatccctgatccgcgcttgaccaaggtcaccgcagcgctgcgcgaaggccaaatggggcgtgaggcaatggccgcgttggtgcatttgtcacccacgcgtttttcccattggttcgtggagcaaaccggcctgccgttgcgcagctatgtcaaatggctgcgcctcacccaagccctgcaacacctggccaaagggggacggctgaccgaagccgcgcatgcggcgggtttttccgactcggcgcatttctcccggacattcagggcgctgctgggcatcgatccgtcctccgccctggctgcggtcgatctccagaagtcatag

SEQ ID NO: 346262 - DNA, 867 bp, Pseudomonas aeruginosa
atgtccacttctcttcgattcgccctacgctggttgagctatccgctcgtgtttggtggcagcgccgccttcatggtctgggccttgtacgccggggtgccgtactggcccagcacacccttggtagccgcagtcggtctattggccgtcgcggggctggagcgtatccagcctttccgggagggctggctggaggatcaccaggacaccctgaccgacctggtgcatatgctggtgaatctttccgtcatccagttcaccgccgaaatcctggccaggctgggcgatgcagtgccggctacagttcgtctcttcccagtcgagagtccactttgggttcagctgctgctggtcgccgtcgtgctcgatctgagcctgtatgccatgcaccgcatcagccaccacgtaccctggctgtggcgttttcacatgattcaccacagcgccgagcgcttgtactggatgaatggggagcgccggcatcccctacatgcgatgctcatggctggcccgggattggtgctgctgtttgcatccggcgcgccttcggcagtggttgccacctggttcggcattctgaccgttcacttgggctttcagcactcgaacctggattaccggctgggttggctgcgccatgtcatcggggtggctgaaattcatcgttggcaccacaagcgcgacttcgaagatgcccaggtgaacttcggcgaatttctgatggtgtgggatcggctattcgggacgttctacgacagtacaggaaagcagggcgacgccaatgtcggcttgcgtgagagggactatcccaagggttaccttggtcagttgaccgaaccctttgggcgagaccgagcccgcacatag

SEQ ID NO: 346263 - DNA, 231 bp, Pseudomonas aeruginosa; identical to SEQ ID NO: 334743

SEQ ID NO: 346264 - DNA, 708 bp, Pseudomonas aeruginosa; identical to SEQ ID NO: 336407

SEQ ID NO: 346265 - DNA, 1077 bp, Pseudomonas aeruginosa
atgcctatccgattcaagcccggccgctcgacccggccggccgtccaagacgacttcttcattcccgagctctgcgaagccgaagccctgttcaccctggtgctgctggcggagctgctggtgctcgtgctggtgctggcggagccgatgacgccgagcttcaactgggtgcgcctggccctggcgtcgctgttcgtgcagtggatcgtactgctctcggcggcgctgttctgccgcctgcggccattgctcgcacgcctgccggtggcgctggcggggagtgcctgctgcctgttggtggtggccctcaccctgggctgcacggcggtcgccgagcactatcagctgggcggagaactgacgcgtgccggcgaggtcaatctgtatctgcggcacgcgctgatcgcgctgatcatgtccgccctggtgctgcgctacttttacctgcagagccagtggcgccggcagcagcaggccgagttgcaggcgcgcctggaatcgctgcaggcgcggattcgcccgcacttcctgttcaacagcctgaacagcatcgccagcctgatcgagctggacccgctgaaggccgagcatgcggtgctggacctgtccgacctgttccgggccagcctggcgaagcccggcactttagtttcctgggaggaggaactggcgctggcaaggcgctatctttccattgagcagtatcgtcttggcgatcgcctgcaactggactggcaggtgcacggggtgccggccaacctgccgatcccccaactgaccttgcagccgctgctggaaaatgcgcttatctatggcatccagccgcgggtcgaaggcggcctggtgcaggtcgaggcggtttatcgtgaaggagtgttccagctatgtgtgagcaacccctacgacgaggcgctcgagtcgcccccgtcgaaaggcacgcgacaggcgttacacaatatcgatgcacgacttggggcacttttcgggcctaaagcgagtctcagcgtcgagcgccgtgacggacggcactacacctgtctacgctatccatgtgcgcgactcatgcaggaagcctga

SEQ ID NO: 346266 - DNA, 729 bp, Pseudomonas aeruginosa
atgccattcgacgcctcgcgcttcggcctgctgcgcgaccccggcgatctgatgcgcgagctgcgcccgagcggccgacggcatactctcgccgcccgtatccaggggccggcgaagagtgccttcgcggagggcatcgaggggcatcgggaaggcctgaaggaggcgcgcaacatcaatgtcatcgtcgtggccgataccgacctgctcagcgatcgcatgtgggtccaggtgcaggacttcttcggccagcgcgtgccgcagccctgggccgacaacggcgcgctggtggtcaacgcgctggacaacctgtcgggcaccgacgcgctgatcagcgtgcgctcccgcggccggttcagccggccgttcgtggtggtcgagcgcctgcagcgcgaggccgagacgagcttccggcagaaggaggagcagctcaagcagcgcctcgccgataccgagcagcaactcgccgccctccagcagggtgccgacccggagaaggccgtcgaactgacgcccgatcagcaggccacggtgcgccagtacatgcaggagaagctgcgcatccgcaaggagctgcgcgaggtgcagtaccagttgaacgccgatatcgacgcactgggccgcaccctgaagctggtcaatatcgccctggttccctcgttgctcacggtcggcgtgctgctcggctggctctggcggcgccggcgcatggcccggggagggcattga

SEQ ID NO: 346267 - DNA, 237 bp, Pseudomonas aeruginosa
atgaccgatatcaacaagctgaaggtgttggcggaacgccgacgccatgctaaaggccaggaaggaggcgggggaatgaacgaagagaagaagccaatcgcatggctcgttgagttcgagtgcggaggtcgtgagctatggctagccgaagaattcttcgacggagggccttctttcggtcgctggatcactccgctctatgccggcgagacaatagatcaggagccagaggaatga

SEQ ID NO: 346268 - DNA, 522 bp, Pseudomonas aeruginosa
atgagtgaggtgaagcggtacatcattggccgaaacggcctgcctgagttcgatgattccggtgaatatgtcgcgacgagcgactacgacgcactagccgccaagctggccatggctgaggacgcaacagcaaagggagatgctgctcgccatcagtgcggcggcatggaaatggagatcgaggaacttcgcgctgaactagcggaactgcgcgcaagggtggtggtgccggatgggtatgagcttgttcctgttgagccgaacgacgaaatgctcagcgctggatgcgtagctgacaacgcaatgcacagcaacctgagcaacagggacaacaagcatcggtgctatcagtcaatgctgaatgcggccccgcgcctcaacggcaagacggtcagcgaggggctgttgcgcaggctgacggcagacccggactacgaagaggtatttaccctggatcgcggagaagcgttgaccgaactcctcgacctgctcaaccaggacaaggagaacggcaatggctga

SEQ ID NO: 346269 - DNA, 603 bp, Pseudomonas aeruginosa
atgaaatggaatccacggtcaactatggctatcgctttgctcgctcttactggttgtgccactcaggctccctacgggacacctgaggcaaccgcgaatcttatgagagacctgtctctttccaaaccgccacaggttgtggtgccagctgattgggcagactccccgtatggaattagcgaaggcgttcagaccactaaaggtttgctcgtatcggaggagggtggactccgcttcgtcacgtatgacggccagcggtttcacgaaaccgatgagcttcgtcgccctgatcttgaatgtggttatatctggagcggagatagcgggtcagaactggtgcatctcttccgtgccgatcgtttctacatgctgaaagttggtgctaaaaaaatagatgccgacccggctcaacgaagtgagttggtgcggtatttacgctctcaaggcgttccgcttctgacgagccaggagggtacgtttttcaggcctaccggaagaactaagcgtggaatttccaccgttccggctgcacctggtatgcccaactggactgtcactatcgacgacgagcaagaagccttcaatccttgtcatcatggctag

SEQ ID NO: 346270 - DNA, 1263 bp, Pseudomonas aeruginosa
atgagtggtaatgaaaaaaagctgctggtgccacggttgcggtttccggagtatcgggccgaggacggatggggctctgaatttggaaatatgatctttgatcaaatttccaataaagatcacaactccgacctccctgttcttgccataacccaagagcaaggagcaatccctcgggaaatgattgattatcatgtttccgtaactgacaaaagcctagaaagctacaaggtggttgaagtcggcgacttcatcattagcctgcgttcttttcaaggcggcattgagttctctagatatagggggatttgtagtcctgcttatgtaattctacggctgcgacatggccactctgaagattactttaggcattacctaaaaactgatcgttttatcgctcaaatgatcaaaaatcttgaggggcttcgtgatggaaagatgatcagttacaagcagttttccgagcttgaactgccaatccctccacgcgatgaacaacaaaaaatcgccgactgcttgtcttcgctggatgatctgatcgcggcggaaacttacaagctcgacaccctcaagacccacaaaaagggcctgatgcagcagcttttcccccgcgaaggcgaaactgtgcccggtctgaggtttccggagtttagggaggcaggagagtggaaagagacgctatttggaaagctggtcgtcaagtcattttacggtacgtcaagttcgacatcaaatacaggaaaatatcctgttcttcgcatgggcaacatggttgatggagcgcttagtttttcaaacttggcctatatcgaccttgacgaaaagtcattcgcgaaaattcggcttgcgccgggcgacattcttttgaatcgaacaaatagccctggccttgttggcaaggtatctatctttgatcaagacatagaatgcattacagcatcctatatcgttacctatcgacttgatagggcgcaagtggtgcctgagttctgtaatttgatactgaatacgccaaggtgccagagaaaaattagagcactggcgcgccccagtattagccaggctaatattaaccctacagcatttaaaaatgagttgactgtggcgcttcctaatattgaagaacaacgacgaattgtgtcctgcttttcagatattgatgaaaggatttcttcacaaattaaaaaaatagagttactcaaggtacaaaaagctggcctgatgcaacaactattccctgtgccggatggggcggtcgcatga

SEQ ID NO: 346271 - DNA, 291 bp, Pseudomonas aeruginosa
atggcgcgcgccctggacctccagggcttcgccgagttgtcgggtttgcagttcgatctcggcgacgcggccgagttggcgttgctgttcagcgagaacgccggcctgcaggtcgatcatcttctgattacggtcacgctcccgctcggcggcggtggcgcgacctctatcagcggcaagctggagcctcaagtgatccatccgccacagcaacagcgcgacaacgaggacagcaatagaccagaacttcaaattcatctttacgtatccatgctgactaattacccgtag

SEQ ID NO: 346272 - DNA, 1239 bp, Pseudomonas aeruginosa
  misc_feature (1212)..(1221): n is a, c, g, or t
atgagtagtcggcagctgttagagcatcgcgaaaatacaaaaattattacgctaaatgagttggttcaggagttttccgaacctgagcgtttgcgattgcagctgaccgttaaggttaaaaagaagccgttagatattggtagttttgcatatctcattcgtggtaagaataaaagtgttcatgatgatcgcgggacgccattggtgattgagtcgttcgttgaaagtcgtcgtgagctgattgtgagagttttggagtcttttgtcggtctgcgtgataagtcagtcttggcaaatttcttccataccgaatattttattgattggttgaacgctgagggttaccgagaaatattttccagtagcgtggatgctcaaaaggcatatcgagattatacagcgcatctaaatcaaaaaatatccgataaaaagctgaagccccggaccgcgtcaagctaccaaactagagcatccagcctgatcaaattactttatccagataatagtgtccatattcttgctggtgcagtaaggattgttccagatagaggttctgcaacagcaggcgctgctcatgtcgagttgtatagagatgtttgctttgccattgcccagcagtgcagtgattttatcttgaataaaaaaccttacccgctcgtggttggagttagagattatgaagttgttatatttccgtccaaccgaggcgcgagcagcccatttaaggatgctgctccttcatataactcagctgagcggcgaattgctacggccgaagaatacttcgcggccttcgagaggcttggccgaaaaaagccgagaaattataatgtcgcgcgcgaactaagaagctcccaggcatctttggatgcggctaatgaagatgggcgcaactggcatcgtcttaatctagcgagtcttgcggcgaaagcctatgctatccttttttttatgattacaggtgccactccggctgaatttgagcagtttagttacgaagacgcactcaaagttgaaaagtcccctctcaagaaagagttgtcggctgtgaaatttcgggctggcggaaagtcaacgctttacaacattgggcggggctcgggtttgtcgctgctgaaagagtatttaaagctgcgtgcgtggattttggatggtgcgagacatgagcgactattctttgcaatgcctacgtctggtcagcttagaacttgnnnnnnnnnnttggtgatcttaacgtga

SEQ ID NO: 346273 - DNA, 738 bp, Pseudomonas aeruginosa
atgaaagaacgtccgatcctgttcactggaccgatggtccgcgccattatcgagggatggaagactgtcactcgacgggtgatgaagtaccagccgcacgaagacgcgagcgtcacggtgggaaactataacgtcaccgttgtggaccgccacggcgagcaacagccagggcctgaagccttcggcgcatggtggagcgatggggagcgcgggtgtatctgcccccacggccagcccggcgatcggctgtgggtgcgcgagacgtggaccgatgtcaacctctgcggcgcaccggcgctggcatatcgggcggacgaggatatccgcgatcttatggaggagccggggtttctggatgatcgcggcgccttcaactacgacgacccgcgcgtcaagccgtatccattcgcctgctggtacgccgatctcgatcaggcgcgctggcgcccaagcattcacatgcctcgctgggcctcccgtatcctgctggagatcaccgccgtgcgcgtcgagcggctgcaggacatcagcgatgaccaggccgaggcggaaggagttgagggtccggaaaacatcaccaacgtcgacgtttgggatggcgctgagcgcgaactcttcaacgccatgaatcagccgcgggctcgattccgccgactctggagcgatatcaacggctccgaaagttgggattcgaacccctgggtctggtgcattgaattcaagcgggtgacaccatga

SEQ ID NO: 346274 - DNA, 2253 bp, Pseudomonas aeruginosa
gtgagcgtcgaacacgagcagcgcattcgagacttccgtgcgctggacgaccgcttcaccacgctgacccgtgatttgcttcgcgcacgcctgtgtgccgaactccccacacaggactcggtgagcaagaactcggaatggggcgtccttaggcacgagatcacgaaaaaaacgcgccaccttcccctgcgcgagctgatgtcgaaaatccccgatgccctcaccaagctgacgccgtgtttgctgatgagtccgctctccatcgcccagtacctggcagcgaacgctagcgtctttgatgtggtgatcttcgacgaagcctcacaaattccggtatgggatgcgatcggcgccatcgctcgaggtaagcaggtggtgatggttggtgaccccaaacagcttcccccgacctccttcttcgatcgtgcagaatccacccaggatgacgttgatatcgaggccgacctcgaaagcattttggatgaatgcatcagtgccaacctgccgatccgcaacctgaactggcactaccgtagtcggcacgaaagcctgattgcgttctcgaaccagcgctactacgagtccaagctggtgaccttcccctcccctgttacgaatgatcgtgccgtcagcctgcacgtcgtcaacggggtgtacgaaaaaggctctgcccgcaccaacccggcagaagccaaggcattggtcgctgacctgatcggccggctgcgcagccctggattcagagagagcaagctgaccatcggcgtcgtgacattcaacggcgaacagcaaaagctgatcgaggatctgctcgacaccgaacgccgaaaagaccccgcgttggaaagctacttctcggagagcgagcttgaacccgtattcgtgaaaaacctggaaagtgttcagggtgacgagcgcgacattatgtacttctcgatcacctacggccccgatgctgcaggcaacgttgccatgaacttcggcccgctcaatcgcacgggaggtgagcgtcggctcaacgtcgccgtcacccgggctcgccatgaacttcgcgtcttcagcaccctgcgagccgaaaagatcgacctggcacgcacacaggccttgggcgtccgcgatctcaagcacttcctcgaatttgccgaccgcggtgctcgcgcacttgcaggagccgataccggaagcctgggcggatacgacagcccctttgaggaagccgttgcgaacgcgcttcgtcgcaagggctggcaggtcgtcacccaagtcggtgtgtcgtcgttccgaatcgacctggcggttgtcgatcccgatgcgcctgggcgctacctcgccggcgtcgagtgcgatggggcgacctaccaccgcagcgcaacagcccgtgatcgggacaagctgcgcgagcaagtgctacgaggtctaggctgggagattctgcgcatctggtcgaccgactggtggatcgacgccccgggcactgcacagaaaacccatgagcaccttgaggccctgttggttgaaagccgccagcaacgtgccgcccgtgaagccgaggagcaattggtcgcgaatgccgcgcaataccaagcttcgctgaacgacaacgttagagaactccctctcgaccgcccccagctcaaaacgcccgatgagtctgaggaactcgacgccgagaccgaggcgatcgaaataccgagcgtgcgctacgccgatacgcaggcagacgccacacgcacctcgactaccttcccttactaccgagggagcgacccgctgagcgccgtggaaggcgtggatccggatgcattcttcgatgcgcgctatgacactgtcctggcgatgatgatcaaacatgtgatcgacgaggaaggccccgtcctcgatacctcgctcgcccgccgaatcgcccgggcacatggctggactcgtactggcgcacgcattcgtgatcgtgtcgtcagcgtggccgatcgcgtacaccgcaaggttgaagaggacgctgggcacttctattggcccagccgcttaccaaactgcgaagccgtggtgtatcgccgaccggcagacgccgataacactcggccagtcgatgagatctgcagcttggagctccttgccttggcacgtgcattggcagaccaaagcctcatcggcgaaggcttgctctacgccatggcacgagagctcggactgagcaaagtctcggcatcaacccgaaccaggatccaaggagcgatcgaccagctgttctcctga

SEQ ID NO: 346275 - DNA, 660 bp, Pseudomonas aeruginosa
atgacgttcaaggccccggacagcctggcagagcagatcgcccaccacctcgcggaacgcatcatccggggagaactcaaggaacgggaacgtatccaggagcagaaggtcacccagaccctcaacgtcagtcgcggctcggtccgcgaggcgctgctgattctcgaacgccgccacctggtgaacatcctgccgcgccgcggcgcccaggtgtccgaactgtccccgcaacatgtggaaagcctctacgcgctgatcgttcagctctacatcctgctggcggaaagcgtcgcccggcgctggcgcagcgaagccgagctggcaccgttcctggtcatccagcagcgcctgctgaacaacctggcgcaaagcgatatcgacggcttcgtcgaggccagcttcgacatcatgcgcgcggcctttcctttcgcgaacaatccctacctgcaggagaccgtcgaaaacctgctgccggcggtgagtcgcgcctaccacctggcgctggaacggcgcaaggcggaaatgaaccagttcctcggcagttttgctcagctcctgcaagcggtgatcgcccgtgacgaggcgaggatccgcgaggtcctgctggaatacggccgccacaactgccagctggtgctggccgcgctcgccgaacgctga

SEQ ID NO: 346276 - DNA, 1134 bp, Pseudomonas aeruginosa
  misc_feature (191)..(191): n is a, c, g, or t
  misc_feature (974)..(974): n is a, c, g, or t
atgtttgcctcgctttcctctgcctggatgctgcgtctgaaaaagtacggctactggatctggctgatcgcggtgctcggcatcccgctcagctactggtggtcgctcggtagcgactaccccaacgcctggccctggctggtgatcagcgtggtgttcgggctgatcccgatcctcgatgccatcgtcgnccgcgatccggccaaccccgaggaagccagcgaagtgccggagatggaagcacagggctactaccgcgtactgtccctggccaccgtcccgctgttgctgggcatgctcgtctggtccggctggatcctcgcccacgagacccgctgggactgggtcggccaactgggctggatcctgtcggtgggcaccgtgatgggcgccatcggcatcaccgtctcccacgaactgatccacaaggacccgcaactggaacagaacgccggcggcctgctgctggcggcggtgtgctatgccggcttcaaggtcgaacacgtgcgcggccaccatgtacacgtctcgaccccggaagatgcctcgtcctcgcgctacggccagagcctctactcgttcctcccgcacgcctacaagcacaacttcctcaacgcctggcgcctggaggccgagcgcctgaagcgcaagggcctgccggccctgcactggcgcaacgagctgatctggtggtacgccatcagcgccctcttcctgctcggcttcagcctggccttcggctggctgggagcgatcttcttcctcggccagtcggtgatggccttcaccctgctggagatcgtcaactacgtcgagcactacggcctgcatcggcggcgcctggacaacggccgctacgaacgcaccacgccggaacactcgtggaacagcaatttcctcctgaccaacctgttccttttccacctgcagcgccattccgaccaccatgcctacgccaagcgccgctaccaggngctgcgccactacgacagcagcccgcaactgcccaacggctatgccgggatgatcgtcctcgccctgttcccaccgctctggcgcgcggtgatggacccgaaggtgcgcgcctactatgccggcgaggaataccagcttaccgacacccagcgcatctga

SEQ ID NO: 346277 - DNA, 285 bp, Pseudomonas aeruginosa
atgagcacaataccagaccgatatgaatttgataaaaaaattgatggcggcatgggtacaatcttcgtctgcaatgatagaattttagaaagaaaagtagctataaaatttattcaagctcatgaagagaatcgacgcatccttgatgaactcaatgctttaatgaaggtacgatccaagcacgtagtccaggtttacgacgtcatagaagacaacgaacgcgggcttggcatcgtacaagaatatatctacggcaatgacttatcaaattactccccccgctaa

SEQ ID NO: 346278 - DNA, 2295 bp, Pseudomonas aeruginosa
atgacaaataatagtgcgccaccacttgtcgtgaccagaggaaatgataatggttacgagcctgggtcgatggttattacgcatgtacaggctagtgggctagacataatccagtacattccaggtcgctcaagctacggtactccaccatttgtcccgccaggaccaagcccgtatgttggccctggaatgcaagagtacaggaggctaagagatactcttgataagtccaattcagaactcaagaaaaacctgaagaataaaaccttgaaggaggtagatgaactcaagagtgaagcggggttgccagttaaagcggtcagtgccaatgacatccgcgatgaaaagagtatcgttgatgcactcatggatgccaaagcaaaatcgctaaaggccattgaggatcgcccggccaatctttatacggcttcagactttcctcagaagtcagaggcgatgtaccagaatcagttgctagccagtcgaaagttctatggagagttccttgatcgacatatgagtgagctggccaaagcgtacagcgctgatatctataaggcgcaaatcgctatcttgaaacaaacgtctcaagaactggagagtaaagcccggtcaatggaggcgcaagcccagcaggtcactcaacagctcggtgccgacttcaacgcgatcaccactccgaccgccaccaaggtccagcaacgtgtgaaagcagtggatgctagtctgtctcaggtttccacccaggtcagtggtgcagtcgcctcggcaacccaggcggtgcaggtcaagacagcgcaagcccagcaacaagccaacagccagatttcgtccagccagaacctgatcagcgcggcatttcggaatcagattgccttggcagcacaggccagtggagaagcccaggtcacggctttcaacacccaagtcaagcagatcgtcaacgaagccacggcgttttcgacagcacgaaaacaagcgctggctcagtttgctgccaatgcggccgccgaggtcgaaaccgaggtcaacaggctaaccgcccaggtcaaggcaagccccaccaaggcggcttcgcaagctgcacaagcaacccttcgacaattcactgaaagcacctatgccaaggtgaacacctatgcccagcagaccgaagcagagctgcaggccaaagccaaggaggtttcggcagcggtagccgaggcacagcgtgcggcgaccaacgatttgcaaaaaacagccgatgtagtaccaggtcagatcatccaggctgcgaacaccttggcgatgccggctacctctacgccgctggtttcggtggccgggtttggtagtgcggcagtggagacggctcgcctggcggcttccctaacgaatgctgtcaatcgcctggttcagattgctggtagtggacccggcgcatacgttgccaccttcgcggtgctgtcgctgtattccgaccaggctggtaaagacagtgacaaggttcctgccggcgttcgcaatgcattggcactggaggcgtccgctctggggcttcctggcacggctgatttgcaaagcgtcgccaaggcaggtggcacggttgatatgccggtacgactcacgagtgctgcacaagagagcccgagtggtaaatcgcagattgccgcgatgttgaccaacggtgcaactgtccccaagggcgtgcctgttcgcgccgcgaccctcaatgctgcgacgggccggtatgaggtgacggttcccgcaaagtccaccgtgccgaatacaccaccgctgatcttgacctggacccctgccacccctccaggaagccagaacccctcaagcaccactccggtcgtaccgcagccggttccggtgtatgagggagcaacgatcaccccagtacaggccgagccggagtcctatccgggagtgccgttagatctggacgatctgatcgtgatcttcccggtgggctcgggggttaagccaatctatataatgttcaatcataaccctcatgatgttgttattgatgataagatcagagagcaaattccaattagagggtggactgaggttgaagttagagatgttatcggaaaaggtgcaacaggtagttcttcagataagcgtcggcctaataagacgatagatgggctggggcggaatgactctgcaacagtatatggaagtcctcctaatggatatatagttgtgaacgataggacaggtgaaattattcaaattgcagatcggaacgattccgcatgggcggttgacgggcgaatcatctggagaaataagtaa

SEQ ID NO: 346279 - DNA, 849 bp, Pseudomonas aeruginosa
atgaccattgcaatcaatgacaggcttcagaaaacgctgaacggacttaatgtcgatagcaggctaagcacctggctatggttctttctgaaaggccaagcaccacacgccaatctcggggagatcggcagccccggcatgcgagatcgcatggcagatctcatccaaaacactcaaactggcgcagagtttgttgagacacaaagtgccttacacctgctacccgcaaaagacttagaatggataacaagcaacaaaagacaaaatttatttgtagtaagaaaacttattgagaaaaacggtaatctgccgatcataggccaaaccagcctaactggcagagcactaaccattgcaatgattgacatatggagagtggaaataagtcagaaaatatggctaatcaatcaaataaaattcgaatgggagcaacactcaagttcagaccatatattcaaatggttcgatagctcggacaccaagcaaagactagaaacagcgtgggaaatagccaaaagaaaatatccaatactgacatttcagcaaaacatcccccaagaaaaggatgaatttataactctacttgactcgcaccccataaccactccagaaaaaatactactcatggactccattaagaagcgatggagccaaaataaatatcgagcaaaactagcaggtaaaaaacagtacaacttcattctttcagaaaaagcaattcaacgccttgacaagctagccgaaaaacatgacctaagaagaactgaagtactggagatactgttaaaaatggaagaagaaaaaggaaattacatcccagaaaagcttaatccactaaaagacctataa

SEQ ID NO: 346280 - DNA, 213 bp, Pseudomonas aeruginosa
atgaagcgaaacgccaacccggtggcgaccgttgctgcctggaattccgcataccccgtcggcaccgaggtcgactgccgattccatcgcgccgcggcgccgaagcgcacccggacgacaaccgaagcccaggtgctcggcggacacactgctgtcgtctggctcgccggagtgtccggttgcgttgccctttcccactgcgagccggcctga

SEQ ID NO: 346281 - DNA, 774 bp, Pseudomonas aeruginosa
gtgtcgccactcctcattaccgccctcatcatcggcgggatcgccctcctaatcgccattggctatatcaaccacgtggtggaaaacagcaagctggagaaagcgcgcctgaaagccgaactcaacgaccgggtccggcgctgcgcgcagatttccgagagccttcccggccagttcgtcagcccgtcgctgaagctgttgatgagccagatcgagctcagcctcagcgagcagcaactggcgctgcagaagaaagccgatgccgggctcaaggctcgtatagaagagttgcgcgcgctggtcgccaagggcgagtcgatcccggtgcgcaatccgccccaggcgatcctgaccgaggacaaggccaaggaagtccgcttcctcttcgaagccctgcatgcccagctcacccgtttcacccaggacggccacctgccgcgcagcgaggcgcagatctgggtcaaggagattcgccacctcctggtgcgcctgcatatcgagttcttcggtaatctcggccagcaggccctgcagcagaacgaaccgcgccaggcgcgcctggccttcgaacgcggcgcccagtacctgcgcaagcagcccgagctggcgcgctaccaggcggagctgcagcagatggaaacgcagctggcccgcgccaacgcgatggtgctgaacaacagccagccggcgagcgaggagcccagcgaactcaacgagggattgaaggccctcgatgcagacgacctgtggaagaagaagaacgtctacgactga

SEQ ID NO: 346282 - DNA, 1659 bp, Pseudomonas aeruginosa
atgcgtaatatcaaagaatgtctgcgcctcaaatttgagggaggtctctctcacgagaagatcgcccgggccttgcagttgtccaagggcgtcgtcagcaagtacgtcacggcggccaacgaaacaggcctggagtggccggtgctggccgcgctggatgaggtcgcgctggcggcagcactgttgccaactgccaaggtgcgccagacccgcggcgagcgggtgctgccggatctgatcacgatccaccgcgaattgcggcgcaagggcgtcaccctgcaactgctgtgggaggagtacgtcgccgcccatcccgagcagccgacctaccgctacacccagttcgtcgagcactaccgccgctacgccagcacgctcaagcgctcgatgcgtcaacagcaccgggccggcgagaagctgttcatcgactacgccggcccgaccctgccggtgatcgacccagccaccggcgagatcagccgggcgcatatcttcgtcgcggcgctgggggcctcgaactacacctatgcctgcgccacgccgggtgaagcccaggtggactggctgaccgcgctgggccaggcgttcagctactttggcggggtcagcgagatggtcgtgccggacaacccgcgcgccctgatcgcccatcctgatcgctacgagccgggcttgaaccgcgccgcgctggagtgtgcccggcattacgacacggtgatgctgccggcgcggccgcgtaagccgcaggacaaagccaaggccgaggtggcggtgcagatcgtcgaacgctggatcatggcgcggctgcgccaccagcagttcttcagcctgcatgcgctcaatcaggcgattgccgagctgcttgaggacttgaaccagcgcccgttcaagaagctcgacggctgccgccgggagtggttcgagcggctcgatcaaccggtgctgcggccactgccacagcacccctacgaggtggtgaccttcaagcgctgcaaggtcaacatcgactaccacatcgaagtgaacggcggcttctacagcgtgccctcggccctggcccgacagagcgtcgatgtgcggctgagcgcgcataccgtggaaatcctgcacggcaaccggcgggtcgccagccacctgcgacttcagcggcgcggcgcctacagcacccagagcgaacacatgccggcgtcgcacaaggcgcaccgcgagtggacgccgcagcgcctgctcgactggggcgagcgaatcggcccgcacgcccggcagatcgtcgagtaccaactgacccacaaaccgcacccggagatgggctatcgcgcctgcctgggcctgctctcgctggcccgccagtacggtaacgcgcgcctggaggcggcggccagccgcgccgtgcaactgcgggcgcttaacggccgcaccgtgcgcaacctgctcaagcaagggctcgaccaacaaccactgcccaagcccgcgacgccggcagcgcaacccagcagccacgagaacgtccgtggcgccgattactacacccaagaggaactgttcgatgatgacccaacacaccctgagccagctgcaccaactgcggctgagcggcatggcccgagcgctggaagagcagtggacgctgccggccagccacagcttgagcttcgatga

SEQ ID NO: 346283 - DNA, 282 bp, Pseudomonas aeruginosa
gtggtgctggtgccggtgcgggtgcgactgtacctggcgctgggcgtctgcgtggtgctggtgccgaacctgccgtcgatgccgcaggtggacgcgctgagcatgaaggccatgctgctgatcggcgagcagatcctggtcggcgccttgctcggcttttccctgcagttgttgttccacgccttcgtgatcgccgggcagatcatctcgatgcagatgggcctgggcttcgcttccatgatcgatccggccaacggcgtctcggtgccggtgctcggctag

SEQ ID NO: 346284 - DNA, 180 bp, Pseudomonas aeruginosa; identical to SEQ ID NO: 323520

SEQ ID NO: 346285 - DNA, 744 bp, Pseudomonas aeruginosa; identical to SEQ ID NO: 321133

SEQ ID NO: 346286 - DNA, 1563 bp, Pseudomonas aeruginosa; identical to SEQ ID NO: 335835

SEQ ID NO: 346287 - DNA, 1056 bp, Pseudomonas aeruginosa
atgagcaaacgtcgcagccaccgccgccagcagccggttacagttcagtccgcccaggaaggcgagttcatcccgcgccagggcggccgtgccgaggccttcaccttcggtgacccgatgccggtgctcgacggccggggcatcctcgactatctcgagtgctggtcgaacgggaggtggtacgagccgccgctgtccatggaggggctggccaaggcggtgggatcgagcgtttacctgcagtcgggcctgaagttcaagcgcaacatgctggccaagaccttcatcccgcaccgcctgctcagccgggcgacgttcgagcagttctccctggattggctgacattcggctcggcctaccttgagcagcctcgttctcgcctgggtacgcggatgccgctgcaggcgccgctggccaagtacatgcgccgcggcaccgatctggagacgttctaccaggtgcgcagctggaaggatgagcacgaattcgagaaggggagcgtgatccaactgcgcgaggccgacatcaatcaggaaatctacggagtgccggagtggttctgcgccctgcagagcgccctgctgaacgagtcggccacgctgttccggcgtaagtactacaacaacggcagccacgccggcttcatcctctacatgaccgacgccgcacagaacgaggaagacatcgatgcgctgcgcacggcgctgaagaccgcgaaggggccgggcaacttccgcaacctgttcgtctacgcgccgaacgggaagaaggaggggatccaattgattccggtcagcgaggttgcggccaaggacgagttcggctcgatcaagaacatcagccgcgacgaccagctcgccggtctgcgggtctatccgcagctgatgggggtggtgccgcagaacgctggtgggttcggatccatcagcgacgcggcagcggtctgggccagcttggaactggagccgatgcaggcgcgcttgcagcaggtcaatgaacttttgggtgatgaagttattagttttaataggtttgaagtggtgaagagtaactaa

SEQ ID NO: 346288 - DNA, 372 bp, Pseudomonas aeruginosa
gtgaaacagctaccgcaagcattgaacacggatggcaccgacgccgatcagtccctcccgttgcctgggacagaagcctacgagtcgctgccgcagttccccaaacgcagcgctcttcccttccgccgcaccatccgccgaaaggagctgcgccagatcgtccccttggcagaaacgacgatctacgaaatggagcgccgcggcgagttcccacgtcgcttcaacctgaccccgcgctgcgtcgtgtgggacctggccgaagtggaagcctggatcgagcagcgcaagcaaacccctcgcgccggcaccccgaagccggatgtccacctgcgaaaaactcgccctgtccggacggattcgggcgaggaatga

SEQ ID NO: 346289 - DNA, 291 bp, Pseudomonas aeruginosa
atggcagatttctgcattacggcagttcgctacagcaaagaccgcaatcacattgaatatgtgcaggtgcgagaggaaaagtcgaaaacaatcggtgcaccgaggacggttgcgcgcgccttcgtggcggatctcatccgtcttgaaaaagccagtttccaaacgcgaatgaaaacagccgacgacacgtggacgcggggcgcggatgtgcatctcatcgatgatgtgtacctgacgactgacaggaacagcaccgagcgggataacttggggaacttgccggagttctaa

SEQ ID NO: 346290 - DNA, 2049 bp, Pseudomonas aeruginosa
atgaacgccgttctcaaaaccgaagccttcgccgttgaagccgccacgccgctggaagtggccgacccaaccaagaacctgattctggttccgctgtcgcaactgttgccgcgccgctccaagcgcaacgtccgcacgactccgcgccagtccatccctgaactggccgcgagcatcgcccgcgtcggcctgctgcaaaacctcatcgtgattgccgccgcagatggcgagcattacgaagtcgtggcgggcgaccgccgcctgaccgcgttgaagctgctggcgaagaagaagcgcatcgccgccgactacgaagtgccgtgcctgctggtggccgatgcgtccgctcgtaccgtgagcctcgcggaaaacgtgcagcgcgagaacatgcaccccgccgatcagttcgcggcttttgccgcactggtcaaggaaggccgacccatcgaggacattgccgctgacttcggcgtgaccccgctggtggtgcagcgccgcttgaagctggcaaacgtctcgccgcgcctgctggtcgattaccgcgccggcaccgcaacgctggaacagttgatggccttgaccgtcaccgacgaccacgccgcgcaggaagcggcgtactacggtgcgccggaatggcagcgtggcgcgtccgcgctgcgcgaacgcctgaccgagcgcgaaatcaatgccgcgcatccgctggtgcgtttcgccggactggacacctacacggcggcaggcggcggcacccgccgcgacctgttcgctgaaggcgataccggaacctacctgaccgacgccgcactgctggaaacgctggtgcgcggcaagctggacgcgctggccgagggcgtgcgtgccgaaggctgggcgtgggtggatgctacgccgcacatcagttccgccgaccggcaggcgttccagaacgcgccgcgccagcgccgcgagccgaccgcccgcgaagcccgccgcttcgcctcgctgcaaacccacctcgaaagaatcgacgccgaactggaagacgcttacgacgccgaggacgaggacaaggcggcaacgctggaagaacgccgcgaacacgtggccggggaactgcaagccatcgaagaagccttgcaaagctacgcgccggacgtgcgcgccgtggccggtgccatcgtcactctcgaccgcgacggcgaagccgtgattcatcgcggcctgctgcgcgaggccgaggccaaggcactgcgcacgctggaaaagctgcggcagggattcgtcggggaaagcgcgaacgacgacgaaggcgacgaacccgaagcgcccaagaccgccagcgtgtccgatcggctggcgcagcggttgagcgcccaccgcacggcggcgttgcaagtcgaagtcgcccggcatccgctggtggcactggctgcgctggtgcatggcatggtgcaaaccgtgctgcaagaccgctaccacggacatgacttgccgcttggcgtcagcctgaaagtgcaagaccggctggaaagccttgccccggacgtgtcggaatcgcccgccgccgtagcattgcgcaccttgcaggaagtcgcgggcgcaaccttgccggaggaaagcgccgaactgttcgccgtgttgctgacgaagtcgcaagatgaactggtgcgcctgcttgccgtgtgcgtggcttccacggtggacgtggtgacgcctcgcgctgcgcagcaccagcccggcgcggaagtggcgcaggccgtggagctggacatggccgcatggtggaagccgaccgccgagggctatttccagcacgtccccaaggccgtgattctggaagccgtaaaccagtacgccccggcgcacgtcacccgcctgtcaaagttgaaaaaaggcgacattgccagcgaagcggaacggctggcggatggtacgggttggatgcccgccgtattccagaccggccatcacaccgagccggaaggcgtgccggtggtggtggacgaggccgacgccgacgcgccggaagatgccatcagcgaggaggaagcgcacgcactggccgcgtga

SEQ ID NO: 346291 - DNA, 351 bp, Pseudomonas aeruginosa
atgacccagccgcttgtcactaccgaacaacgtgcgcaactgctcgccgtcggcgcggcgcgcacagccggtcaaggcatcgacccgttgccggtggtgcggctgttcacgcccgatgcgcacgcgacctggctgttggtcgcgctcgaccccgcagacggcgataccgcctggggactgatcgaccttggcatcgggatgccgtcgcttgggacagtcaagctgtccgacctggccggcatcgtcgggccgcagcagcggccggtcctgcgcgacctgtatttccgcgcagcacggccgctatcggaatacgtgcaggtcgcgcaacgtgacggctccatccccgactga

SEQ ID NO: 346292 - DNA, 759 bp, Pseudomonas aeruginosa
atgactgatcgaaccaacgatttttggtatccgaccgccgcctatctctacgtgctgcacctggacggtcccgcactcgcctgggaatacttgcgccgccatcccgagtaccggcgcgactggcggcgccgtcgccgccggccggacgcagcgcacgaatggggcctgcgcctgctcgaagacccgcgccaagatgcacgcgacgcgcatcctgtctggttccccgatcatgacggcgtgctccagctctacccggatgccgacccgccaccggaagcccacaccttcgagttctggcacgtccccggcaacaagcaattgatccacgatggcaagcgcctggtgctgacggcacgctggcccggctgctgcgtgcggcttgcactcgcgccgggcctggccgacggtatggcctacctctatgccatccgcgcgtgcgccgcgccttgcgcgagctaccgcacgatcgcggccgagctggacaaactggcgacggtggacacggcggccgtgcctatggcagcggcccgctcgcggcccacgcccgccgcgctgctggaactgcacaccttgcaggcgctcgacgcgaccctcgcgggcgcgtccttgcgggagacagctgaagggctgtttggcgctgaattcgtggcgaccggctggtacaccgatggcggcctgcgctcgcgcgtgcgccgcctggtacggcgcggccaatcgctgatgcgcggcggctaccgccgcctggtacagcacgaatga

SEQ ID NO: 346293 - DNA, 597 bp, Pseudomonas aeruginosa
atgacgacgcttcccacgtccgcaaacaccactggaacagcgccgcgtcgtcgctcgcgtctgcgcgctcgcctcgtgctggcgagcctgtccatcggcggcttcgctgcgctggcatgggcatccttcgtgtcgccgctgccgcgcctgacctacaacccgtccgacagcgtggcgatcggctggtatcgcatcgaaccgttcgacccgcataccgccttgctgtcacgtccgttgtccgtggacagcatcgtgctggtgcccttgccggccgaagccgctgcgctggctgcgcagcgcggctacctgccaacgcgcattccgttgctcaagcgcgttggtgccgtcgcgccgcaggaggtgtgtattgtcggtcgcagcgtgcgcatcgacggcgtgccagtggccgccgcattgcctgccgaccgcatgggccggccgctgccatcctggcagcagtgccgccgcctcgaaccgggcgagctgttcctgctgagcgtgacgaatcccgcgtcgttcgacagccgttacttcgggccggtgcgcgcatcggccgtgctcggcctcgcgcatccggtctggttggagacacgctga

SEQ ID NO: 346294 - DNA, 1962 bp, Pseudomonas aeruginosa
atgagcagccgggacgacgaccgattccgcgttcgacttggtgcgccgaagcagcgtggcgacgccttcatcaacaaggtactgcgccagaccaacaaggccggcgccaagctcggcaaggcggctggcaaggtcggccagcgacccggttcccggttagggcgcggccacgtcgccgctcgctttgctggtcgtggacttggggcaaacgcccggcgcttgacgatcaaggcgaggctggtcaatctggcacaggcggggccgcgctccactgctgcgcacctgcgctacatcgagcgcgaaggcgtcgatcgccaaggcggcccaggccatgcctacgggccgacgaccgatgccgccgacctcgaagtgttcaaggaacgtggtgccgacgaccgccaccagttccggttcatcgtttcgccggaggacgccgaacagctcgacgacctgcgaacctacacgcggcacctgatggcgcgcatggaggccgacctgggcacgcggctggaatgggtggccgtcgatcactggaacaccgacaacccacacacgcacgtcgttctgcgcggcaaggacgacaccggcaaagacctcatcatttcgcgtgactacatcgccgaagggatgcgtcggcgtgcgtcggagctggcgaccgaatggctggggccgcgcaccgagctggagatgcagcaggcaatgctgcgcgaagtcgaacaggagcgatggacaggtctggatcgcaccttgcagcgcgaggccggcgacgacggcttggtgcatatcgaacgcttcgcagaaccccggctgcaacgccagcgacaaatgctgatcggccgtttgcaacgcttgcaacgcatgggcctggcgagcgagcaacagcccggcgtgtgggccgtccacgccgaggccgagccggccttgcgggcaatgggcgagcgcggcgacatcatccgcacgatgcagcgggctatgagtggcaagcagcgcgagctggtcgtgttccaacccggcgaggctggccgcgccatcgtcggtcgcgtcgctggcaaggggctggcggacgagttgtacgacaagggctatctgatcgtcgatggcacggacggcaaggcgcattacgtcgctttgccgccgcgctcggagttggagcagtacccgaccggagccgtgatagaggtgaaaagggcggccaacgtgcgcgttgccgaccgcaacatcgccgcactgtccgttggtggcgtgtaccgaaccgaccaccatcttgcgcttgcccaaggacaggctacgcccgaccgcgatccgcgtgaggtggtggccgcgcacgtgcgccggctcgaagccctgcgccgcgccggcatcgtggagcgcgaggccgaaggcgtctggcgagtgcccgacgacctcaccgagcagggccgccagtacgacgcgcagcgccttggcggcggcgtggcggtggaactgaaatcgcacctacccatcgagcgccaagcgcgcgtcgtcggcgccacctggctcgatcagcagttgatcggaggcggcaagggcttgggcgacctgggctttggggccgaggtgaaggacgcgctacgccagcgcgccgactttctgactgaacagggcttggccgagcagcgcgggcaacgcgtcgtcctcgcgcgcaacctgctggcgacgctgcgcgggcgcgagctggtgcaggccgcgaaggacattgccgccgaaagcggcctggcgcatcgccccctcacggacgggcagcgcgtggttggcatctaccggcgatcggttgtgctcgccagtgggcgctacgcgatgctcgatgacggcatgggcttctcactggtgccgtggaagccggtgatcgaacatcgcctgggccagcagcttgccgcgaacgtgcgcggcggcgccgtgtcttgggagctggggaggcaacgaggccccgccgtgggctaa

SEQ ID NO: 346295 - DNA, 1341 bp, Pseudomonas aeruginosa
atgctgcctccgacactggccgcgcgcctgcgcctgcggccgcttaacgaccaacatcacgaattgccctccatgcagaatgaactacaagaagcggctcccgaagcccccgccacgacgaagggctggttcaatcgcaccgtcgctggcgcgggactgaccagcgccctgggcgacttctgctacgaaacaacaacggtcatcctgccgggcttcctggccgtgctgggcatcccggcggcggcgctgggcatcatcgaaggcattgccgatgccgtcgccagcttcaccaagatggtctccggctatatcgcggacaagctcggccaccgcaagagcctcgtgctggtcggctatacgctgacgccggtggggcagatcttcatcgcgctggcggcgggctggccgctgctgctgcttggacggctggtgtcgtggttcggcaagggactgcgcggccccttgcgcgacgccatcgtgatccaagccgtcagcccgcagacgcgaggccgtgccttcggcttccaccgcgcggtggacaccatcggcgcggtcatcggccccttgctgggcgtggccgtgctgggctgggcgcagtccctgcattgggacgatgcggccgggccgttccgcttcgtcctctggctgtcggtgattccgggcgtgttggccgtgctggcattcctggccctggtcaaagacccagagcattcgcccaatccgggcctgcggctgtggagcacgctgcgcggcctgccgggacgcttcaagcgctacctaggcgcggtgggaatattcggcctgggcgacttctcgcacagcctgctgattctcggggcgacgcaattgctcacgtcgtcgctcggcgtcgtacaggccgcgcaggttgccgggctgctgtacgttggccgcaacgtggttcaggtgctggcctcctatcccatcggcgcatgggccgaccgtatcggctcgctgccgctgctcgtggtgggatacgcgctcggcgcactgacggccgtgttgatggtcctggccttctggttccataccgccagcgtgccgctgctcgccggggtcttcgttgccgccgggctgtatgtcgcggtgcaagaggccctggaatccaccgtgacggccgacatggtgggtcccgaaacgctggcgaccagctacggcgcgctgggcacggtcaatggcggtgcgaaattcctttccagcgcgacggtcggtttgctctggacggctgtttcgccagtgttcgggttcggtctcgctgctgccttgatgggcgccggcacgttggccttgtggcgcatccagcgaggcggcgcagcctcctga

SEQ ID NO: 346296 - DNA, 810 bp, Pseudomonas aeruginosa
atgaaactgaccgtcctgacctacaacaccctgttcgccggccgcgatggcgccaacgacgcacgtgcccaggcgcaaatcgaccttatcaaccaggtgcggcccgacgtgtttctgatgcaggaagccaagggcttcgatgccaatggcggcgcgtggctgtatgccacggaagatcgcatcggcatgcgcggctttctcgccatcgcgccgcgtaccggccagaacgtcgccatcttcatccgcgagccgctgcgcccgctcgccttcgacgcggatggcgtgcacttccaccacgcgctggcaacgctcaaggtggccgtgccgggcagcagcgaaccgatcaccttcatcagcgcgcacctgtgccccaacggccccgaggtacgacgccgcgaagcggcttacctgacggtgcaggccgccccggaccggctcacgctggtcactggtgacttcaattcggcctcgccgcacgatcccgagccggaaggtttcgacgcgctgccggcgcagcatcgcgcccgctacctggccgacgatctgcaaagcgccgaccgtagcgtgctggcgcatctggaggcggctgggtgggtcgatctaggctaccggctggacccggccaaggtggcaaccgtgcccacggccggcttcacgggcaccgagtttgcgacgatgcgctgcgactacctgttggcctccgcttcgctcgcccaggcggcgcggcattacgaggtgatccgcacgccggccacggatggcgcctcggaccactaccccgtcctcgcacgcttcgagttacagcaatga

SEQ ID NO: 346297 - DNA, 588 bp, Pseudomonas aeruginosa
ttgaaacagttgatttgttacggcggtttcactatgattgttcgcatgaaaattcagaactggctgttgctcacgtacaaggtgcccgccgaacccgccaagaagcgcatcgctatctggcgaaggctcaagggcatgggagccatctatttgcagaacggcgtctgcctgctgcccaagaccgacgaccacactcgccgcctcaagatcatcgagaacgaaatcgacgaaattgccggggagtcggtgctgctggagaccgtcgcgctggacaagtcccaggaggaaaaagtcgtggcgcgcttcaaggccgatcgcgatgagcaatacaccgaattcatcgccaaatgcgacgacttcgacgcggagattgccaaggagacggcggccagccacttcacctacgcagaactcgaagaaaacgacgccgacctcaagaagctccagacgtggttggagaagattcgcaagctcgacttctacggcgctacgcgggccgtcgaggcgcagcagcgcctgcagcgctgcgaggcgctgctcgatgcctatgcccagcgggtcttcgagtcacacgacgaaaaccgctga

SEQ ID NO: 346298 - DNA, 1368 bp, Pseudomonas aeruginosa
atgcgccgattccgtcccgaacaacttgagctgctgccctacatcggcaagtggcttgtcatcgccagcctggttgccttcctggcaggcaccgcttccgccttctttctcgtgtccctggatcgcgccaccgcgtggcgcgaggcgcaccgctgggtcatctggctgctgccggtagccggcttcgctgtcgggtggatctaccacctgatgggcaagaccgtcgatggcggcaacaacctcatcattgacgagatccacgaccccaagaaggtcgtgccgctgcgcatggttccgctggtgctgggcggcaccgtcgtttcccatctgttcggtgcctcggtaggccgcgagggaaccgccgtgcagatgggcggcgcgctggccgaccagctcacccacctgtttcgcatgaagcacgaggaccggcgcatcctgttgatggccggcatcagcgccggcttcgcgtccgtgttcggcacgccgctggccggcgccgtgttcggtcttgaaatcctcgccattgggcgcatgcgctacgacgcgctgttcccgtgcgtcgtggccggcatcgtcgccgatcaggtctgcttggcctggggcgtccaccacacgcactacgtgatgggcgaaatcttgcccatcagtttctggagcgtgatggcggtggtcgcggccgggatcgtgttcggcctcgtgggcatgttgttcgccacggccgcccacaaattgagcgcgtgggtcaaacgcctgattcactacgcgccgcttcggcccgctgctggcggcatcgtcatcgccacggcggtgtgggcgctcgatgcctacagctacataggcctgggcatccctgacatcgtgcgctccttccaggagccgatggcgccctgggacttcctcggcaagatggcgttcacggtcgtctcgctgggcacgggattcaagggtggcgaagtcacgccgctgttctacatcggcgcgacgctgggcaacgccctggccccgctgctgcaattgccgtttcccatgctggccggcatcggcttcgtcgccgtgttcgcgggcgctgccaatacgcccattgccaccacgctcatggcgatggaactgttcggcgcggaaatcggcccgctggccgccgtcggctgcatcacggcctatctgttctccggccacacgggcatctaccacgcgcagcgcgtgggccacagcaagcacagcaagcatcgcaacgccgttcccgaagaactgcgcattgccgacctcgcgcatttccgcaaacagaaggacgagtcggcgaaagaagacccgccgccgccggagaacaaggccgaaacatccgtcacgaccaaggaaaacgcccaatga

SEQ ID NO: 346299 - DNA, 402 bp, Pseudomonas aeruginosa
atgacctcaaaagccagtcagcagcatatcgccgccctgcggctgtatttcccgatcgccaccaaagccaaggtcacgcgcttctggcatcacttgagcgcgccggcgctggcgcatcatctgctgacggtcgccaagcaggccaacatcgtgcaggccatgctgcatcaggtcagctccggctacctgccgggcgaacgcatgtcgcaccaccatcccgaattgaccggcatgcggcatccgcaatgcctggagctgctggataccgaggagcgcctgcgcgagttcatgcacgagcacgccgaggaactgcgcaaggtgcatgccgtgctgttcctgtgcgaattgccgctgggtcgccaccgcgccgcgcatgcgacacatgccagcaaggccagctaa

SEQ ID NO: 346300 - DNA, 390 bp, Pseudomonas aeruginosa
atggccggcgcctacgcaatcctcgcggtgagcatcgggtcggtgatcggtgcgctgatgcgctacggcctgagcttgagcatgaacgcgcttgcgccgcacatcccaatgggcaccctggcgtctaacctgatcgcagcctacatcgtgggtgccgccatcgcctatttcggctcggcgccgaacctgtcgccggcctggcggctgttcgttatcaccggcctggccggcggcttatccaccttctcgacgttctcggccgaactgctgacgctgctgcgcgacggccgcctggggtggtcggccggcatgctggcactgcacgtgggcggctcgctcgcgatgacggtgcttggcatggccacggtttccctcattcgccaaccatga

SEQ ID NO: 346301 - DNA, 324 bp, Pseudomonas aeruginosa
atgaaaggctatcaactcacgttcttcacgggacaagaccgcaggcaccggcacacgcccattggcgagtggctgctgaaattcgccaaggaacagggcgccgccggcggcacgttggtcggcgccgcggaaggcttcgaccacgccgggcgcttccattccgcgcatttcttcgagctggcggaccagccgctcgccatcaccgtctcggtggacgaggcggcatgccagcgcctgatggacgcgctcgcccaggaagacatcaacctgacctacgtaaaagtgcctgtcgagtacgggcgcgtgggcaaggccgtgacgtaa

SEQ ID NO: 346302 - DNA, 285 bp, Pseudomonas aeruginosa
atgttgaccgttcgcaatcttccaccggaacccacgttgtccgactggttcagggacaacaacaacctgctggccggcctgatcctgtgggcggctgctctgctgtggcttgccggtattcagccgcgcttgaaagagtcagcttggtaccacgtcagcttcgtcgaaggcggtttgatgtacgaccgcatgccggatgaggcggcgtgccgtgccagcgtggcggacaacaccaccgcctgcctctcgggcgcggaactggacgggaacggttccggccattga

SEQ ID NO: 346303 - DNA, 1284 bp, Pseudomonas aeruginosa
atggagtctgcgatccagacgatacacgcccgcgaaattctggattcacgtggcaatcccaccatcgaggtggatgtgcggcttgctggcggcgcgaccggccgggcagccgtgccttcgggtgcatcgactggcatccatgaggcggtcgagttgcgcgacgacgaccggtaccgctatgcaggcaaaggcgtgtgcagggccgtcgcccacgtcaacaaggcgattggagccgtcttgcatggcctggacgcaaaggatcaagccgccatcgaccacgccctgatcgcgttcgacggcacgccgaataaggcccggctcggggccaacgccatcctgggcgtcagcctggccgtcgcgcgggctgcagcacagacggccgggctgccgctgttccagtacctgggcggcgcgcaagcctgccgtatgccggtgccgatgttcaacatcctcaacggcggcgtgcatgccaactggcagggtacggacttccaagaattcatgatcgctccggttggcgcggcaaccttcgccgaaggcgtgcgctggggtgcagagatttaccatcgcctacgcgccacgttgaaagagcgtggctactccacggcagtcggcgatgaaggcggctttgctcccgccttgaagcacaacagcgacgcggtagagctgatcctggcggccatcgagagtgccggatacacgcccggcgaggatgtggtgattgcgctcgatcctgcatccagcggcttctacgagaacggtctgtaccacctgcgcagcgaagaccaccatgtcacagcggagcagatggtggagctgtatgccgactggatcgccaggtatcccatcgccgtgctggaagacggactggcggaagacgactggactggctggaagctgctgaatcaggcgctgggaagcaggattgaactggttggtgatgatctgttcgtcaccaacgtagaacgcatcgagcgcggcatccgggaggacgtagccaatgcggtgctcatcaagcccaaccagatcggcacgctcaccgaaacccgtgccgcagtggatacggcctatctggctggctggggtgcaatggtgtcgcaccgcagcggcgagaccgtggacagcttcattgccgacctcaccgtggcgctgggcacaggccatctcaaaacgggcgcgccatgtcgcggcgagcgcgtcgaaaagtacaaccagctcatgcgcatcgaagaagtgctgggcaaggccgccgtctatgccggacatgccgcgttcgtgcggtga

SEQ ID NO: 346304 - DNA, 630 bp, Pseudomonas aeruginosa
atgacgaccatcatcctgacacgccacggccacgtggattggatagcccccgaacgtttccgtggacgggccgaaattccattgtccgagctgggggagcgacaggccaaggctctcggccggcgcgtagcccaaacatggaagcctgatgcgatctacaccagtccgctgggccgttgcgtgcgcactggtgcggagataggcgaggcaacaggcgccaagcctgaaattctcgatgacctggccgacacgcactatggcgaatggcagggtctcacgcatgacgaagtgcgcgcccgctggccggaggaacatcggatatggttcgaggcaccggacctcgccgccatccccggcggcgaaacgctcgctcaggtcctggcgcgcggcatcagcgtgctgcaacgggtgttgaagaagcacaagggccagactgtggttctggtcggtcacgacagcatcaaccgggtgatcctgacgcacaccctcggcttgtccttgtcccgctattggcggatcaagcaggagccgtgctgcatcaatgaaatttccattgatggagagactttcaccatccaacgcatcaacgaaagccaccacttgatcgatgtagccgatgaagtgatctag

SEQ ID NO: 346305 - DNA, 249 bp, Pseudomonas aeruginosa
atgaacaagagcatgctgttgatactcgccgtcgtgctggcctcctgcggcaagcccgagccaaccgaaacagtggagtcgctggtagccaatcccgaaagactcaaggagctgcgcgcgcagtgcaaaacggatcgtgccaagctaggcgacgaactatgcaatcgcgtggctgaagcgacgaaccgccgcttcctgggggatggcaagacgccctacaacccgccgaaggaagcccccaagttctga

SEQ ID NO: 346306 - DNA, 735 bp, Pseudomonas aeruginosa
atgaagattcgccttctcgccctcgccctcgctgtcgctgcgttcgtcggcctcatgcctgctgcgcacgcgcaatgggccgtcatcgacgcgaccaacctcgtgcagaacacgatgaccgccgcgcgcacgctggagcagatcaacaaccaggtcaggcaactccagaatcaagcgcagtcgctgataaatcaagcgcgcaacctggagagtctgccgttcaacgtggtcagccagttgcgcacgaacttggcgaccacccagcagctcatcgcccaggcgcaagggttggcgttccaggtgcagagcatggatcaacagttcgcgcgcctgtacccggagcagtacgccgccaccgtcagcggcaaccagatgtaccaggacgcgcatcagcgttggcagaacacgctcgaaggcttgcagacctcgatgcggatgcaggcgcaggtgtcgcagaacgtaatcgcagacgaaagcacgctgaccgatctggtcggccagagccagtcggccacgggcgccttgcaggccatgcaagcgacgaatcagcttctcgccttgcaggccaagcagtccatccagacgcagcagcttcagcttacgcaggggcgcgccacgtcgctggaactggcacgccaggccgccgccgtcgagcgcggccgcgaggtgacgcggcgcttcctcggcaccggcacggcgtatacgccgcagcccgtgaccttctacggcaactga

SEQ ID NO: 346307 - DNA, 294 bp, Pseudomonas aeruginosa
atgaaacgcgcgtccgtcctgttcgccatcacgtgcctgctagctggctgcgaccggccacacgcgctgtcggtcgatgcactggccaccgacccaacacggctgcacacgctgcttccgcagtgccggcgtggcgagcatgacggcgcgttatgcgcgcaggtcgcacaagccgacctgcgccgcttcctctccgggcgcgccgggcccgatgaataccaaacgctggccgacctgccgccgatcccggccagcttcgacgggccagacgcgccgttggaggcagagccatga

SEQ ID NO: 346308 - DNA, 1365 bp, Pseudomonas aeruginosa
atgaacgacgtctcaatcatcgaccatttcctcaacgtcttttccaactacatcgactccggcttcggcctgctgcgtggcgaggttgcgttcctgaccgcgacgttggtggcgatcgacatgacgcttgccgggctgtattgggcgctcggtcacgccactgggcagggcgaagacgtgatggcgaagctcatccgcaaggtgctctacgtcggcgccttcgcctacatcatcggcaacttcaacatgctggccggcatcgtgttccgctcgttcgccggcctgggcctgacggccactggctcggccgtgagcatggagacgttcctgcaaccggggcatctcgccaagaccggcatcgacgcggcggcgccgatcctcgaccagatcagcgcgatggccggcttccccgaggtgttcatcaacatcacgcccatcgtcgtgatgttcctcgcgtggttcaccgtcatcgtctgcttcttcgtgctggcggtgcagcttttcatcacgctgatcgagttcaagctgaccacgctcgccggcttcgtgctggtgccgttcgccctctggaacaagaccgcgttcctcgcggaaaaggtgctcggcaacgtggtgtcgtcgggcatcaaggtattggtgctggcggtcattgtcggcattggcacgggcttgttcgccgagttccaggttacgcccgacgaaccttctatcgaccacgcgctggtcgtgatgttggcctcgctcgccatgctggcgctcggcatcttcgggccgggcatcgccacagggttgatttctggcggcccacaactcggcgctggtgcaatggctggtgcggccttgggcgcggcgggaaccgccgtcgccatcggtgcggcggccactggcgttggtggtgcggtcgcggccggggcgcgcatggcacccgccgccgctggggcgattggtagcggcgcgcgtgccgccgcctcaactgccagcagcgcgcggtcggcgttccaggccggttccgctgctgcgggaggcggcttaaaaggcgccgccgcaggtgtaggcaacgtcgcaaagactggcgcacaggctgccgggcagaaagtcgccgccggcgcacgcgcattcggcgagcgagttgccggtgcattccgtggcgagggtggcacggctgctggcgggtctgccgaagcgagcgcatccgaaaccggcccgtcctcggctgctgccgatcaaaagcaacctgcttgggccaagcgcctgcatcgtcgccagcaaatcgcccatgccgcgaccaccgccgcgcacacgctgcgcggcggagacggcggtggctcggcgcaaggcccaagcctgggcgattccgattcttga

SEQ ID NO: 346309 - DNA, 990 bp, Pseudomonas aeruginosa
atgaaccagtctttccgcttttacgctttcgtgctgaccttggcggccctgtcgggctgcgcctcgcagggcaagccaccaccgcgcatttctctcgacgagccggtgcaggcacaaccgctgcccgaaccgccgaagcctgttgaagtggtggcggtgccgaaggtgttgccgatgccggcgcagatgaagccgctgccggaagtggatgaggccaagccagcgccggaacctgccgacgaaaccttgcgcgtatcgcgtgcgaacgccgaagcgcgcatggcacccacgcgcgagggctatgtcaatgcgatccaggtctggcccttcaccgatggcgcgctgtaccaggtctatgcggcgccggggcgcgtcacggtgatttcgctccaacccggcgaggagttggtgacggtcgccgccggcgatacggtacgctggattgtcggcgacacgtccagcggcgccggcaactcgctgcgtgtcagcgtgttggtcaagccgatccgctcgggcctcaagacgaatctggtcatcaccaccagccggcgcacctacctgatcgagctgacatcgactgacaaggcgtggatggcgtcagtgtcatgggagtatccgaaagaccagatgcttgccttgcagcgtcaggatcaggccgcgcaagcggcagcgccggtcgatactggcctatcgctggagaagatccgctttcgctacgcggtcagcggcagcaatccgccttggaagccgctgcgcgctttcgatgacggcgagaaggtctatatccagttccctcctggcatcgcgcaaggcgagctgcctccgctgttcgtcatcggcgcgcagggtgatgggcaactggtgaactaccgcttccgcgccccgtactacatcgtggaccggctgttcggcgcagccgaactgcgcctgggcggcgacaagggcgacgtggtgcgcatcgagcgcacggacggtacgaaggggaaatga

SEQ ID NO: 346310 - DNA, 1263 bp, Pseudomonas aeruginosa
atgggtttccaggtcatagagcaggtggtgaatggtgctcgtagaaagctgctggtgcaagactacatcccggtttactaccccaacctctacatgaccatggagcactcgggcagagcactggaaacaacaaagaagtaccttgagcatctggttgtgcttgagcagtttctggctttttcctctattgatctgatttctcgcatcgaacagcgccctgctagccaatacctgacagacagtgagctttccagatttgtgtcggacgcagggtttaataaggaaaccttggccatgaagtatgcggggatgcgtttgcatccgactgcctacaaatcagttggcaaagtccatgcgcagcagcgaatcgaggcggtacgcgactatctggccttcctttatgacaagttgggtgatcactcaacacgatatgaggcgattgacgacctgaaggggcgcatcaaacgcaagatcaaagcggcccgcccttcgtggaaagaaacgcgaatcgacgaaatgaaagggcttaccagccaggagcgaactcgattgctggaaatcatgcatccggatagcgccgagaaccccttttcagatgaagctatcaggctacgtaactacatcattttgctgctgggtctcgacatggggctgcgccgctccgagatgctgctgatcaagaccagcgatattcactggcacagtcgtcaactagcggtggtcaacctagaggatgagagcctcgacccaagaaccatggccccgcaattcaaaaccaacgagcgcatgctgctcatgaccgatgacctgtatgacgcaatcactgagtacgaatcgaaatatcgccacagaaagcctcgtagcggcacatcgcaagcgagaaagcatccgtttttgctggtggcccacaagcgaaatgagggcggacctctgaccatcaaggcagttgatggcgtcctgtccagggtccgagaaatagcgccggaactggctcatgtgcacccgcatattctgaggcatgacgcggtctacacgatgctggaaagcatgcgggaggaactggcagcgctcacgccggaggatcgcaccacgcaggttcaaaaaaccctcacatggatgttcggctggagtcccggatcggacatgcctggcctctacggcgacaaattctggaaagaagaggcggacaacgcgatacagaagcgggccgagaggtttaaggccatccgtcaaaaggccgagacaccgggcggttcaaagtga

SEQ ID NO: 346311 - DNA, 1596 bp, Pseudomonas aeruginosa
gtgaaaatctccgtcgaagcacttcaggcacccacgaaggacagcctcgatgcgtggctgaacacgcctcgcctagcgaaatgtgggaaggtgttcacacccgccgaaccgatgtggaaacccgatcaatcagctaatcattcagtcaactggaaagcggctgttgcctgcgtctcgctagattggcagccttggttgcacgccgccctggcgtaccgaatggccgatatggcagcgggcacggtagctagcgccgccagtgggttgtcgcgggctgcacaagccgggcttgacccgctcaacgaggatcacctgatcgctctgcgggagcgctttaaccattctgagtttagtgtcattgcctctttcatggcgttttggcacgactgcgaatccctcgaacagcgcccgtcgcaaccccttatcgatgcctaccaagcattgcccaggaaaaagagatccagccacgatgtgatcctcagcctggaccccgaacaaggcccgttcacgcaggtggagcaggacggtctgtaccaatggatacatgagcagttttgtcacgggcagttagattgcgagcaatacctgtacctgcgcatattgatgatttacgggtcgcgaggcactcaggtgcgagcgatggtttttggtgatttcacgaagagcgatcagggctgcatgatcaggataccctgggcaaagcaaagatgggacgaggaaggctggcgagtaaagttcgaaacattcagcctggatgatgacttctaccgcgtggtgcaggcctacaaggcaatggtactggcgcaactctggcaaacgtatccagacggtaccgattggaatgtagccattgagaatgtgcccctctttcgtcggaagctggatgatgaaacagaacttagggagcggattaatccccctgttttgctcgatagtcaccttcaaaaaagcctcgaagacgcgccgcaggcgatctttcatgccggacaaacaacgatcagcgcttggcttgagcgcatcgagcggatggagggctttccgatttcgcctcgcacccatcagccgctaaaagtgacgcggggtcaccggttcaggcacaccctcggcacggacctgtccaatgcagggatgagtgagtgggcgatggcccgcgcattgatgcacaagggtactcagacagtgcgaaagtaccgacaggtgtcggcagagttgctggcgttgatcgacgcgaagatgaccgaccatctgaccttggttgtgaatgcgttcaccgggatcatcgtcacagatcgtacctcagcgaaaaacggggaactagcggatcgactaatcgaggatctggcggtgtgtggtgccgatgccgcctgccatctcgatgcgccttttacctgttacgcctgcggaaagtttcagccacttctggacgctgaccacagttcggtcctcgagcgattggaacgtcgtcgggagcaaaccattgccacggacaaaaccaccggcgtcctctgggatcgggccattttggcttgccgcaaggtgattctggattgtgaggccatgcgccaatcatcgagctctgggaagacagaagaatga

SEQ ID NO: 346312 - DNA, 2232 bp, Pseudomonas aeruginosa
atgaccgaagtgtttgattctgaaccgtctgagccgacgaacaacattgtcgactttaagcccaggagccaactggctgcggaggctcagctcgcggcgtttatcgaatgggcaaaacagaccctgcccaaaggcattcccaatcgagtgcacgcgagtattcgctgggaggacgacagttggcacccgcacggcgtccaatcctgtagtttcactgcgctgggatcgaccaaagctgtccgaaaggcgatgcaggcacccttcacggagtttgccaaggccatagcggtgtaccgaagggtgtatttgcagaaaaagttcattgatgagtggctgggcgccctgaagacactggaagtcgccctattcgagcttaccggcacgcgggatgtgacgcgggtatccgccgctgtctgtgatacagcgtgcaaccacatgaaccgtcactggacaaaaggcaataccgcatacggtatcagtaaggcacttgaggccatcatcaccctgatgcgggacaaaaaattgctcaagtcggatttccgatggacttctccgctgaagctgaagccgactggcacgctcaagcagcaaagagccgatcgggaacagaagctgcccaaccctgaagcaatcaaagccctcggggaggtgttcaataacgaattgacccgccccctcgatatcgttgtgacatccgcctgtgcgctgttgctgagtgcacctagtcgcgttggtgaattggctgatgtcgaattggattgcctagtattcaaagaggatacccaaggcaaccagcgcatgttcttgcgctggtacgcggaaaagaaaaaccaggtaatgctgaagcccgtcattgcacctgagatggagccggtcgtcgagcgggccatcacgttactaaaaccgatcaccgatgaggcgcgggcttacgccgcctggctggaagaccatcccgatgagtttccgccccatgaaggactgccatccaaggggcctgatgaaccgctcacttacaccgaagtctgtgccgcgctgaaactcagcgctggtaacggcccgcgaaggagattcaatgccaagttcttgaaagacatggagaagcaaaaggcactcagccccgtcgcccgagccctattggccgagatccgagacgggtgggattccagcgcggggaggcgcatatttgttaagggcaggatagagagctatgaatttgacgaccggtgtgtcatcacgctgcgcaagctcaatgtactgctgcgggagaagtatcttccaaaggattttccatacaccacgccgtacactgagggcaaagctcgggtgaagtaccgtgatgcgttgtttaccgtgcgcacgggagcaatggctgaagactcagctttcgttgtgacacacgggtttggcgtggagatcgcggcgaactctggccgattgactgtgcaattaggcggtacgaacaaccagaaaaagagaagcctgttcgagcgacatggctaccacggtgtcaaggtcaacacgcatgcgtttcggcacgaattgaacacgcggatgcaccaggccggtctgtcgcaactcctgattgacgccttctccgggcgcacgacgatgggatcggtctacaatcacgaaaccgtcgaggaacgcacccaaagggttgcggattaccacccacaaacgaagcacagcaccgccgctcagcgcctagaaaaggtcaaaaccaatcagccgttgagcctgattgatgtgagagaactgcgcgagggtgagcaggatcgcattgtccatcttggcccctacggcgtttgtgtgcacaactttacttccgagccctgcccgaaaatgggtgcctgtttggactgcggtcggctcggttgcatcaaaggggatgacgtaaagctgagcaaccttaaggaggaacgcgacgatcttaaacgtcgtctcgataaagccgtggatgcgcagtctcggggcgtgtttggagcatcggagtcggccaaaaaactgggggagaagctctttaagtgcacggcgctcatccatacattggaagatcccaaactcgaaaacggcgccatcgtctggaacgccgataacggttggacgctgaccaagaacgccgctgcaatgtcggggctgatcgaagtcaaactcattgaagataaccagacgcaagaggcgttgccatcgttgaatgacgtcttggctttgctggatgagatcgagggttaa

SEQ ID NO: 346313 - DNA, 399 bp, Pseudomonas aeruginosa
atggggcatttaacgccaaaggatgagaaacgcatcattaagctaattgaggaatggtcagagccgaagctgacctggcctttgcttgttgatgcctgcaaagaaaaactgggtatcagtcgtgctcgccagtccctgatgaatctacctgccgtggatttggctatgaagaatcgcaaggcggcattgaaggctcagaagctgaagccgggctggattagcgatattcaggcagccaacgtgcgcattgaggaactgacagagaacaatcagaagctgtcagctgctgttcgagatatgtatcgccggtttttgatctggcaagccaatgcggatatgcacgggctaacgcaatcgatgttggagcagccggtttcacagcttcaaaaaaagatctga

SEQ ID NO: 346314 - DNA, 1260 bp, Pseudomonas aeruginosa
atgccgacctatgccctggtggactgcaacaacttctacgtgagttgcgagcggctgttccgccccgatctgcgcgcgttgccgatggtggtgctgagcaacaacgacggctgtgtggtgagccgcagcaacgaggccaaggcgctgggcattggcatgggcgagccgttcttcaagatccgcgacttggtgcaggcgcacggcgtgctggcgttcagcagcaactatgcgctgtacggtgacgtttccgcccgggtggtgcgggtgctgcgcgagctggcgccgcggctggaggtgtattcgatcgacgagagcttccttgacctggccgggctgggccggccgctggctggttacggtcggcacattcgcgcggaagtgcaacggctgacgggcatgccggtgggggtgggcatcagcaccacgaagaccctggccaagttggccaactgggccgccaagcggcgtagccagagcggggtggtggtggccacccggcccgagcagcaggcggcgttgctcaaggacgcgccgctgggcgaggtgtggggcgtggggcgcaagctgcaggcgcacctgggcgcgctgggtgttaaaaccgcctgggatctggcgcagcaggacgcctggacgatgcgcaagcagttctcggtggtgctggagaagaccattcgtgagctacgtggcgagccgtgcttcgccctggacgagggaccggagccgaagcagatgatcacctgcagccgcagcttctcgcgccgggtgacggagctggcgccgctgcgcgaggcggtggccagctacgcctgccgcgcagcggagaagctgcgcgcgcaaggcgatgtgtgccagctgctgcaggtgtatatccgcaccggggtgttcaacccggacgagccgcgctacgcgcgcaccgccagcgtgccgctgcacacgccgagcaacgactcgcgcgacctggtgcaggcggcgctggccgggctggagggtatctaccggcccggctaccggtaccagaaagccggggtgatgctgatgaacctggccagccccgggcaggtacaggccgacctgttcaccccggcgccgcggccgcgcagcgcggcgctgatggcaaccgtggacaggatcaacaccaacatgggccgcggcaccgtgcgcctggcgcgcgtgccggccctgggcggctggtcgatgaagcaggagctgcgttctccggggtacacctgccgctgggacgagctgccaagggtacgttag

SEQ ID NO: 346315 - DNA, 432 bp, Pseudomonas aeruginosa
atggccctgacagtgatcggccgcccgttgcggccaggtctgcggctaccgttgttcctgagccgcgttgccgccggctttccttcccccgctgaggaccatatcgaggccagcctctcgctggacgagctgtgcgtactgcacccggcggccaccttctttctgcgggtggtgggggacagtatgactggcctggggattttcgacggcgacatcctggtggtagaccgctcgatcacgccgcgcgcgggcatggtggtggtggcggtggtgaacggggagttcacctgcaagcagttggcctatgagcacggcgcgccggtgctgcgcgcggcgaacaaggcctacccggacattcgcctgcgcgacggcgaggacctggaggtgttcggcgtggtgacgcgctgcattcacaagctgccggggatctga

SEQ ID NO: 346316 - DNA, 426 bp, Pseudomonas aeruginosa
atgtgcggtggcgtcgaagtggccgggcgctacacccaaaccggccagcaactgcgaatctacttccccaacccacgcgccgccctgcccgtgcgccaggccgacggtgcagtggcctgggtcgcctggggccgccgtaaggagcaacccggccacctgcccgccaccggctgggcccgaaccgactccatcaccgccggtaaatgggcgcgctaccacccgcagccagtgcaggtgctggtcgaacgctttatggagaaagacgcatcaggtgcctcgcactggttcgacctggagccaggccaggccatcgaggcgctgctgatcgagcacggggaagaacggcgggtctacgtggtcaccaccaccccgccgcagggtatgccagcggtgcacgaccgctggccgagcgtggtaacggcctag

SEQ ID NO: 346317 - DNA, 759 bp, Pseudomonas aeruginosa
gtgcaggtggtcgagcgctggatcctcgccgcgctgaggaaccgccagttcttctccctggacgaactcaacagcgccatcgccttattgctggagcggctcaaccgacgaccgtttcgcaagctgccgggctcccggcactcggccttcgaagccctggatcgtccagcgctgcgcccactgccggagcagccctacgtctatgccgagtggaagaaggcgcgggtgcacatcgactaccacgtcgaggtcgatggtcattactactcggtgccgtaccaactggtgaagaaacaactggaagtacgcctgacagcgcgcacggtggagtgcttccacgccaatcagcgggtggccagccacctgcgctcaccgcacaagggccggcacagcacacaggccgagcacatgcccaagagtcatcgcgagcatgccgagtggacgccacaacggctgatccgctgggccgagcagaccgggccgaacaccgccggcgtgatcagccacatcctcgagcggcgcatccatccgcagcagggttaccgggcctgcctgggcatcctgcgcctgggcaagactcatggcgaagtgcgcttggagctggcctgccgacgcgccctcagcctcggcgcgtgcagctacaagagcctcgaatcgatcctgcgccagggcctggaaagcctgccgctggctcaagccaacctgccgctgctgccggacgaccacgccaacctgcgcggccccggctactaccactga

SEQ ID NO: 346318 - DNA, 378 bp, Pseudomonas aeruginosa
atggcagacagcaaggaggcgtctggcctgccggccacaagccagcaggttcagatctttacctcgtccgatggccaggcgcagctgcaggttgccctggagcacgacacgctgtggctgagccaggcgcaaatgggcgagctgttcgataccacgcctgaaaacgtgctgatgcacctgaaaaacatctttaacgatggtgaattggccgagccggcaaccactaaggatttcttagtggttcgccaggaaggtgcccgccaggtgcgccggcgcatcaaacactacagcctggatgccatcatctcgagctgcagggccatgcagttgttgcaaaaaaggcaacaacagccgttggtgctgcggcggccgctgtaa

SEQ ID NO: 346319 - DNA, 1842 bp, Pseudomonas aeruginosa
atggatattcaggtctatgacgtcatcgccccggagaccgcgcaactggtgaaagcctctctggtaggccagatgccggtaacgatccacatcaacagcccgggcggcagtgtgaccgatgctctggcgatctacagcagcctgcgcaagcacggtggccgcgtgacagcgatcatcgacggcctatgcgcgagcgccgccaccatcgttgccatggccgccgatgagatcgtgatggccgagcacagcctgctgatggtccacaacccctggaccgtggcctctggtgatgccggcaaaatgcggaagactgccgatgccctggataaagcgggtcgcgaaatggcagccctctacgccgagcgaaccggcctgcccgaggacaaggtctcttccatcatgggtgccgaaacgtggttcaacgcctacgaggccgtagatgcggggttcgcgcatcgggtggacaacagcgagcgcagcaagccacgtcttgccgctgcgtccatggcgttcctcgctaccgtcgtccagtcacccgaggcggccgcgcagtgccgtcagcgcctggcacagagccgcgacgaacaccgccgccaactcaacgcactcatcgcccccttcgaggggatggagcgcatcgaccaactcagcaagagtgaggtattcatgagccacaccatcgaccaggcccgcgagaagctgctggccactttggccgaagatacgcagccgtgcgccagcccgggcgctggcgcccacatcttcgccggcaacggcaacatcgtgcgcgacggcatgatcgacgccctcagcgctcgcctgggtctcgcccaatcgcgggatgcgcggaacccctatcgcaccatgtccatggtcgatatggctcgtgcttcgttgactgagcgcggcgtgggggtggctaccttcggcagcaagatgcaactggtcggcgcggccttcacccacagcaccagtgattttggccacgtgctgatgagcgtgtccgagaaggcgatgctgcgtggctggcaaaacagcggagagaccttccagcgctggaccaagaaaggcgagctcaccaacttccataccgcccaccgcgtcggcatctcgggcttcccgacgctgcctaaaatcccggagggggccgagtacaagtacgtgacctgtagcgaccgcggcgcccccatcgccctggccacctacggcgccctgttcggaatcacccgtcaagccatcatcaacgatgacctgagcgccttcagcaccctgcccaacaacctgggccgtgctgccagtcgtaccatcggggatctggtctacgccgttctatctggtaacgccccattcgttgacggcaaggcgctgttccacgccgaccacgggaacaccgacgaaacggcgcaagccatgtcgccggctatcctgggcgagctgcgccgcaagatgcgactccagaaagacgcctccggcgacgcgctgaacatcgccccagcgttcgtgatcgtgccggctgcattggagaccgccgctatccaagtgctgcacagcacctcgctgcccggcgccgagtacaacagcggcatcgtcaacccggtgaaccagatgggcgagttgatcgtggaaagccgactggatgcctccgacccgctctactggtacgtcgcagccgagcagggttccgatacgatcgaggttgcttacctggatggcgtcgatactccctacctggagcagcaagagggatggaccgtcgacggcgtgaacttcaaggtccgcatcgacgccggcgtggcaccgttggactatcgaggcctgggtcgcgccaagcacggcgtttga

SEQ ID NO: 346320 - DNA, 213 bp, Pseudomonas aeruginosa
atgacccaagcaaaaggaatgaccgttcacctggacgaggagtgcgtggccgccctctcccagttgaagcgccagatcgatgccaccgccccagccggcatgccggtcttctccatccaagcgctggcgcgccacgccatccgtaaatggtgcgaccacaccgcagcccctatcccgcgcccctgggaagagcaggctgacagcgaggtctga

SEQ ID NO: 346321 - DNA, 231 bp, Pseudomonas aeruginosa
atgagcatcgacgatgagattcgcgctcaccttgagcgcctgggcgtggtgcccctgctgggcggattgataccggagaacgtcgccgccgagctgctgggatacgcaccatcctaccttcgccgcctggctgctgccggcctgtctccactgccctatgtgcgccgaggtaatcgcagactctacagaatcgacgatatccggcgcttcgtgacggagacagtcggatga

SEQ ID NO: 346322 - DNA, 1017 bp, Pseudomonas aeruginosa
atgaaccttactcgcattggtctggatctggcaaaacaagtattccaggtgcacggcgttgatcgtcacgagcatgtggtatgtcgtcgccaactcaagcgggcacaggtgcgggatttctttcgccaactgccgccgtgcctggtggcgatggaggcctgcggcagtgcgcactactgggcgcgcgagttgcgggagctgggccacacggtacgcctgatcgcaccgcagttcgtaaaaccctacgtcaagggtgacaagcacgatgcacacgacgccgaggcgatctgcgaagccgccagtcgtccgagcatgcgctatgtcccggtgaagagcgcagagcagcaggccgtgcagtcgatgcatcgggtgcgcagtcgtctagtgcgggcccgcacggcgttgtgcaatgaggtgcgtggcttgctgggtgagttcgggctgatcgcgactcgacgtgggcgagcggcgacgatggccttgctcgaaacggtcatggctaccgaaccggcgtccttgccggccccgatgggcgagctgttgcgtgaattgaaagatgaattgcagacgctggaggcgcgcatcgctcgactggagcgacagattcaggctcacgtacgtggcgatgcccgaatccagcgcctgctggcggtggaaggcatcggcccgatcagcgccagcgcggtggcggcatccgccggtgatgcacggcaattccgcacgggccgccagtttgcggcctggctgggcctggtgccacggcagcactccacgggcgggcagcagcgcttgggcaacatcagcaagcgcggcgatacctacttgcggaccttgctcatccatggcgcccgtgcagtcgtgcgctgttgcgccaacaagaccgatgcccgcagccgctggctgcaaggtctgctgcaacggcgtcctgccaatgtcgtcgccgttgccctggccaacaagaatgcccggatcctttgggccttactcagccgggagacatgctaccggcccggttga

SEQ ID NO: 346323 - DNA, 633 bp, Pseudomonas aeruginosa
atggctgatagccaacagaccttgcccgccattccggacggttacctcatgaacgccatgggtcacctggtgccggaaaacttggtgcgggaacaggaccggctgagggaccaggttgtatgcgacctagtcgaggaagccctgcatatccacgatgcgctgcagcgcttcaagagccgggcgctggctgacatcgccgacctgatccgcatctgccatgagaagtacggcgcttcgctggggggcgagaagggtaacgtgtccctcctcacatacgacggacgctacaagatcgagcgcgcccatgccgaccgcatcaccttcaccgaggagattctggccgccaaaacgcttatcgatcagtgcatccgctcctggagtgagggcggtgacgaccggctgcgcgcgttggttgatcgcgccttcagcgtcaataagcacggccagatcaagaccaaggaggtgttgagcctcctacggatcgagattgatgaccccgattggaagcaggccatgcaggcgctacgcgattcaatccagatcaacggccaggctgtctacattcgcgtctaccagcgcgagggaatgactgaccgctatctgccaatcagcctgaatatcgcgggggtgtga

SEQ ID NO: 346324 - DNA, 1122 bp, Pseudomonas aeruginosa
atgcgcgatcttccaccgcctgagctcgtcaagatcgatccggccggcatcgaggccgacctgatcgctcgctatgaggcgaagtcgggcaaagccctgtatccggcgcaaatcgagcgcctgttcatcgaccagatcgcctacgcgcaaagcctggtattgtcctcgatccagcatgccggcgagcagctcctggtccgcaccagctcggcgccgaccctcgactatctcggcgagctggtcggcacggcgcgattgctcgcccagccggcgcgctgtcgcatgctgttcagcgtgccggccccagtggcggtgccgatgctgatccaggccggcacgcgggtcggcaccagcgatgcccggctggtgttccgcacggaccaggacgtgaccatcgccaccggccaagcgcaggtccgtgtcacggcgacctgtgaaaccacaggtacggcgggcaatgggtgggcagtcggccagatcgccacgcttgtcagcctgccggccgacgggcttgccgcgcgcaacgagacggttaccgccgatggcgccgacgaagaatcggatgagcgctaccgggaacggatcattctcgcgccggaagcgtacacaaacgccggcagccggggcgcgtatcgctatcatgcgctcgcggtgcatcagtcgatcattgacgtggccgttcacggccccgaggaggggcaactgcccggccacgttgcgctgtatccgctgacctctgccgggatgccaacagccgatctgctgcagcgggtggaaagcctggtcagcggcgaaaaggttcgcccgctgtgcgacaccgttcatgtgctgatgccgtcggaagtgaagtacacgattcgcgccgcgctgacgttctatgccggcgcagaccgggttacggccatggccacggcgcaagcagcggccgaggcctatgccgccgaccgccgcgccggcttgggtcgggatatcgtgccggaacaactggtcgccgtcctgcaggcgcccggtgtgtaccgtgccgacgtgacagagcccgccgcgttgcgcgtgctgtcgggcaatgaatgggcgaactgctcatcgatcctgctgaccgacgcgggcatcgccgatgactga

SEQ ID NO: 346325 - DNA, 582 bp, Pseudomonas aeruginosa
atgactgatcagcagttgccgccgccgctggccagcgatgagcgtttttccctgctcctggagctgctccaggacacgctcgcggggaatgacctgagcgtgatggcggtgtacctggtcgaccaggctcccgccgctctgttgcccgtgcttgccgatcagttctcgctcctggacgagccggcctggtcgttggccgagtccgaagatacccgtcgggcgctaatcaagcgcgccatcgagctgcaccgctacaagggcacgccgtgggcgctacgcgaagtgatccgcacgctgggcttcggcgaggtggaaattctggaggggcttgcgggcctcactcacgacgaccgcgccgctttcgacggccagcgcgtatacggcgatgtcggtgcctggccggtataccgcgtgacgttgcaacggccgatcaccaacgatcaggccgcgcagttgcggcgggtgctgcgcgccatcgccccggcgcgctgccacttggcatcgctcgactaccagtcggtggcaatccgatacaaccagtcggccgcgtacaacggccagtacaactatgggagcagctag

SEQ ID NO: 346326 - DNA, 1611 bp, Pseudomonas aeruginosa
gtggctaacttgccagaaacgccggattattccggcggcgtctatcagatcgaaacgtccgatcccgttctcggtgggccgggagggatttctaaccgtcaggccgagcagttgggcaaccgcaccgcctggctcaaggtcaagactgatgcactgctttccggtgaactggcagctggcaatgccgccaaactggccgcgccgcggaagttgtcgatttccggtgtgatggcgggtagcgcgtcgttcgacggcggcactgacgtctcgatcccggttagctttgccgacagcccgacattgccaggccagccgaccgcagcaacgccgcccttgttcgaccatggccgcgcgctggctacaactgaatatgtccgaaaagctctgggcagcgccgcaagggcgctatctgtcgtcggcgatgcggtactggacgagccactaatggggtcggtgctggtggccggctcgtacagccggaacttcacctggactaccccgaacatgagcgtgttgcccaccggggcgtcattttctgtcgtgaacctcagcggctctacgctgacattgacccagcgctcggccggggatcactacatcagcgcggaggatacctccggcacggcaacgttctatacggtcccgaacaacaccgccgcgctggttacggtttatcagcccggcctgtggctcgtaagtcatgtttcgcggcccacggctgacctcaagcgcgccattgactcccttcttgacggcactacaccggccgccaaggcttctcggcttgccagcgcgcggcagatatctatcggtggggaggtggtcggtagcgccgcctttgacggcgggagcgacgtgactatcagtttggccctgagcaaagacctggagctgcgcggcgcgccaaccgcgtcgaccccgcctgcatttgatcgcggcagtcgaatggcaacgacagagtatgtgaggggcgcgctgggaagcgttgcgggtatcgctgtcgccatcggggacactgtacttgacgctccgattatcgggcatgtcgttgtggcgggggcgcatgtcagaaattcgacatggaccactccaggcatggcgtcactgccgcgcggcacgtcgtttaaagtggtgaacctcagcggtttcactgtgacactcgttcaacgttcgtccagtgatcgcttcatcagcgcgctcgatccgtccggctccgcggtgacgtatgagataccgaacggcacctcggtctcgctgacgaaatatcaagagcagatgtggctggtggaagctcagccgtcgtttccggcgctccgatcatcgcccggttatcagcgcctgcccagcgggctcatcatgcaattcggcacagtgagcataccggctggaaccggtgtggggtctggctacgcggtgctgccaatagcattcccgaatggcccgttggcggtcagcgctacgctgcagtacgggggcacggtgtcgtcttggttcggcttcaccgtatggtccggcaacgttaccccaacaacgattacatgctcgctggattccggctcgaccgcgcgcgaggtcgcaggttccgtgaattacaacgtcataggtttttaa

SEQ ID NO: 346327 - DNA, 438 bp, Pseudomonas aeruginosa
gtggcactctactttttcagcacgccccccgcgttctacgacacggaaataaacccacacatccccgaaggcgccgtggaggtttctgcagaggaccacgctgccatgctggcgggacaggcaaacggtaaacgtatcgcggcggaccccgatgggcgcccgatactcattgatccgccgcctcccagcgccgccgaacggcaatcattcgaacggagttggcgcgatggggagttacgtgaaaccgatcctctggtcgcgcgccatcgcgacgaactggaggcgggagatgatacgacgctgacggcagagcaatacaaggaactgcagacgtaccgccgtgagcttagaaactggcccgaaagcgagcgttttccccaggcggcatcgcgccctgtgccgcccaactggttaataggaaccgttgggacaaagtaa

SEQ ID NO: 346328 - DNA, 513 bp, Pseudomonas aeruginosa
atgcgtgttctagtagtggaagacgaagccaaaactgccgaatatcttcagcaagggcttaccgaaagtggctatatcgttgaccgggcaagtaatggtgtcgatgcgctgcacctgttccagcacaacacctacggcctggtcatcctggatgtgaacctgcccaaggtggacggctgggacgtgctcgacacgatccgcaagaccagtcgggttcgcatcatcatgctgaccggtcgtggccgcctgcacgacaagctgaagggcctggacggcggcgccgacgactatctagtgaagccgttcgagtttccggaactgcttgcccgcatccgctcgctgcagcggcgtggcgacaaggtggtggaccacccgaccttgcgggtcgcagaccttgagctggatccgggtcgccaccgcgcgttccggggtgacctgcgcgtcgagctgactaccaaggaattcgccctgttgatgccgcgcgcgaaaaatacgggcggtgatgtgagataa

SEQ ID NO: 346329 - DNA, 534 bp, Pseudomonas aeruginosa
atgacgcgagagtgtcacgtacggttctgcgagcggctgcgggggcagttcccgcggccgactcaccattttggcatgaaggcccacatcggcgccgatgacgaatcgggtctggtgcacagcgtagtgggcacggcggccaatgtggcggatgtcacccaggtggacaaattgctgcatggcgacgaaaacgtggtctgcgccgatgcaggctacaccggtgtcgaaaagcggcccgagcatgaaggacgtgaagttatctggcaggtggcggcacgccgcagcacctacaaaaaactcgataagcgcagcgtgctgtacaaagccaagcgcaagattgaaaaggccaaggctcaggtgcgcgccaaggtcgagcatccgttccgggtaatcaagcgccagttcggttacaccaaggtgcgctttcgcggcttggccaaaaacacggcgcaactggtgacactgttcgctctgtcgaacctgtggatggcgcgccgacatttactgacgaatgcaggagaggtgcgcctgtaa

SEQ ID NO: 346330 - DNA, 372 bp, Pseudomonas aeruginosa; identical to SEQ ID NO: 324747

SEQ ID NO: 346331 - DNA, 249 bp, Pseudomonas aeruginosa
atgcccatcagcaaaccggccatgaggcccttgccgcacatgcccgaagacgacgccaacggcactgagtcgatgaatatggacattcaccagaaacgcagtgatctcgccgtcatacccctggcccacagctcgggcaatacgcagcagatcgaaatcgctgtagcgcttcacgtggaagtcgaccgctaccatgttgtcctctgtcatgcctacgccctccggggctctgctgcagcactggcctga

SEQ ID NO: 346332 - DNA, 1431 bp, Pseudomonas aeruginosa
atggtcgccgatatcgcctacctgcagcagagccagcaggaaatcaaccagctcgaagccctcttcgcccgccagcgcgccgcctacctggcgcagccgatgcccgacgccacgcagcgcgtgcagtggctgaaggccctgcgcgacctgctgttcaaggaacagcaggcactgatcgaggccatcgaccgggacttcagcgcgcgctccgccgacgagaccctgctcgccgagatcatgcccagcctgcacggcatccactacgccgccaagcgcgtgaagaaatggatgaagcccgcgcgccgcgcggtcggcctgcaattccagccggcctcggcccaggtggtgtaccagccgctgggcgtggtcggggtgatcgtgccttggaactatccgctgttcctctccatcggcccgctgaccggggccctcgccgccggcaaccgggtgatgatcaagatgagcgagtcgaccccggccaccgggcgcctgctcaaggacctgctggcgcggatcttccccgaggaccaggtcgccgtggtgctaggcgaggtagacgtcggcgtggccttttccaagctgccgttcgaccacctgctgttcaccggcgccaccagcgtcggcaagcacgtgatgcgcgccgccgccgagaaccttaccccggtcaccctggagctgggcggcaagtcgccggcgatcgtctccgacagcgtgccgatgaaggacgccgccgagcggatcgccttcggcaagagcctcaacgccgggcagacctgcgtcgcgcccgactacgtgctggtaccgagccggcgcgtcgaggaattcgtcagtcagtacaaggaggtggtccagggcttcttcccgcgtctttcggacaaccccgactacaccgcgatcatcaacgagcgccagctcggccgcctccggggctatctcgacgacgcccgcgagaagggcgcgaccctcgtcccgctgttcgccgaaggccagcaacggcgcctgccgcagacgctgctgctgaacgtcagcgacgacatgaaagtgatgcaggaggaaatcttcggcccgctgctgccggtgatcccctacgagcgcctggaagacgccctggcctacgtcaaccagcgcccgcgaccgctggccctgtactacttcggctacgacaaggcgcagcagcagcgcgtgctgcacgagacccactcaggcggtgtgtgtctgaacgacaccctgctgcatgtcgcccaggacgacatcccgttcggtggcgtcggtccctccggcatgggccactaccatggccacgaaggcttcctcaccttcagcaaggccaagggcgtgttcagcaagccgcgcttcaacgccgcgcgaatgatctaccccccctacggcaagtcgatccagaagctcgtctacaagctgttcgtgcgctga

SEQ ID NO: 346333 - DNA, 174 bp, Pseudomonas aeruginosa; identical to SEQ ID NO: 330002

SEQ ID NO: 346334 - DNA, 150 bp, Pseudomonas aeruginosa
atgaccaagcagcaaatcatcgccgcgattacccaactggcccacgacaccaccatcgcacctgccgaacgccagaagcagctcgaagacatcgagttcgcggcgcaggaccagcgcgagaagctggaagaacggtactccgacgactaa

SEQ ID NO: 346335 - DNA, 168 bp, Pseudomonas aeruginosa
atggagcaagaactgaagccatgcccctattgccgaggctataacctcgaacggcgctggtgccacgtatgcagtggccgaggcgtcgttgacgtcaaggctcaacagacggcacgcgcagagatgttgaagctgctgcgcgatgccggcttcgaagtgagggactga

SEQ ID NO: 346336 - DNA, 294 bp, Pseudomonas aeruginosa
gtgcctgacatgagagaagagtttgaagcttggcatcacgctgagttcggctacgtaatcgcagaggaagacgatccagcacaagacggccagtgcgcagagcgctggaagacatggaaagccagccgcgcggctctcgtgatcgagatgcctccccgcgtgaccgccgaagatgttgcagagcacctggacatcgacgaccaagaagcagtcgagatcgctcacatggtgaacggctccattgctgcctacgcgaccttcatcaagcaagctggaatcgaggtgaagcaatga

SEQ ID NO: 346337 - DNA, 258 bp, Pseudomonas aeruginosa
atgaataaagatcacggtggaccagcgtttcccgtgccacttaatccaggggagccataccaagggcatttgcctttcgacggcatgaccctgcgcgattacttcgcggcaaaggccatgcaggcttttcttcatccgacgtatgtggagactaacgcgacaaagcctcacagccgacctctctttgacgtaacagaggccgcctatcgatacgccgatgccatgctaaaggccaggaaggaaggaggtggggagtga

SEQ ID NO: 346338 - DNA, 1125 bp, Pseudomonas aeruginosa
atgcccgctttgagtcgtcgttcgttcgtgaccctgaccgccctggcctccagcagcatcctgctgagcccgcgagccttcgccgggagcggcgcgacaagcgccgccggcaagccgcaagagaccttcctggatttcaacgaaagcccctacggcccctccgccaaggccagggccgccatgcagcaggcggccgcgctctgcggccgctacgactacgacgcgcaggacgccctggtcggcctgttcgccaagcagaacggcatccccgccgaatgcgtgcacgcctactgcggctcgcgccagccgctgcaatacgccgtcgcggcgttcaccggcaaggagcgcggcctggtcatcgccgatccctcctacgactccgtggtcggcgccgcccaggcccagggggcgaaggtcgctgccgtgccgctggacgccgaggcggcccacgacatcgagcgcatgctcgccgccgcgcaacgcgacgccgggctgatctatatctgcaacccgaacaacccgaccggcaccctcaccccgcacgagcggatcgtcagggcgatcgaacgcaagcccgagcgcagcgtggtgctggtcgacgaggcgtatatccatttttccgacgcacccagcgtcgtcggcctggccgtccagcgccaggatgtgctggtcctgcgtaccttctcgaaactctacgggatggccggcgcccggctcggcctggccatcgggcatccgcagctgctggcgcggctggagcgcttcggcggccacaacgtggtgccctcgccgaccgcccacgccgggctggaaagcctgcgtgacgacgatctggtgccacggcgcaagcagcagaacgcagaggtccgcgagcgcaccatcgcctggctgcgccagcagggcttccgctgcaccgcctcgcagtccaactgtttcatggtggatatgcgccgtcccgccgagctggtcatcgccgaactggagaaacagcgggtgcacgttggccgcccgtgggcctcctggcccaactgggtccgcgtgacggtaggcagcgaggaagagatgcaggcgttccggagcgccttcgccagcgtcagccggcgccaccaggtcgccatgcgctag

SEQ ID NO: 346339 - DNA, 261 bp, Pseudomonas aeruginosa
atgagcaagttcaaggtcggggatctggcccttactctggtctacgactccctactcccggccggatcggtagttgagttggagcgagccctccagaagggcgacgagatcactcagggctttcgtgctccaagttccgggtgggtggtgcgccacgccgaggtcagcaaaggaaccctggcatacggggatcatgagttgatgcccctgcgcggagacttccagcccgagcagcagaaggcgaaggaggtggaggcatga

SEQ ID NO: 346340 - DNA, 2532 bp, Pseudomonas aeruginosa
atggcatcacgcagcctggggacgcttacgctcgatctcatcgccaaggttggcgggttcgtggccggcatggacgccgctgagcgccggtctgagaaatggcgcaaggaagtcgagaagaatgcggccaaggttggggccgcaattggcgctgctactgcggcaggtatcaccgcgcttgccgctctcactgtctcgacagttcgcaatgccaatgaaatcgcaaacttggcgagtgttgcgaacgcaagcacgaccgaatttcagaagtatgccgccggcgcaaagctggttggcattgaacaagagaagctcgctgacatcttcaaggatgtgaacgacaaggtaggcgacttcctcaataccggcggcggagcgcttgctgacttctttgagaatgtagcgccaaaaattggcgtgaccgcagaccagttccggaatcttagtggtcctcaagcccttggcttgtacgtctcaagcctggaaaaggccaacgtcagccagtcggacatgaccttctatctggaagctatcgcgagcgatgcgactgctctgctcccgttgcttcgcaataatgctgatgggttcaagacctttggtgacgctgcccaggccgctggtgcgattctcgacgagaagacgattaagtcggcgaatgagcttcaggctgcaacatggctagttgagcagagcgcctcgggcctaaaaaaccaactaagcacagcgctgataccaattctgagcgatctcgctgactctatattcgacgtgaccaaggaaggcacggcgatggtgagtgttggcgaattcgttgccgattcgttccgttggatagcgaagacagcgattggtgctgttgccgcctttgagctggtagggaagtcgattgccggcgctgctgcaacggccaaggctggctttgagggtgtgacatggcttgagcttgcatccggccctgccggtcttgctaaacgccttgcgcaaaactgggacggaatcaaagccagcgccggcgtggcagcagaagacctgtccaatacggtggcgaagtatgccggcatcatggacagtatcgaccgagccggaacgggtggaaccaatgggcaggtagccaagctcgccgaaacgctagcttcgcttcgtgagcaggcgaataagcctggagctttcaaggctcttaccaaggagcagaaggaagccgggaaagaagccgaggctgctgctaagaaactgcaaagcgcctacgaaacggttgagcagtcgtatcagcgacagatagcgctgatcaacacggaagtcgacaagcgcaaggatgccaccgaggtggcaaagcttcagttcgaaatcgagtcgggcaagctggttggaatcaatgccgagcagcagaaacgcctgaatggcttggcagaagagcttgaccgcctgaagcagctaaagcaggcgaacgaggatgcggcaaaggctcaggctttccgtgcaacgctcaatgaatcgaacgcaactgctcgggcaggatttgcgattgaactggccggatctggcagcggcgacaagctgagggagcgactgcgcgcagacctggagatccagcaggactacaacaaacagcttgccgatctacagaagcagttcaacagcgcagaaatcagtaaggaactctacgaccaagaaactgacctcctgcgccaggctctggccgagcgtctggaaatccagcatgagtactacgcggctcaggatgaggctcagagcaactggctggatggcgtcaccagtgcctgggagaacttcgccgacgcagctacgaactactcgtccatggctgctgataccactacctcgatccttgacagcgccagaagtgagcttggcaacttcatgtccgacgtggctacaggggcatcagatgctggtgatgctctgatggacatggtgacagggttcgccaagtccatggttcaggccctggctgacatggccgcccagtggctggtctaccaggcggtgcagttggtcgtagggaagacggctcaatccactgcggcaatcgggcttgtcgccaatgctcaggcaacggcgtttcaggcacagctagcggcgtttgcctcgacggctgccattccggttgttggccccggtctggctgctggtgctgctgcggcggcagccgcagctactgcgccaatggttgctggagtttcttcggcggccttcgggggcatcgcgcacggcggcatcgacaacatcccgaaggagagtacctggctgcttgatgctggtgagcgggtgctcagcccgaaccaaaacagggatctgactgatttcctcagcagggcgggcggcgcgagtgctggggctggacaggtgccgtcgatcactatcaacgctccggtcacggttaatgcccagccgggcatgagccaagaggaagctcgaatgcagggagaggctgccgggctggccttgcgggaggaggtccggagcgtcattcgggaagagttggggcagaacggtctgctttggaggcgataa

SEQ ID NO: 346341 - DNA, 828 bp, Pseudomonas aeruginosa
atggatgaacaactgctcggcgcccttcttgtcctccatgcggatctcgttgaagttggccggcgtgccgcccttgctcgaacggctcttggtgccgctctgggtagcgttcgccggcagctcgtagggcaccgtctgctcggcgttgtagacccgcccggtgatgatcggccggtccgggtcgccttcgaggaagctgacgatcacttcctggccgatccgcgggatctggatcgagccccagttcttcccggcccaggcctgcgagacgcgcatccagcaggagctgttctcgttggactggtcgtggcggtcccagtggaaatgcaccttgacccggccatactggtcggtccagatctcctcgcccttgggcccgaccaccaccgcggtctgcgggccgcgcaccaccggcaccggggtcgacggcaaggggcggaaagcctggccggcgtcgatacagtccagctcgctctcgaactgcgcgccgcccccgccattaccggtctcgtagagttcctggactacccggtactcggcgccaaccaccaggtattcgcggttctggtccaggcgcgggtagttgctcaggtggaacagatggcccgccccgatacccctggcgcatccccgcaggcgaactcgctcgtactgggtctggatcgcctcgatgcgggtccgtgcatagtgttcgccgtcctgactctgcacatactcgccagggtagtcgtagagcgggtagtcggccgcggcatgggcgcgcccgacattggagcgcacttccaggcgggtgccgggacgctggaagtcgtagtcgttgaggcttag

SEQ ID NO: 346342 - DNA, 273 bp, Pseudomonas aeruginosa
gtgccccagttcccggcggtggcggtgcccccgtccccggcggtggcggtgccctcgcccccggcggtggcggtgcccttgtacccggcggtggcggtgccccagttcccggcggtggcggtgcccccgtccccggcggtggcggtgcccttgtacccggcggtggcggtgccccagttcccggcggtggcggtgccctcgcccccggcggtggcggtgcccttgtacccggcggtggcggtgcccttgtacccggcggtggcggtgccatag

SEQ ID NO: 346343 - DNA, 264 bp, Pseudomonas aeruginosa
atgagggtggtgctgatgctgatgattgtcgcgctggtgggatgcgccggccggcaggaagccgagccgcgcacggtgcgcgtagaagttccggtggcggtgccgtgccgagcgcccgcggtcgaggtgccggcctgggcagcggctgggctgaagaagagcgacgacctacagaccaaggtccgcgcgctgctggccgagcggcggcagcggatcgggtatgaagcccaactgctggctgccaacagggcctgtcagaattag

SEQ ID NO: 346344 - DNA, 264 bp, Pseudomonas aeruginosa
atgctggtcattcgattcaagggctggtcggtgaaactcgaccaccaggtgggtggagcagggaagtttggcatctggtcattccacggctcggagagcagctacgtgccggacatggagacgattctccggcatgctgctattcggcctgcggagccgaaagaaggcggggaggtcgaggtattcatctgcgacgcgcgcatgccacaggatgcgtggcgttccatagggaagggtgttgcggcctacgagtcggaccgctga

SEQ ID NO: 346345 - DNA, 822 bp, Pseudomonas aeruginosa
atggttcggcaggtgcccttccacccagggatgctcgcggtagttgtcgcgctcgatcttgccgtccagccagtagtgcggcagctggtagccgccgtcgccgtattcgctgggcaccaccccggcgttggggtcttgcgcccgcgccgtccagcgcagcgggtagcgctgctggtggccggccgccgggcggccaccgagggcgcgcagcaggtagtagtcgtcctccgcccagtccggcacgaagctggccgccgaaccagcctccagccactgcggcggctcggtctgcgccaacagcgggttgcccgccggcagcgccggcggctggcagggcgcgccgctgaattcagcggcgtcgagcaggatcaacgcataggcgccgccgaggatgtcctccatccgatgcaaacgcggatggctattgcgcccggcctcccagaacggccgcagttccgcttcggccggcggttgcgcgggcggatcgatgagcatctcgcgaatgccgtcgacgctggtcggtccaccgtcgttctggtccggggcgagggagaagaagctcagcgcgacgatctccgggccatgcacccggtagtcctccggcagcagcagggtgaagccgtgcatcagcggatagccggtgtccggatccagcggccactgctccggacggatgcccggcggcaggccgaagcaccagccgtggttggcttcgccggcgtgcgcggcgtcgttgacgatttcgatgtcgtaggcgttcatggccactccctggtcggtttttcctgttcccggccacgccggccgggtgtcgcagtgtaa

SEQ ID NO: 346346 - DNA, 219 bp, Pseudomonas aeruginosa
atgactattgactggagcatgttgaagtcacccgaagaccagcaggttgagcagcgggaggccatcagagcgcagcgccgccaggcctatcgcaccgagtccgacccgctgcgcctggaggccgagtttgacgccatcaccgctggcaccaagccggacctggcggcatgggttgcagctgtccaggcgatcaaagcgcggtatccactacctgaatag

SEQ ID NO: 346347 - DNA, 846 bp, Pseudomonas aeruginosa
atgagcctgacaatggggccgaacactggcttactgatcaacggcgcccccggtgaggggcattacagcgaactgatccgcatgttgcgctgggatgacttcctgcgccaaccggtcgtaaaggggcgggtcgcaacgctgccgacttccggccaggccgagggcgacacttacattttcaccggggccggggcgaaccagaaccgcttggcccgctggtgggcgactggtgcgtcaacgccaatctgggagtacatgccgccacggctgggctggcgtgtccaggtcgcaaacgagacaaccccggcaggccaggtcaagacctacgagtattccggcagcgcctggactgagctggtgggcggaatggccgacgcgccgagcgacgggaagcgctatgcccgactaaacaacgcgtgggcaggcttggggactgctgccgtcgccgatattcttgggccggtctctcaggctggcggtgtgccaactggtgcgatctacgagggcggcagtaacgcgaacggaagttacgtcaggctcgcagacggaacgcaaatttgctccagcagccttttaacgtttactgcgggttcaacgtcggtgggtgcgtcttggacgtttccggccagctttgtgtcgccgtcgctgatgtttggcaccgttgtagcatcgggagccggcgcagactatgaccccggcgtcgctgcgaggaacctgggagctgtttacttcaatgcgtcaacaaactctgctgcactggggtttctttgcatctcgtctgcatcgttcaccgctggcgcccaaactcgaaataaccgtgctgtcgcaattgggaggtggttctga

SEQ ID NO: 346348 - DNA, 2208 bp, Pseudomonas aeruginosa
atgggcgctaaacccaaggctcaaacggtcggctttcgatacttcttcgacatccatttcaccctaggcaagaaaatcgacgagctgtgcgcgctccgggcaagcggaaaaaccgcgtggaaaggatcgatcactactaacggtcaggtacgcatcaacgccccgaaactgttcggcggcgacaagggcgaaggtgggctcgatggaacgttggatatcctgttcggcgaagaagaccagggtgtcctgccgcgcctggcggccatgctcggcggcctggtgccggcgttccgtggcgtaaccacagggttctattccggcttggtaacctccatgaacccctacccgaagacatgggaatttttggtccggggaggaaaccgcttgtgggacggcaatccctggtatcccgaaaagcagttcatctggctagcggacggtcagatcaaggcgatgaacccggcgcacatcctttatctcgtctacaccggcctggacttccggggactggcccgcacgcgaatggacgaggcgagctggcgggccgctgctgacaagctgtatgccgagggtttcgggctgtgctttgaatggaccaggtccgacacgttcgccaacttctgcgagacggtgaaatcgcatatcggcgctgaggtttacccgaaccgtcagacgggacagatcagcatccggctcctgcgggacgactataacgtcgcagacctgccgctgttcgacgaggacagcggcctcctggaaatcactcaggagaagaccggctcgacctccctggcgccgagccagcttatcgtgaaatacatcgaccagatcgacggggcgcagcgccaaatcatcgtcaacaacaacgcggtcgctgcgtcgcaggggcggcgctcgtctgaggaaatcgagttcctgggcgtgcctaccggggagctggccgggcgagtcggtgagcgggaaatgcgtctgaagacaaccggcctgaagcgctataagggcgtgttcgaccgccgcgcccgtagcctgaaccctggccagccgttccgcatccgttcgacccggcgcggcatccctgaaaccgtcgttcgggtcggccggatcgaggacaacttcctcggcgacggcaagatcaccctgaccgtcgtccaggatcagttcaatctgccggcgacaaccggcgtggcgccgccaccaccgggctggattccgcccgaccggacgcctcgggcgatcactgtgcgccgcctgatcgaggcaccctatcgcgaactggccggcgtgatcgatccggcaaatctccagctcctggacgtgagcgcgtcctacttggccgcgctggccgaggcgccgaccagcctgtcgcagagctacacactgaccgaccgcgtcggcagctctggcgcgttcgttgatcgcggaaccggcgactggtgcccgaccggactactcgccgccgagctgccgctggcggccggtccgaacgtcgtcacgttgacgaacgccagccggctggaggacgtcactgtcggccaggccgcagtcgtggacgacgagatagtccgggtcgatgcggtcaactacgccagcggcacggtcaccctcgcgcgcggctgcgccgataccgtaccggccaagcatctggccggggctcgggtctggttctacgacacgttcgaagctgtggacgaaacggtctacagccagggcgtgacgctccaggcccggctgctgacgaacaccagcgagggccaactggccccggcgctggccgccaccgacagcctcaccctgaccgggcgccaaggtaagccgtatccgcccggccagttccgcatcaacggcagcgcgtacccaacgaaagtctacggggcgctgtcggtgagctgggcgaagcgcgaccggatcggccaggccgaccagttgatcgataccacggtcggcaacatcggacccgaagatggggcgacggttacgctcctggtctacagcggtacgacgctgaagcgtacctatgccggtctcacatccagtaactggtcctatccgctggccgaagacatggcggatggcccgctccaggacgtgcgccttgtcctgcgcagtgtccgcgacggcatcgattcttggcagcagcacgacatcacgattgaacgccacggcctcggtttccggcttggcgaagaactaggaggcgtatccgcatga

SEQ ID NO: 346349 - DNA, 339 bp, Pseudomonas aeruginosa; identical to SEQ ID NO: 331856

SEQ ID NO: 346350 - DNA, 192 bp, Pseudomonas aeruginosa
atggcgaagacctaccgtctgcgagacgaggccgtcgaagcactgaacgcgaagaggattaagctgatcgtcgagcgcaaggaggatgtgaaggagagcgatctactaggcgcgctgatctggaagcacctgtccaccctcaccgcccaggatgtgaaggcctaccgagaacaggtcttgggcaaagattga

SEQ ID NO: 346351 - DNA, 1719 bp, Pseudomonas aeruginosa; identical to SEQ ID NO: 330916

SEQ ID NO: 346352 - DNA, 1929 bp, Pseudomonas aeruginosa
atgttcgccccacccagcaccgagacactcaaccgcttctttctgttgtcgtggctggtggtgctctggcaggtgctgcgcctgcaggacgggatcgtcttcgacgacgcctggctgccgctctggagcgtcgctgccagcctgagctacgccttcctttatatagtcccggtgtacctcgcctgccgactgctcctgcatttccatgatcgccttcccgtgcgcctcagtccgtggctggcaggcgtgctggccatcgtcggcagcgcggcggtacagatactgctctacgccgaccgcaccctctacgacctgtacggattccacctcaacggtttcagcatcggcctgctggtctcgcccggcggcctctccagcctcggcagcggcgacggcaccctgctcagcgcaagcctggcggccctggccctgctctgcctgcaggtgctgctgtacagcgcctgccaggtcagccgcgagcgccttcccgcgctccctcggcgcgcctggcgctacctgttggcggccttcctctgcctggccctgggcgaacgcctggcctatgcgttcagctccctgcgcgactaccggccgatcctgctggccagcgaacgctatccgctttacctgccattgaccgtccgcagcctggcgcgaagcctgggcatccagccgacgcccacccagcgcgagctgctccagcagcagagcgacctgcactatccgctccggccgctggagatcagcgccccggcgcacccattgaacatcgtctggatcgtcgccgagtcgctccgcggggacatgctcgatccgcgctacatgcccaggctgtgggacttctccaaccgggcgatccgcctggacaaccactacagcagcggcaacctgacccagatgggcgtcttcggcatgttctacgggctgcacggcggctactgggacgccgtgctgaaggccggccagccgccggtgctcatggaggtactcaggcagcagaactaccagttccggatcaatgccgcgcaacgtttcagctatccgcccttcgaccgcagcgtgttcgtcaacctgcgcccccaggacctgcacgtgctggatagcccggagcctgcctggcagcgcgacgcccggaacaccgacgacctgctgcgcttcgtcgatcgccgactacccgaccggccgttcttcgcctgcctgttcctcgagtcgagccacgccaactacagcttccgcgacgagaccgcgaaaatccgcccctatctggtcaacttcaactacctgaccaccgatttccaggcgcagatgccgctgatcaagaaccgctacctgaatgccgtgcgcgaagtcgatacacagatcggccgcctgctgcagcacctggaaaaccagcacctgctggaaaacaccgcggtagtggtgctcggcgaccatggggaggagttcatggaacgctcgcgctggggccacaataccgagttcaatcgctatcagaccggcaccgtcgccgtgctgagcattcccggacaggcgccccgtgccgtccgcggcatcaccagccacatcgacctgcccgcaacgctcctgccgctgctgggcgtacacaatccgccccgcgactactcgctgggacaggacctgctcgcagcggactaccatcgcgactatgcggtgagcgccgataccacgcgcatcgcctacctgggcgaaggcttcaaggtgagcttcccactgcgtggcgcggaccgtcaccacggtccggtgagcgatggcgacgaccgcccgctcgacgtggaacaacaggaagccatacgcggcccactccgtgcagcacgcctggaactgctgcaggatctcggccgcttcagcgccttgccggtaggggaagagccgtcgccgcggaacctcgcgacttcgttgacgccatga

SEQ ID NO: 346353 - DNA, 492 bp, Pseudomonas aeruginosa
atgagcaccacaatccctgattcgattcatccgagtgaccttcccgaaatcggccagaccctcgctgatggaatcttctttgcccgccattggctcaatggcaaggaatacgcctacgtcgatctcagcaaaagcgccgagttcactggagaatggggcgagtatggccaggacgtggacggcgccgtcagctaccgagacggagcttcgaatacggtctccatggctgaagctggaagcccgattgccaagcaagctcttgagatcggagaaggcgtattcattccttctgttctagaactggctcttctgttctccgccaagcaagcaggcgagctgtctggtttcgcagatcgctggtattggtcgagttcgcagtcctccgccgactacgccttccgcacgtacttctacgacggcgacacgggcctcaacgtcaagggctacggcttccgtgtccgccccgtccgcaagatcccgatcacggcgtga

SEQ ID NO: 346354 - DNA, 300 bp, Pseudomonas aeruginosa
gtgcctgacatgagagaagagtttgaagcgtgggttaccgcagcgatgggcggctatgccgatctgcggaagtccaacgatcccaatttcgcttatgacgacgttgatgtggacttcgcctatcaagcctggcaagccagccgcgcggctctgagggtggagttgccggctggcaaaccatggtttgtggctgtaaccgaagaagaagagctgcgcaagcagcgaggctatgggtggaatgactgtttggacgccgttggagaaatcctctggaaggccggaattgaggtggcgaaatga

SEQ ID NO: 346355 - DNA, 228 bp, Pseudomonas aeruginosa
atgagctacagcgtggagaaagtcatgcgcgtctatgacgacaaagaaggcgtgtacatcgaggtcagacagcacccggatgcaccggacagcggcctggaaatccataccacaggaaaccaagcctgcatcgactggtacggcgagcagcgaatcgtgctgaacagccgggagcacgctcttgccctggcaagggccatcaccgaaatggcggagatgatcccatga

SEQ ID NO: 346356 - DNA, 837 bp, Pseudomonas aeruginosa
atgaagcggattcccgctgctgcaatgctgtgcctgctcgccgtcctggcgggctgttcgaaggtgcctgccggcaacgtcggcgtgatcgtcaacctttacggctccgagaagggcgtggagacgcgcgaggtcggaactggtcgctactgggtaggcgtgaacgaggagctctacctgttccccaccttcacgcagaccgaaacctggggcggcaaggaagcgatcagtttccagaccgtcgaggggatgaaggttggcggcgccgtcggcatcacctactcggtatcccccgacaaggtgacgacgctgttccagaagtaccgggcgggaatcgacgaaatcacgaacaagttcctgcggaacatggtgcgcgatgccttcaacgatgttgcctcgaagcttccagtcgagagcgtctatggcgccggtaaggcggacctgctgctggccgtcgagaagcgcgtgcgcgaccaggtggcgcccatcggcatcaacatcgagcgcatctactacgcatccgacctggtcctcccgcctcaggttacgcagagcctgaacgcgaagatccaggccacccagatggccgagcagcgccgtaacgaggtcgcccaagccaaggcagaagccgacaaggaacgcgctcgggcccaaggggaggcggacgcgaagctgaccctggccaccgccgacgcgaaggcgatcgagatccgcgcccaggcgctgcgctcgaaccccgacgtcgtgaccctcaatgccgtcgagaagtgggacggaaagctgcccacctacatggccagcggctccccgcttcccttcatcggcatcagcaagtag

SEQ ID NO: 346357 - DNA, 657 bp, Pseudomonas aeruginosa
atgcgtcgccatacggcgctcatagacgccataaccgagataaccgacaaccagggcagcaccaacaagcacgaacaacgcccgaggcggtttaaacttgaagtgatgctcagccccatccgcaacggacttataacaaccgaaatacgtcttatcgatggtgatacgggtagcttcaccatccgcgaagtcatacttcttattcacgtccgtttgaactttctggaactcccagcgcttgacgatctttccaccgttaccacggtgataatggatatggcagttacagagttcgcgcatatgcgcatcgatcaacatcgggctttgcgtgatcgcgtgaacctcatgcccggaatgccgcatcgtctccagggcgctggcatactcaggaaccttggaaccctgcgaacgcacacgaaagaacgactgcgcctcatcgatcacgataatggcgttgggcggaagcttgaaccactcttgcggattgtcgaactcgacccattcagctttgatcgccggatgatccgccttgaactcacgaatgttgtgatagtagaccgtcctcccctctttcgcggctttattgtcgacctctttaattgtattgagagtcttactattaccctgcaaaccggtgcggagaacaaacatggttaa

SEQ ID NO: 346358 - DNA, 237 bp, Pseudomonas aeruginosa; identical to SEQ ID NO: 331848

SEQ ID NO: 346359 - DNA, 339 bp, Pseudomonas aeruginosa; identical to SEQ ID NO: 331856

SEQ ID NO: 346360 - DNA, 423 bp, Pseudomonas aeruginosa
atgcgcaagcctcgggtggctgatgttcccagctcggcgccgatctatgacgaactgacgcgaccggtgtcgtatccgaagccgttctgtctgtcgtcgcgtgatgagtacatggtgcacaagaatcgcaagcgcatggtgaccgggtatcgtgatggccgcttgtatggatgccgctgcaacagccagcaaggcacgcgcctggatatctcgttcgaagcctgcatggcgtacgtcgagcacggtgcgttcgatccggcaatccctgaccgcgtacctgcggctgtcggcgtggccgggccgggcgaggcacgagccggtacggcggcgccgatggccgcgaactcgtcgacggttgcgccggtgagtacgggaactcgggtgacggtggtgaattctggcaagcctgggctgctgtggtga

SEQ ID NO: 346361 - DNA, 210 bp, Pseudomonas aeruginosa; identical to SEQ ID NO: 342276

SEQ ID NO: 346362 - DNA, 189 bp, Pseudomonas aeruginosa
atgggcgcgccgggcgatccccggggccgcccgcccgcggccctcgctgtcgcctgcatcgcgccagtccatgcgggcgatctctggctcgtctacagcgaaggagaaaagcccagccgcatcttcgacgtcgtcgacgagacctatctcgatgcgctgcctttttccgagcggacctgccagctctaa

SEQ ID NO: 346363 - DNA, 312 bp, Pseudomonas aeruginosa
  misc_feature (108)..(117): n is a, c, g, or t
atgggtttcttcgaacggttgctgcagggcggtcgccatcatgggtacggcggaggcggccaccacggttccggtcatcggcgcggcgcggacggccagccgtcggcnnnnnnnnnncaggacggccagccgtcggcgccggccgccgcgccggttgtcgcctgcccgtcttgccgtgccgccaatgcggcgacggcgcgtttctgccagggctgcggtggctccctggcgccgctgcgctgcggcgcctgccaggcggaagtcgccgcggctgcgaagttctgcggcgcctgtggcgcgccgcagcggtag

SEQ ID NO: 346364 - DNA, 762 bp, Pseudomonas aeruginosa
atgacggacagacagcggataaaaggcaagcccgtcgccatcgactacgacagcaccctggcattcttcgagggccgggctacccgcgactaccgcaacgcgctgagctcgacgatgtaccaggaccagcaaccggagctggtcgaggagcgcgatcgtcgcgagaaactccgtgtagccccggggttcgccctgcccgctgtgcggaaggtcctcgacatcggctgcggtatcggtcgttggggttggctggtggccgagcaggcgccgcatgccgcctacctggggatcgacttctccactgcgttggtcgagaaggccaggcgggaagcgcggcagcgtggccatgggaggctggttttccaggagatgtcggcgaccgatatccgccccgccgagttggcgctcagccctccctacgatctgctgttaatctcgggtctgctgatctatctcaatgacgtggattgcctggagttgctgcgtcaggcattgcgcctgtgcgcgccggacggacggatctacttgcgcgagccggtggccatcgagcagcgcttgacgctggatcgtttcttctcgcaagagttgcaacatgaatactcggcggtctaccgcaccgttaccgaactcaaggacatgcttgcacaggccggaggcgggcaagcgcctgcgatactcgaagaggactgcctgttcgccgagacgttggaaaagcgtgctgaaacccgccagtacttcatgattctgcagcgacggggatga

SEQ ID NO: 346365 - DNA, 5079 bp, Pseudomonas aeruginosa
atgattgacgacagcgtgagcgaagcaggccggcgcgaaagcacatacgccgagcagcgttcggcctggttgggtcggcaagtattgccattgctggaggagagtgcagccgtttgggtctgtggaatggatatcgcagcgcttgccgggggggcgaggatcgtcgaggcgcgcgcagcgagcgatctgcccgtgggtgaacgcttccgactggcctgcctggggggcgtggtggggcgcatcacggatgagtggcaggctatgcgccagttgctgcgaatcgtcgaggcactggaggatagtggctggttactgctggaggatgtcctgtcggtgtccggcgcgagcgattgccggcgccaggaggatcaggcccgcctggtactttccctgggcctgcgccgggtggccgatatacgcctgggagcggcggatgacgccggccggcagcgtgtgctgcaactgttccagcaggacctggcggttgcgcgtccgaagcgctattcggggctgagggtcgcctgctacggcaacatgccgttccattatcgttcgttgcgtccgttggctgagtgtttcgaggacagcctgctgagcctggacatagacgaagtgatggcctggaagccggacgtgatcgcggtggccgatggctggtcggtggagttctggcgcgactactgcgacgcgcacaacgttttgctgatcggcatgcgtcatggttcggtcacccgttatggctacgccgagggcacctatcgctacgccgactatctctgcggtagcgcctgggatatcgacgataccctggcttccgcggtcatgcctcgcaagggcttcctgctgactggcaacggctggtgcgacgaggtgttccgactgccggccaggactccggatgccaggcggccgacgatccttttcgcgcccacctacaaccccgagatcagtgccgccgtccatatcggcgaccgggtggtggcgttgatccgcaaggtctatccagagtcccggatcatcatcaagccacatcccgccatcgtccagcatgagcatgcgttcgtcagcgacaaggacctgttccgcgacctcatgcgtctctggcgcgaacaggcgcgcatcgatccgctggtcagcctggtggacgatcccgaggcgagtatcgcggccagtttcgccgaagccgatatcctgctggcggatcgctcctcgctgatcttcgagttcatgacgctcgatcgcccgatcctgctcttctcccgtgaagaacggattgcacgctgggcctacaatccggatgccccgggcaatgcctggcgcgacatcggattggaattcagcgacgacgagcagttgctggatctgatggccaacgcttttgggctgcatgcggaaaatcgcagcacccaggaagtccgaacgcagcagctttatggccggtttcgcgatggatgcagtatccagagggtggcggccgcgattgctcaggtgccgcgtttgcatatcgtgctcgatgcgcgtatcgcaacggaccgcggacaacggttggtcgaatactacgccacccatttcgcctgtcgccgcatcagcctgatcgctgcgccgggcgcgcttctgccggatggcgtacagcgattcgattcgtggcaggcatggcgcgatatggaggcggccacgctggagcggacggcgtccgcggtgctgctggtggaaaatgacggcggcctgctgccaggcagtgctcaccaggtaagcgcactactgccggccatcgccggggggcgtgtgcgtcatgcccgtctggcaggggaggcggggcaggggggcgtcgtgggtggcgactggagcgtacgccgtctggacaggctgctcgcccgtctgcagccgaatgcagcctggcgtctgttggagcccggtctgctgttcgaggaactggccgacttgccgctggagtcagagctgccgctgtggctacgggccgtggcggcaatggagccgccgatcgaatggcccgctggacaactgaatctgttcgccgaggcgggactgctgcggcagggagatgtccatatgctctgcgcgcgttctcggctacgagccgttccctgcgtattgggtgcgcccttgcgtcagcgtcaggtgacactgcaggtgacgccctttgccagccatctctacgaccgttttccgttccagttgcgggtgtccctcaacggccagcttttcagcagcctggctatcgaagacgcacggccgcaggggctgaccctgccattccggagcgacgaacgcggtggcatgacgatcgagctggagtgcgatggcagttatccggccttcgaaggtgtctcgacaccggtctcgctgttgcttcaggcatcgtttcagccggagccgggcggctattgcccggcgctggcgagcggcgcgacgggtccggtggttgcggaggccccacgcagcgactacgagacctggctttgtgggcgcgaaccggtacctgcgcgctaccgttccttcatcgatggcttgcagcgtacgctgagaatcgaggtcctggtacacgccgacgaagccgcggacgccgtgctgcaacggacgctggcgagcctcgacagacaggtgttgccggcctggcgagtccgggtcctgggtcgggccgaggctttcgtacgcaaggggctggcctggcagcccgacggatgttccgtggtcgagcgaatcaaccgagcggtggccgatagcgacgccgattggtttatcgtcatccatgcgggagatgagttggcgcgtgccgcgttgctcctgttggcggaaaaggcgcgcgcggaaggcgccctgctttgctgctacagcgacgaagaccatctgcggaatgggcggtacgaggcgccattgctcaagcctgacttcaacctggacctgctgcgtagctatccctatagcggccgctcccttgcctttcagcgctccgcttttctggcgcagggtgggctgcacgaaggtttcggcgccctcgcgttgcaggacctcatgttccgcctggtggagcgggagggcctggggtgtgtaggccatcttgccgaagtcctttatcacagtgcgtgtgcgttcggcgaatggcttgcaagcgctgacgtgcagccgttcatcgcggtggcggtcggtgagcatctgaatcgcctcgggatcccgcaccgtatcgagccgggccgtttggctgtgatcaaccgcatcgtctatgagtatgcgggcatgccttcggtatccctgttgcttcccattggcgacagcctgagtctcctccagcgcagcgtggaaagcctgctggaaaataccgactatccctcctacgaattgctgctggttgtcgccgagccgccagcggccgatatgctcgcctggctggaggcggtccaggggctgggcagcgagcagatccgggtgtaccacccgcaggccgctagccaggcggaatgccttaatctctgcgtggccgaggcccggggggagttcatcctgtcgctgggcgtcggcgtggtggcgcttcgtccagactggttgcgcgaaatgctcaatcacggccggcgcccagaggtcgggctggttggcggcaagctgctgggcatggacggaacgatccgcgaagctggcctggtgctcggcctgggcggtgcggtgggccgcgccttcgccgacgagccgggggagagcgccggctacatgcatcgcctgctggtgacgcagaatcacacggcgctgtcggcttcgtgcctgctattcaaacgctcgctgcatgaggaggcgggtggcttcgacgagggtgatttcgcccgcggtcacgccgacgtcgatttcagcctgcgtgcccgccagctcggctacctgagcgtatggacgccctatgcggtgctggcccaggacggcggtttcgcggcgccttccgcagacgccgatgcggctttgtatcggcgctggcttccggcattggcgcaagaccctgcctacaaccgcaacctcagcctggaagctggcggtttcgctctcgagcgcccccggtttcccgactggcagccgctgttcggatgttcgccgctaccgcgtatcctggcgcatcccgccgacccctacggctgcggccactatcgtgtgcgccagccgtttcgtgcgctgcacgacgccggtctgctggatggattgctcagcgagtcgctcctgcggccggtagcgctggagcgtatggatatcgacagcatcgtcctccagcggcagatcagcgacgagcaactgcaggcgattgcccacatgaaatcgttcaaccgtgccttccgggtctacgaactggacgactacctgcctgatctgcccttgaaaagcctgcaccgggccgaaatgcccggcgacattcggcagatcctcggtcgtgctctcggtctggtggaccgcttcgtggtctcgaccgagcccctggcggatgccttccgtcagctccacggcgatatccgggtgctgcccaaccgccttcccctccactggtggcgcgatctttccagccagcgccgggatggcgcacggcgacgggtcgggtgggcaggtggaatcggccatgacggcgatctcgagctgattgccgaggtcgtgcgcgagctggcggacgaggtcgactgggtgttcttcgggttctgccccgacgccttgcgcccgtatgtacgcgagtaccatcccggcgtggagatcgagcgctatcccgcctaccttgccagtctcgatctcgatctcgccctggcgccgctggagcagaatcggttcaacgagtgcaagagcaacctgcggcttctggaatacggggtgcttggtttcccggtgatatgcagcgatgtgctctgctatcgcgatggcttgcctgtcacgcgggtgaagaatcgtcgcgaggactggctgcaggccattcgcatgcatctatccgacccggatgccagcgctgccgccggtgcgcagttgcgcgaggtggtgcgacgcgactggatgctcgaaggaaagcacctgcatgaatgggcggcagcctggctacctgactga

SEQ ID NO: 346366 - DNA, 375 bp, Pseudomonas aeruginosa
atggacgtcggaaacatcacttccctttctacgttcaagaccggcaagactactccggagaccagcggcgatatcttcgcgcagcgcagcgcagcggatggcctcggccaaccggtgccggacccagcggtttccagggatgccaccgaatcccgcgatgacctggggctcgctgtcagcgatatccagtccttcgtgcagagtgtcaagcgcaacttgaacttcagcatcgacgattcctctggccaggtcgtggtcaaggtgatcgacggtgactcgggtgaagtcgtgcggcaaattccttccgaagaagtactaaaacttgccgcccggctcgacgatgtacgcagtgtcttgttcgaagcccgcgcctga

SEQ ID NO: 346367 - DNA, 363 bp, Pseudomonas aeruginosa
gtggccagaacgaggctcgaatcgatccagcacgcgatcgaggtgaattcgtccctggccattcccatcgcccgggaaaacctggcacgaccgacctgcctcgcactgctgacggcgccggtcaacctggtgcatatcctggtgtcctccctcaggggcttccgcgccgaccccgaccaccagccctggcgccaggagatcatccctggcctggccatgctcgccttcgaagtggcgacggaccacgcccaggccgacctgcaacggcgcggcgagcctcggcagcggtgcccaggccagactctacagcaccgccgaccaggccttgtaccgggccgagagcagcggtcgcaaccgggttga

SEQ ID NO: 346368 - DNA, 345 bp, Pseudomonas aeruginosa
atgatccgtcgccttcgcttgctcgtagtcttgctgctgaccgtcgcgcttcccctcaccgggatggcgggcatcgaggcgccgaccgaaccttgcccgatgcagagcatggggatggagcggatggcgggcatggatcaggattgctgccaggacatgagcaagacgccccagcacggcaagaaggactgtaaaagcggacaggaatgcaagagcggcagtcttttgcaggtcaatgtcctgaagcccgccacccccaccgccatttcccaccgcgctacgcggcattccgacgtcgtgctcggccagactccagccgacccctggcgaccaccctgcgcctga

SEQ ID NO: 346369 - DNA, 540 bp, Pseudomonas aeruginosa
atgatcacatccatgcagaaagcggttgagtacgcaaagcaagcgctgcaaatcgcttgggatggccacctgcctgtcaatcctgaaatgattgccaacagtctggtggtctataagaaggatgaagtcaccgggatggacaagaccatccctatccgtgtgcgtgcccaaaactctttcactatgaacgccagtggacaggcttcgctcgccatgactgatgatggaccggtcttctattgtgattacaacagagacgaaatcatctatcgcaacagatttaccctagcccatgagctgggtcatgtgttgctcgggcatgtgaatgaacacaacactcagcagcgcgacacgacgtttgggaattacaaccccattgagcgcgcagcaaattcttttgctgctgaactcgtaatgccagagcaaagggtcagagagctctttaccggagctacgtctgtgcaacaaatgtcagaagcatttggggtttcgaacgcggccatgtcctacagacttaaaaatctaggccttctcggatga

SEQ ID NO: 346370 - DNA, 603 bp, Pseudomonas aeruginosa
atgagtgacgacgtagaacctcagtttggagccggagatatcgccggttccaaatttacgacgccgagtcaggtgagcgagcacgaggcgcgcctcggtaatgaggctatccgacgtaagcagtacagcaggtggttttcgctggcagctttagccacactgactatctcagccgtcggctgtcttcttttttcgatgtgggttggtttccactttctcaatgggctggacagtgccaaggctgatgccaaagccagagaagagcgtttagctctgaatggaactccagctccactcactgccaaacagtctcaagacaaaaagccagtcaaaacttccagcaacaccaaaaaagaagatcccaagcagccaacggcagagtcaaataaagaaacgttctacctgcagattcttgcgcctctgattccagccacattctcatcggcgatcgcaattatcctattcattacgattgcaaggttggtgacaaactttgaacggatgggtcgagaaaacgcggacaaagacccgaatgaagactacgggacaattgccgttttcttccaagagcttggtaaatttgtgaagagcttcaaaagttaa

SEQ ID NO: 346371 - DNA, 1044 bp, Pseudomonas aeruginosa
atgagcgaagacaacggcgcgcagccggcggccgtcgagggcgagctgctgacggcagggcagggtggccaggcaatggcgttcactttcggcgagccggtaccggtgctcgatgggcgggagatcctggactatctggagtgctggtcaaacgggcgctggtacgagccgccggtctccctcgatggcctagcccggtcgacacgggccagcgtgtacttgcaatccggactcacgttcaagcgcaacatgctggtccgcaccttccagccacatcggttgttgaaccgtcaggccttcgagcagatcgtcatggactgggggtggtgcggtaatctgtacctcgagaagcgcgacaacatgctcggccgagccctgggtctgcagccgtgcctggccaagtacatgcgccgcggtacggacctggacacttactaccaggtgcgcggttggaaggacgagcaccagttcaagactggcagcgtctgccacctgcgcgaggccgacatcaatcaggaggtctacgggcttccggagtggatggccgccctgcaaagcgccctgctgaacgagagcgcgaccctgtttcgtcgcaagtattaccagaacggcagtcatgcagggttcatcctctacatgacggacgccgcgcagaatgaggggttcgtcgatgacctgcgcacggccatgaagaacagcaaagggccgggcaacttccgtaacctgttcatgtatgcaccaggtggcaagaaggatggcattcaactgctgccgatcagcgaggtggcggcgaaggatgactttggggcgatcaagaacatcagccgggatgacctgctcgcggctttgcgtattccaccgcagctgatgggcatcgttccccagaacgcaggcgggttcgggtcgatcagggaggcgacggagatctgggcgatgaacgaactggagccggtccagacacgcctggcccagatcaacgactggctaggtgaggaggtgatccggttcactccctacgaggtgctggccggcaacgagagctga

SEQ ID NO: 346372 - DNA, 459 bp, Pseudomonas aeruginosa
ttgagcacgctgcgccaggctctgtacggcctcgccctgctcggcgccctggccctgctgctctggggcacctaccagaagctccaggccgagcaggcccgcgcggcgcgcgcagaggacaagctccaggccaccctggagcacaatgcccagcaggccgccatcatcacccgcctcggtggcgagctcgcccagcagcgcgccgcgcaggaaggcctgctggccagcctggatgccttgcgccaggctcgcgccgccgatcacctcgagaaacaggagctgaagcgacatgatccgacacttcgtgcctgggccgatcagcctttgcctgacgctgctcgccggctgcaccaacgccctgccatcaccggagccgacggttatcgtcagtggctgtccaatcgtcacgcgctgcagcctgctgccggcggagttgcggaacaacggcgatctgagtga

SEQ ID NO: 346373 - DNA, 912 bp, Pseudomonas aeruginosa
gtgaagaccttcgccgctatagacctcagccagttgccggcgcccagcgtcgtggagccgctcgactacgagcagattttcatcgagcgcaaggcctacgccgtctccctgtggcctgcagatcagcaggccgaggtggccgccaccctggaactggaatcggagcccctcaccaagctgctgcaggaaaatgcgtacagggaaacgatatggcggcagagggtcaacgaagccgctctcgccaacatgctggccagcgcccagggcgccgacctcgaccagctcgcagcgaactacaacgtcaagcgcctggttatccagcccggcgatccgtcgagctcgccgcccgtgccggaacgactggagtccgacgacagcctgcgcgagcgggcgcagatggcatgggaaggcctcagcaccgcagggccgcgtaacgcctatattttccacgcccgggccgccgatgggcgcgtcggtgatgcctcggccgtcagcccctcgcccgcggtagctgtggtgacgatccaagcattggcaggcgacggcagcgcgccagccgacctggttggtctcgtccatgcctacctgagcgacgatgaccgccgtcctgtagcggaccggctgttcgtgcagagcgccgaggtgcttccgtatgccgtcactgcaaccctctacctcaacaccgcaggccctgagtcagagcccatcgttgaagcagcagagaaggcgctgcttgcctacgtccaccagcgtcgccgcctgggtatggaagtaaccgagtcagctatccacgccgccctacacgtcgaaggtgttcgcaaagtggtgctgcacggctggcaagatatcgtcgccaccgaagcccaggcgccgtactgcaccagcgtcaccctcactcgaggagctgactga

SEQ ID NO: 346374 - DNA, 618 bp, Pseudomonas aeruginosa
atgaccgccaggccgctgctccctggcaacgcctccgagctcgaacgcctggcagcccaggcgctggcggatatacagcgggtaccgatcccgctgcgcacgctctgcaaccctgatacctgccctgcgaatctgctgccgtacctcgcgtgggcgttttccgttgaccgctggagcagcgcgtggcctgaatcggcacgccgcggcgccatccgctcggcattcttcatccattcgcgcaagggcacgatcggcgccttgcgccgcgtagttgaaccactggggtatctgatcgaggtccgtgagtggtggcagcaggcgccggccggcatccccggaaccttcgaactgctggtcggcgtactcgaaaccggtatcaccgaagagatgtacgaggaactgacctggctgatcgacgacgccaagcccctcacccgccacctggtcggactctccatcagtctcgaaagcactggcgccctgccaatcggcgcggcgatctacgacggcgacgagatcgacatttacccaccccagaaccgcgacatcgacgtcaccggcaccattggtcgcggcgggcgtgatcactccatcgacaccttggacgtttacccatga

SEQ ID NO: 346375 - DNA, 1617 bp, Pseudomonas aeruginosa
atgatcgatcagaattcgcagtttttcgccatcctcacagacgttggcgcggccaagcaggccaatgccgacgcgctaggcatcccgtggaagctgacccagatgggtgtcggcgacgccaacggcaccgacccgattccatccgccgcacagacgaagctgatcaacgagaggcgccgcgcgccgctgaaccagttgaaagtggacccaaacaatgccgcggtgatcattgccgaacaggtcattccagagaacatcggcggctggtggatccgagaaatcgggctctacgatgccgacaacaacctcgtcgcggtggccaactgcgctccgtcgtttaagccgatcctcagccagggaagcggacgcacccagatcgtccgactcaacctgatcgtcagcaactctgcgaatatcgagctgaagatcgaccccagcgttgtcttggccactcgcagctatgttgatagccagttgcttgaggtcctgcctccagtacgggaaccaagcacttatacaaaggttacgatcaatacgcgcggcatcgtgatatctggtgaaactcccgacactcttgaagaatacggcataacaaacgcgctgtatgtcggtcgtgtaagtcaacaagtacccgttctggctgcatcgaaaaccatgaacgattactccggctcagctattcaaattcgtgaagctgctgaggcgggagcctcgcaagcatccgacaactatgctccggccatcggattccactggctcggccgtgttacgggccgcatattcatggacgcccaaggtatcctgaaatggaacaacaaagcactgctcaccgacgaaacggcgtacaggaaaccgcagattgatggtctgcttgcaggcaaggcaaactgggcaatctctcttgccggttatggcatcatcgatgcgtacaccaaagtggaagtcgacgaatatttacagtcgaaggctgacaagaacaaggcattagcggtgggtagtgtcagccaacaagtgcccgttctggctgcatcgaagtccatcaacgactactccggttcaggactacaaattcgtgaggcctctgaagttggggcttcgcaaacatccgacgattatgcgcctgccttgggttttcactggctcggtcgaacaacggggcgcttgtttatgaatgcgctgggcgtgttgacatggaatgggtcatcattactcactggaacgcatgcgacacaggacgaagtcaactcgggaacaggtaatacatccgttgtgtcggcagcaaaactacgcttcggttttacatttataaaaggaggcggcggcgcaaataatgctattcggtttcccacatggctaggcggcttgattattcagtggggggtgcacttggcaaatacagcagacgcagaaacaaacgtcaccttcccaattgcattcagcatcattcccggcctagccagcacgtttactcatgatggagtgtttactcaatcaacagtcgtaacacaaggccgtggactgactacgacagggtttcagtcacgtcgcgatgatatcggaaccgcatcgtcatttagcggaacggcatatatccgttggatcgcgatcggatattga

SEQ ID NO: 346376 - DNA, 291 bp, Pseudomonas aeruginosa
atggacgaagaattctgcagtgaaatcttcaaaagcgccaagcagctgcacggcgtgctgtatctgagtcggtacggctatgtagggaaagcgctcgaaatggagtgcttactccatgcgctagccactgagaagctcgaacgcaacgttctcagcctgtacgactccaacgcctctttttgcgatatcgagaccgtcgaaggcctcacagctgatggctgcgatggcatgcacctgaatcgcgctgctgctgatcacctttctccagtttcacttgtttggggccgctag

SEQ ID NO: 346377 - DNA, 588 bp, Pseudomonas aeruginosa
atgcagcactactacaagtcccaggtcgccgaagtgatggcgatcgtccaggacttctacgaagcgaggacgctgttcggcaaacagttggacgaactgggtcggctgttcggcggcaaggtcgcgccgatgaaagacatcacctcgcacttcgcaggcggggtgaaactgtcggccagtcacgccctcgatgttcactggcgtcggcctgatgaatggggatttcgctcgctcaggagcgaggccaaaccgccgaagggcctcaccagggaacaacgggccgaaattcgggccgagcacgcgcgcttggtcgcgctgtggcaagagcactgcccggaacgcctcgacatccacctctactgggaacgcctgaacgtcaacaccggcaacctgctgctcggcggcggcagcaagttcgaacgccagggcgttgcctacttctgcctcggtttcgagatcaaccaggccaagtacgaggccgctgtcaccgcgggagccccctctgtcggctggatcactggcgcggtggaaatcctcccgagcgagtacgaagacgcccgtcaggcctggctgggagcaagcgcatga

SEQ ID NO: 346378 - DNA, 216 bp, Pseudomonas aeruginosa
atgaactggcatatcaacctggccgaccgccagcacatgctggcatgcgaggcccggtactggctccggcgtgggtacaccacgccggagaaagtcaccgagctgaaagagaccctctacaagaagcgcggcgaggaagccgtcatccagctgatcgaggaaatgcgcaggcagtggggtagccgccatgagtggcggagggggtcgcatgagtaa

SEQ ID NO: 346379 - DNA, 318 bp, Pseudomonas aeruginosa
atgccgcaccacctcctcatcgccctgctgctattgccgctgccgcttttcgccgccccgcccagggatgagctggcctacgccgtaggcgctcggctgggcacccgactgctgcaggaaatgcccgggctggagcttgccgagctgctcaggggaccggaacgggcctatcgcgcagaggagctcgagctgccgcccgagcgtatcgaacggctgctggcgcaacaggacaactccacgccggcgcgagcgcccaccacgcccgtcgaagcgcgcttcctggccaacgaaaagcccgcttcggcgtccgcgaactga

SEQ ID NO: 346380 - DNA, 318 bp, Pseudomonas aeruginosa
gtgccggaaacctgccgccagcgcagctgcgaattgcgcctggcaccggcctacgacatcgtcaacaccacggcttatatcccggaagatgtactggcactggatctcgtaggcaacaagtccctctttacctcgcggcaggggctgctggagttcgtccaggtctgcgatgtagctcggccaaaagaagtgacctgcgagcagttgcaaacactggagcgggtgttggcccgctcagctgagctgtgcgagcaggccccgcatgtggtcgcggcaaccaggcaatgtaccgttccgttcatgcagacgtttggctaa

SEQ ID NO: 346381 - DNA, 255 bp, Pseudomonas aeruginosa
atgcacgcagaaactttggcttttgacttcaccaacggtcaggctgataccatcaatgccaataaagcctttatgaagtacgtacttcataatttctttgtttggcatgcaaagccaaagctggtggttattatcagacagttgaaccttttctatctccgctacgcagataacatgtccagacataagatgaccgccaatctcatcaccgagcttggcggcccgctcaatatttacgaagtcgcccacaattaa

SEQ ID NO: 346382 - DNA, 660 bp, Pseudomonas aeruginosa
ttgcagcgccgcggtatcccgcgcgcggtgctgacctccgggctgatcgtcggcgccttcaatatcttcggcaccctcggcgtgctggccgcggtaccggccgaggaaaccgacgtcacccggatcttcgccacaccctcttcaccaacatggagcatgggcaccaaccgtgccgcggtggaagcggccaaggcctgcgagctgccggcgctgttcggcgtggtccatccgcggcatggcacgccgatcgactcggcggtactggcctgtgagcatcgtcctgctcctgctctacggcctggtggcgcacactgccgaggaactgctctggacttcgctgtcgatcttcgcatggtcttcatgatgccctacgtgctgatgtgcctggccttcgtccgcctgcgccgcgccgacccgcgcccacggccctgccggatgccgctgggcgatcgcctggccagtctctgggcgctgttcgtcgcgctgcatgtgctggccggcatcggcttgtccgtcgtcgcccccggcgcgccgatggactgggcctacgccggcaagatcgtcggcggcgtggcgctggtcatggcggcggaccagctgctgatccgccaggcggcgcgaaggcgcggcggggtggctctgcgcggtgcctacggttga

SEQ ID NO: 346383 - DNA, 186 bp, Pseudomonas aeruginosa
atgctcgcccggggcgtcggcggcctgcactacggctggaaccatggcttcgccgacgatttcagcctggactccatcgtcccgccctcgccgggccaggtggccgcgctgggagtgatggtctacggcatcatggggaccgagctggcctgttgcagcgccgcggtatcccgcgcgcggtgctga

SEQ ID NO: 346384 - DNA, 231 bp, Pseudomonas aeruginosa
gtgctgcgcggcttcggtcgcggcgtgctcaccgtccgcgaacgcgaggcctgccagccgctactcagcggccgctcggcgaaatccagcgcgcggctgatggacacctccccagagatggtgcgcatgcaccggaagaaactctacgccaagctggaagtcggctcgcagtcggaactgttcgcgctgttcatcgagtgcctgagccaagggcagcgcgtcggcccctga

SEQ ID NO: 346385 - DNA, 360 bp, Pseudomonas aeruginosa
atgccgtccagggccttgctgcatgcctcggaactgtacacggcggcgagcgatggcgagttcgcccggctcggcatccgggtcagcccggaactggacctggcgcagatgatgaggcagaaggacgaaagcgtcgccggcctgacccgcggcatcgggttcctcttccgcaagcacaaggtgcaatggatcaagggctgggcgcggctacagggcgaggggcgggtcgaggtgacccacgccgacggcagccactcgctgctggaggcgcgcgacatcgtcatcgccaccggctcggagccggcgccgctacccggcgtgaccagcgcatccccgactccaccggcgccctggcgctga

SEQ ID NO: 346386 - DNA, 597 bp, Pseudomonas aeruginosa
atgcttcggctctcgatgccggccctgctcctggctcttgccggttgcgccaccaagcctcccgccaaccccgacaacctctgcgagatcttccgcgagaaaccgaagtggcacgaggcggcgctgaagatgcagcagcgctggggcgcgccgatccaggtgccgatggcgatgatgtaccaggaatcgtccttccggcatgacgccctgccgccgcgctacttcttcctcggcttcatcccctggggccgggtcagctccgcctacggctacgcccaggccaaggacgagacctgggccgactacaagcgcgaggccggaggctggggcgccagccgcgacgacttcgccgacgccctggacttcatgggctggtacatccagaagagccagcgcgtcaacggtgtgtccaagtgggacgcctacggccagtacctgaactaccacgaaggttggggcggctatcgcaaccgcagctacgacgccaagccgtggctgaagaacgtctcgcagaaggtccagtcgcgcgcctcgctgttcggcgcccagtaccgcagctgccagcaggaactgtcacgcggcggctggttctggtag

SEQ ID NO: 346387 - DNA, 966 bp, Pseudomonas aeruginosa
atgcgtcacggcgatatttccagcagcaacgacaccgtcggagtggcggtggtcaactacaagatgccgcgcctgcacaccgcggcggaggtactggacaacgcgcgaaggatcgccgacatgatcgtcggcatgaagcagggcctgcccggcatggatctggtggtgttccccgagtacagcctgcagggcatcatgtacgatccggcggagatgatggaaaccgcggtggccatccccggcgaggaaaccgagatattctcccgcgcctgccgcaaggccaacgtctggggcgtgttctcgctcaccggcgaacggcacgaggagcatccgcgcaaggcgccgtacaacaccctggtgctgatcgacaacaacggcgagatcgtccagaagtaccgcaagatcatcccctggtgccccatcgagggctggtaccccggtggccagacctacgtcagcgacgggccgaagggcatgaagatcagcctgatcatctgcgacgacggcaactacccggagatctggcgcgattgcgcgatgaagggcgccgagctgatcgtgcgctgccagggctacatgtacccggccaaggaccagcaggtgatgatggccaaggccatggcctgggccaacaactgctacgtggcggtggccaacgccgccggcttcgacggcgtgtactcctacttcggccactcggcgatcatcggcttcgacggtcgcaccctcggtgagtgcggcgaggaggaaatgggtatccagtacgcccagctgtcgctttcgcagatccgcgacgcgcgcgccaacgaccagtcgcagaaccacctgttcaagatccttcatcgcggctacagcggcctgcaggcctccggcgacggcgaccggggctggcggagtgtccgttcgagttctaccgcacctgggtcaccgatgccgagaaggcccgcgagaacgtcgagcggctga

SEQ ID NO: 346388 - DNA, 279 bp, Pseudomonas aeruginosa
atgaggttttcccggggcgggttttgccgtgttccgcggcagcggcagacagaggcggagcgggcgttatggctgtgtttgcgcgggcaacgattgctcgggctgaagtttcgtcgacagaagattctcgggccgtacatcgtcgatttccgctgccatgagcggatgctggtgatcgcgctggatggcgggcagcacgaggattcgccggccgataggttgcgggatgcctggctggagaggcggacggcacgaaggaacctactgctcgtgttgtag

SEQ ID NO: 346389 - DNA, 246 bp, Pseudomonas aeruginosa
atggccagtatcaccattagaaatctagacgaagacctcaaggccaagcttcgagtggtcgctgcgaaccatggccgctcgatggaagaggaagtccggataatcctcgcccaagcactttctcgggaagagaaacgtagtgggctgggaagccgaattcattcccgctttgcgttggttggtggggctgatatcgaggtgcccgctcgtaataccaaggctcgggctgcggacttcgacgaatga

SEQ ID NO: 346390 - DNA, 420 bp, Pseudomonas aeruginosa
atgatcctgctcgacaccaatgtcctgtcagaactcatgagagcgaagccggatccggtggtggttgcttgggtcgacgctcaacctgtccaggatttgctcatcagttcgatcacggtggcagagatcctctatggtatcgccagaataccggagggtaagcgcaggcaagcactacaggacgtggccattgccatgttcgaagaggactttgccgggaggatcttgccattcgatgcggatgccgctgttcattacgcagagctggcggcagagagtgagggcaagggaaagatagccgatatggctgacgggcaaattgcagcgatagccaagttgcacggcgtaccggttgctacccgcaatatccgccacttccagagcttcggtgttgagctgtttaatccctggagtggctga

SEQ ID NO: 346391 - DNA, 2607 bp, Pseudomonas aeruginosa
atgaacagcgcacaccgcaaaccgctccccggcacccgcctggactacttcgacgcccgcgaggcggtcgaggcgatccagcccggcgcctacgccaagctgccctatacctcccgcgtgctcgccgagaacctggtgcgccgctgcgacccggcgactctggaggcttcgctgcgccaactggtcgagcgcaagcgcgacctcgacttcccctggtacccggcgcgggtggtctgccatgacatcctcgggcagaccgcgctggtcgacctcgccggcctgcgcgacgccatcgccgacaagggcggcgacccggcccaggtcaacccggtggtgccggtgcaactgatcgtcgaccactcgctggcggtggaatgcggcggctacgaccccgaggccttcgccaagaaccgcgccatcgaggaccgccgcaacgaggaccgcttccacttcatcgactggaccaagcaggccttccgcaacgtcgacgtgatcccgccgggcaacggcatcatgcaccagatcaacctggagaagatgtcgccggtgatccaggcgcgcgacggcgtggccttccccgatacctgcgtgggtaccgacagccataccccgcacgtcgacgccctgggcgtgatcgccatcggcgtcggcggcctggaggcggagaacgtgatgctcggccgcgcctcctggatgcgcctgccggacatcgtcggcgtcgagctgagcggccgtcgccagccgggcatcaccgccaccgacgtggtgctggccctgaccgagttcctgcgcaagcagaaggtggtcggcgcctacctggagttctacggcgaaggcgccgccagcctgaccctcggcgaccgcgcgaccatctccaacatggctccggaatacggcgccaccgcggcgatgttcgccatcgaccagcagaccatcgactacctgcgcctcaccggtcgcgacgacgagcaggtcgccctggtggaggcctatgcgcgcaccgccggactctggtccgacagcctggtagacgccgagtacgagcgggtactgaagttcgacctgtccagcgtggtgcgcaacatggccggcccgtccaacccgcacgcccgggtcgccaccagcgaactggcggcgaaaggcatcgccggcaacctcgagcgggcccgcgccgaggaagccgagggcctgatgccggacggcgcggtgatcatcgccgcgatcaccagttgcaccaacaccagcaacccgcgcaacgtgatcgccgccggcctgctggcgcgcaacgccgaccgcctcggcctggtccgcaagccatgggtgaagacctcgctggcaccgggctccaaggtggtcaccgaatacctgcgcgaagccggcctgctgccgcacctggaagccctcggcttcggcgtggtggcctacgcctgcacgtcttgcaacggcatgtccggcgccctcgacccggcgatccagcgggagatcgtcgaacgcgacctgtacgccaccgcggtgctctccggcaaccgcaacttcgacgggcgcatccacccctacgccaagcaggccttcctcgcctcgccgccgctggtggtggcctacgccatcgccgggaccatccgcttcgacatcgagcgcgacgtgctcggcgtggtggacggcagggagatccgcctgaaggacctctggccgagcgacgaagagatcgacgcggtggtcagggcggcggtgaagcccgagcagttccgccaggtctacatcccgatgttcgacatcacccacggcgagcgcgagaaggtcgacccgctctacgcctggcgcccgacgagcacctacatccgccgcccaccgtactgggaaggcgccctcgccggcgaacgcaccctgcgcggcatgcgcccgctggcggtgctgccggacaacatcaccaccgaccacctgtcgccgtccaacgcgatcctcgccgacagcgcggccggcgagtacctggcgaaaatgggcctgcccgaagaggacttcaactcctacgccacccaccgtggcgaccacctcaccgcgcaacgcgcgaccttcgccaacccgaagctgttcaacgagatggtgcgcgacgccgacggcagcgtgaggcagggctcgctggcgcgggtcgagccggaaggcaaggtgatgcgcatgtgggaagccatcgagacctacatggagcgcaagcagccgctgatcatcgtcgccggtgccgactacggccagggttcttcgcgcgactgggcggccaagggcgtgcgcctggccggggtggaggcgatcgtcgccgagggcttcgagcgcatccaccgcaccaacctgatcggcatgggcgtgctgccgctggagttcaagccgggcaccacccgcctgaccctggggatcgacggcagcgagaccttcgacgtggtcggcgctcgccggccgcgcgccgacctgaccctggtcatccaccggcgcgacggcgagcggctggaagtgccggtgacctgccgcctggacagcgacgaggaagtctccatctacgaagcaggcggcgtactgcaacgcttcgcccaggacttcctggaggcggccggcgcctga

SEQ ID NO: 346392 - DNA, 660 bp, Pseudomonas aeruginosa
atggaacatcaagaacccaaacgctccccacatatccgagcgatcgcatttattgactggaattcacaactaagaatttacggaaagacatgtagaaatgacgctatagaaaaatccaaacgagcctttcacatgatcacaaaaagaatagccactcagctgaccaacaactttccagatcaaagatttaatgttagcttgaggctataccatggctggcataaaggtttcgagccgacagcaaataaaaaagcaatattaaaagtaatcgcagaaacagattttgccacactatcacataaaccatatttaatattctccccagaagtagagtacggagacagtcttctttccgctcttcccgaaagaatgcataaaagattacgaattcatttacctaatactcttcaagataagataggcgaagaaggtgttcaggaaaaaatggtcgataccgcattggcttctgacgttgtattttctgcattccaggactctgacgaatggatcattgtagtttccgaagatgatgattgcatacccccattatttgtagcagagtcaatattaaaaagcagaaactcaaaagcgcttttgctcagctcaaggaagcgcacgagcaaaactttaaatattgacgacttatcgctaggtgcataa

SEQ ID NO: 346393 - DNA, 2211 bp, Pseudomonas aeruginosa
atgataactcgcgaatcactcatcgaagacttttcgcctttttgcgacataggcgagccaattccgaaagtcacccacgaaaaggataacctcactttaagaatgacacgaaatggtgatcctttacgaatcactattaatgtggattcaggaaaagcaacatccataactgatggcagaattaaaagaaactttgcatctttagaggcgctactctcctcagatatatttgcaaatctaaaaaaatggacagattcgcaacgagactacttaaaaagggaacttaacaaccatcaaaaactactaccattaaacggaacactaaacaaaaatcaaaaaataacaaacatagacgaaatcagcagtgcaataggcaataaagattacttaaataaatctactgaaattcttttgatagatggtccagcgggaataggaaagacaagcttaatcgagcagctttcgctaaaacgagccgaatcatacaaagatttgaacctgcctcccgtgttgcacgttaaaagtagaggcagagccctctcgaatctccaagacttgatggctttcagcctacaaaccatacgctcccacataacctatgatcagattccggtcttagtaaaatatggtctcgtcattctagctatagatggcttcgatgaactaggcgatccaaatggatatgatcttgcctgggctcaacttggagagcttgtaaatcaagttagaggaaaaggggtgatcatccttgctggacgagatacatttcttggacgcgaccggctatatagagatgtaaaatcaattaaaaaaaacgttgacaccgtaaatagtgtaactctattcccgcccaccgtagcacaagcaaaagaatggcttcaaaaaaggaactggaccgtagccaatcttgactcgcccgcaatggccattctattagagagcgactcatttgctttaaggcctgtatttttaaagctactaggtgagataaccaagcctaaacaaattctagagaagcacgattcctatatagccacaatgcttatacaaagcatgataactcgcgagtctgaaaaatttggcaggcccgccgaagctgcgctctcaattgatggcctgaaaaattttgtatggaattttatgtgcgaaatcgcaagggagatggctgactcccaaagcgagtccgttgaagccaattttttaggatgggtagcagaagtcgctctaggcgatgacattgagggtgagatgctagccataataaagaacagagcctctgtaattggctttttggttccggatgagcgccccggatatctgcgattcatgcactcacagataatgaacttctttctatcatatgtaacaattaactccataaaagacggagagacaccaaaatacatccgaagaaacctaattggccctgacttcctcagttcattcttaaatgtcgcactcgaaataggctcaaacaaacctcaaataatcaatgaattcctttcacgagcaatatacttctcaagcagctatagctatattgaccggggaattaaaaatgtcggagcacttatactctcggcactcccagcgtacgctgatgattcagaaatactaattcgcgactatgaaatagatgacgcagtctgtcaaggaacatacccgcgatgcatcatcgagcgaagctcagttagccaacttgattgtcgaggagcagacctaaagctaattgaatttaaagactccaagataattagtgtaatagcggatgatactagcagattttctgcaaccttccccttacccgcattcataaccgatggaactggacgtgaaatccctaacagcgagatcgaagaatggctttcacaaagggggcgaaataacgatgagacatctttggacggaatagtccctgccaaactaaaaaaacatccaatctattccttactaggtcgcgcctgtcggctaaagcagtattggttgagactagaagatgatgtatattccgaaaaaatactcagaaatccaaactgggacaagctgcgacttatacttataaagtatgatcttttgaaagaggaaagacgtgcagcatctggtcgatcaccaacattctatcatataaagcatagagaccgaattctcgcagaaaacccaaacgacgaagagataagcgcgttttttaaagagctcgcgaacacaatctaa

SEQ ID NO: 346394 - DNA, 483 bp, Pseudomonas aeruginosa
atggaagaaggccgccccagtgacgcccatcaggacggcggtcagcgccagcaagactccgggacggaccccgcgggacaggacgacgcccgccgcgagattgccgagggcgttcgccgcgacgatggccgccccgacgagcccggcggtttccaggggaactcccaggcgctgcatgaggaacaccggaaggaaagtcatcagggcgaagaactgcaggttgtagacgctgaaactcagcgccagcaggctgatggcgggatttcgcagcagcacgcccagcccgcctcgctggccgcccgccgtcccgccagccgcggcgggcaccgtgacgaacagcagcgccgcggcgagcagcaccggcagcgcgctcgccagccagtccgcgcgccagtcggcgagcagaggcccgaccagcatcgaaagggcgatcccgcccgccatgaaggtgctccacaggccgaacaccaggctacgccgtga

SEQ ID NO: 346395 - DNA, 609 bp, Pseudomonas aeruginosa
atgacaatcctccatatcgacgccagcatcctcaacgaactgtcggtcagtcgccaactcacggccgcgataatcaagcggttgaccaggaccaggccggacactgcagtcatccataccgatctctacgcagaaccggtcggccatctgtccaattcggagttcctggcctttcagggcatcgagccgcaggacgacgaggcgaagcgaaccgttgcgcgcaacgccaggctgctgggtgattttcttgccgccgacacaatcgtcatcggtgcgcccatgtataacttcacgcttcccactcagctccgcgcttggcttgatcggctcgctgtgcccggcaagaccttccgctacacggaaaccggcgtcgaagggctggccaaaaacaagcgcgtcatcgtcgcgtccactcgtggaggcctatacggtgagggcacgccacaagctttcctcgatcatcaggagtcctatcttcgtggtttcctcggattccttggcattactgacatcacctttatccgcgccgaaggtttggctctcggcccgaaaaaccgcgcctctgccatcgaagtagccgtcgccaaggccgagaagctcaccgcttaa

SEQ ID NO: 346396 - DNA, 180 bp, Pseudomonas aeruginosa
atgttcctcttgtcgatccgttcacgattcgacggtatcaccggcaaaagcgagaactgcagcgacttcgaggcatggtacttatcgataaggttgatattgcgggaacatgacgaagcgatccggcaaaccccgattcagagcctatcagccggtatttcattgcactttggttattag

SEQ ID NO: 346397 - DNA, 210 bp, Pseudomonas aeruginosa
atgctgacggccatacagaacctgggcgtgatgccctcgttcagccgcccccgggcaagcaatgacaacgcctacaccgaggctctgttccgcacgatcaagtactgcccactgtggccggagctgcccttcgatacgctcgagcaagccaggatctgggcaaaccgtttcgtggactggtacaacaccagcaccgccacagtgcactga

SEQ ID NO: 346398 - DNA, 264 bp, Pseudomonas aeruginosa
gtggtactgaaatcggggggcaggtcacccaagctgggtctgtacaaggaagtgaagggactggaagcaacgctggcggcgggtgcgaaggcgggcgaatcgccgctggtcttgaatgccttcgtgctgtcaccgacgaaattcgccgacctgctcaacgttggcgacccttcaaagaaggccaatctggaaagccgcaacgtgttgtttatgggggacggcgggcagacttacttgagcaagatgtttgcccgcattgtctga

SEQ ID NO: 346399 - DNA, 6297 bp, Pseudomonas aeruginosa
atgatacgtttctgccccaactgccagagcgaacgctcgctttcggaaatcttctgcgaaggctcgatccagggccagccctgcggctgggacctttccgccgaagccatccatcccgccggctggcgaccacagccggtgctgacccaggaagccatcgcgccgcccgccagcgagttgccagcggcgtccgccccgctctgcgccaacggccatccgctgcaacccggcgacctgatgtgcctggagtgcggcgccgcgccggccgaaggcccgctgccgatgcaggccgaggccacgccgcagcccgccgtcacggaaaccctgatcgacggctggcgcctgctgcggcagatcgccagcagcgacggcgtgcgcgagcgctacctggccgaacatgcggaaagcgcccgccaggcggtgctcaccctgtatcgcccgggcgccgagccggacccggcgatctacgacgtgatccgccgcctgccgcgcgaacacgtgccggaaatcctcgccaccggccgctgggacgagcgcgcctacgaagtggtcgaggaactcaccggcggcagcctcgccgacctcggcaccgtgctggaggaccgcgaggcggtgcgccacgtggtccgcgaactgggccatgccctgcacgtgttcaacgaagccggcctgcgccaccgcgacctgcgcccggccagcctgctggtgcgcagccacgagccgctggacctggtgatcagcggcttcggctcggcgcgcctgtcggagttcgacctggatatcgtctcgccgctggagaccagccgctacatggcccccgaggcgatcgccggcggcgtggcggcggcttccgactggtggagcctgggcatgatcctgctggagcagttgacccgcggcgtctgcttcgaaggcgtcaacgccaacgccttcctgatccacgtgctggccaacggcgtgacgctgcccgacgacctcgacccgcagttgcacctgctgctgcgcggcctgctcgcgcgcgaccgccaccagcgctggcagtggccgcaggtacaggcctggctgaacggcgaggcggtggacgcgccggcctcggcggacagcgaaaaggacgacgcagaaggcgccagcatcgccctcggcgcacggcgcttccgcaagccgacggtcttcgccctggccgcggcccaggccgagcactgggctgaggccctcgaccacctgctgcgcggggcgatcgtcacctgggccgagcagatcggcctgtcgcccaggctgctcgccggcctgcgccaggtggcccagcacgaggggctggaggacgacttccggctgatgctggcgctcaagctgctgaacccggaaatcccgctgatccagcgcggcgagatcgtcacccccggctggctgctggagcatccgctggagggctaccggctgatcagcggctcggtgcccgacctgctcgaacagttgcacaccgaaagctggctgtcgcggctcaagacccgcgccgagaacgtccgccagcgcgccctgcaccagcacatcgaactcgccgaagaacagttgcgcatctacctgctgtcgacctcgcgggcgcgcctcgccgcgcagtggcaggagcgccagcgcctcctgccggacaccgagcaccccggcctgctggccctggccgagcgccgggtgatcgccgaggaagacctgatcgtcctgctcggcgccaacatcggccagttccgtgccgccgaggcgatcgtcgaggaagccgccggcctggcccgcgacgccgatgtgcacttgttcgacgcggagaccgcgcgcggcctgttgcagcacccgcggcaggagctgtaccgccgcgtcgacgaacgcatcagcggcttcgcccgcagcggcgtgcccagggtcgacgaatgggccgagcagttccgcctggagcggcgcatgccgttggcgagggtcctggtgctgctggcgatcccgccggaacagtggctggaaccgcagaagcagcagtacgtgtcgcaaatcctcgatttcttcgagaagaaagtggtcgccgcggtgatgcgcgggccgctggtgcgcatgagcatcggcaagagcactccacgcatcgacctcaacgaactggacagcgcgcgccgccccgccgccgctctgctcgaccacctgttgcaacgcaacgcccgcgcggtgagcctcgacccggacagcttcctcgccaacccgcaactggaagtgcggctcaacgcgctgtcccggcaaagctcgctgtacaagcgcgacaccggcatcgacggcctctacctgggcttccccttcctgctcaaccgcgacccgcgcggcaccacccgcacgcgcatcgtgccgctgctgctgtggccgctgaagctgcaactggaagtcggcagccgcggccaggtggcgctggccttcgacggcgagcgcgaggaagtgcgcctcaacccggccctggaaagcctgctcggccccgagccgtgcaagcgctggcgcaaggtcgccgacgaattgctcggccgctccgcgctgcgcgccgccgatgtgatggatgccttcggcctgctcgccacgccgcgtgcgcgggggctggaaggattgccaccgagttccaccgaggtcacgccctaccaggaccaactggcctgcgccgcggtgctgttccacgtcaccttcatgggccaggcgatcggcgaggacctgcgccagctgaagagcctgccgccctccggcaccggcctggagaccgcgctgcgcctgcgcgagaacggcgagctggaagctcgcgagagcccgccggagttgcagcgctacttcaccgtggccagcgacccgtcccaggaggccgccgtgttgcaggcccggcagagcccggggctgctggtggaaggcccgcccggtaccggcaagagccagaccatcgtcaacatggtcgccgacgccatcggccgccagcgcagcctgctgatcgtctgccagaagcacgccgccctggaagtggtgcacaagcgcctggtggccgagggcctgggccagcgcatcgtcatgctcaacgacgtcaaccgcgaccgcgaaccggtgatccgcaacatccgcgagcagctcgaagcgctgttcgccgacgccggcggcgcccagggctgggagcgccagcgcgagcgcctggcggcgcgtatcgaggcgctggaaggcgaactggaccgctaccaccagagcctgcaccgcgtggacgaggccaccgggctgagctaccggcgcctgctcggcgaactgatcgagctggagaaaggttcgccgccgctggacttcccggccctgcgccagcgcctggcggcgctggacatcggtagcctggcgcgcctggaggaaaactgcgcgccgctggtccgcctctggctgccggcccgctacgaaggcagcccgctggcgcaactgcgcgccttcgccaccgaccaggccaccctgcaagccttcgccgacagcctgcgcgccttcggcgaagcggagaacgcccggcagaaagccctcgacgaacacccggcgagcttcgaggtcgacgacccgacgccctaccgcgcctggctggcaagccaggtcggtaccctgctgaatttgcgcgaggagcagcgccagcgcctggcccactggctgccgctgttccgcgacgccgcgccaggacagccgagccgtggcgacggcctgctggcggaggccgagcagatcgaacggcaactgcgccagctcgacctcgaacggcatgcgccgctgctgtcgccggccctcgccatgctcgaagagaacaacctcgaacgcctccaggcccacgcccgccaggtgctcgaggcacgcacctggctggcccggctcaacccgctgcgcctactgcggcgcggccgcctgcggcgcttcctgcgcgagcacggcgaacccgacgacgacagccgcctggccgccctcctcggcgcctgcggcctggagcgccagtggcggccgctgcgccggcaactggcggcgctgcaccagagcctggggctggcgacagtcgccaccgatgccggcccgcaactggccagcctggccggccacgccagccagcagctgcgcgaaatccaggccctggctcgcggcctggcccaggcgccgcgcgccgagcagctcgacgcggtgatcctcaccggcgagaaacagcgcttcgaagcgctgctcggcgacctcgacgccgcgctgatccgccaggccgcgcgccagctcagcctggacaaactgagggtgctcgccgactggctcggcgacgaactgctggaacagctgcaccgcgccatcgccggcaaccagagcaacctgccggccctcggccgcctgcgcgaggcgctgccgcaactggtcgcctaccagcgcttccgtggccgcgccggccagctcgaagccaccgacctggaattcctggccctgctgcgccagcgccaggaacgactcgacgcgattcccgccgaagaactcgaagccacggtgcgccgcatgctcaaccgcgaagcgcggctgggctggaagcagcgcctggaacaagacaatccggaactgctgttcagccaggacgaagccagggccagggtcgccagcctcgccgaagccgatgtgcagatgcgcgcactgaaccgcgaactgctcggcaagggcatcgacgccgcgcgcctgggcagccgcaagcagtgggaagacgtcacccgcctgaccggcaagcgctcgcggcgcctgcgcgagttcatcgagctgggcgccgaactcggtctgatgagcctgcgcccggtctggctgatgaaccccgacctggccagccgcgtgctgccgctcaaggccgggctgttcgacatggtgatctacgacgaagcctcgcagatgccggtggagttcgccctgccgaccctctatcgcgggcggatcaccgtggtcagcggggacgagaagcaaatgccgccgaccgcgttcttctccagccgcgtggaaagcgacgaggccgaactgttcgacggcgaagcacccgacgaggacgccgacgaggagcagcgcgaagcctacgaggacacctggaaccgccgcgagatcaaggactgcccggacctcctgcaactggcgcgcaacgccctgcccagcaccaccctgcagatccactaccgctcggcctaccgcgagctgatcggcttctccaacgcctcgttctacggcaaccgcctgagcgtgccggtacgccatccgcaggccaacatcctgcgcatcaagccgctggaactgatccaggtgaacggcctgtaccagaaccagagcaacgagcgcgaggccgagcgagtcgtcgactacctcgccgaactctggcgccaaccctacgcggcgcggccgtcggtgggcgtggtcaccttcaaccgcaagcaggccgacctcatcgaggagcgcctggaactgcgcgccgagcaggacgaggcgttccgcgccgcctacagcgaggagcgcgagcgcagcgaagacggcgaggacatgggcgtgttcgtgaagaacgtggagaacgtgcagggcgacgagcgcgacgtgatcgtcttctcctccaccttcggtcgcaacggccagggcagcttccggcgcaacttcggcgtactcgggcagaccggcggcgagcgccgtctcaacgtggcggtgacccgcgcgcggcgcaaggtggtgatgatcacctcgatgccgatcggcgacatctccgacatgctcggcacccagcgctcgccgagcagcccgcgcgactacctgcaaggctacctggaatacgcccgcgcactgtccgccggcgagttcgccggcaccggccagctgctcgagcgcctgcacaccgaccgcagcgaccagcgccgccagcactaccagcggcacgacggcttcagcgagatcgtcggcgagtacatccgctcgctgggctggtccgccgcgcccgccagcgaaggcgacgccttcggcctcgacttcgccatcgagaacccggccaccggcctctacgccatcggcatcgaatgcgacgccccctgccacccgctgctggaacacgcccgcgcccgggaaatctggcgcccctcggtgctgcggcgggcaatcccgcacctccaccgggtttcctcccagggctggtaccacgatggcgaaaacgaacgcgcacggctgcgcgccgccatcgagaaggccctggcgcctagcgcggaaacccatcccacggcagcagcggaggcctcccaatga

SEQ ID NO: 346400 - DNA, 981 bp, Pseudomonas aeruginosa
atgactcagtacaaacgccccgacgaagcggtgttcgcctccggtgccaaacccggcgaactggaggcattccccgacatcgcccgtggctggggcgtggctttcgagcagaccgccgggataccaccgatggagtggttcaacgcgttgttcaagcgtaccgacgaagccattcgctacctgatgcagcgggggatcgccgagtggtcggctaccgaggactacccgccgggagccctggtcagatcggctggcagcctttggtccgctcgccaggcgtccaccgggcaactgccggggagcgaatccgtttactggctggagtacggcagcaacaccattggcacctacacagccgttccgaccttgctgcgcgagcctgtcatctacgtaccgccctatggtctgatggaatggcagtcctcgcagtccggctaccgttcgcagcgctgcggcgagatcctgctgcaggctgcgccggtcgccaaggcggggacggtgaaagccaatggcggtacgttgagcaagaagaactatccaggcctgtggggctgggccatggacacgggaatggtcgtcagtgccgctgcctgggcgccgggcaatctggcgtatgccgatctgggcggagactccttcagggtgcccgacttgcgcggggagttcctcagagcctttgacgatggacgcggagtggatgccgggcggcgattcggacaggcgcagcaagcgaccgacattcctgtaatgaccgtcgcccggaaggaaagcgatcctaccacgggggtattggttaccccgttgttgtcagcggtgacgccggatggaaatggaatgatgcctaccaatgtggatggtttcaaatctggagtcagtggtccctatctggccgcctcactggcagcaggtggcacgacgggcgtttcaacctttactgctcgaccaagaaactgcgcgttgttggcggtaattttcgtctga

SEQ ID NO: 346401 - DNA, 207 bp, Pseudomonas aeruginosa
atgcgtgcaaaagactcgccccaccgcctgaaggccaagcatgatttcgtgtatgccaggccttcacataccgacaccctgatccgtagggcgaataaccgctcgcggttatccgccgcctatccggggcatcggcggataccgcctgtggcggtattcgccctacgggtctatatcgctcgtgatttcttagctatacggcagtga

SEQ ID NO: 346402 - DNA, 129 bp, Pseudomonas aeruginosa
atgctggcgctgcaaggattgtatttacagaccaccggcaaacttgtatacaataaatccatcacggcacccaccggcctgcccggtacgccgcccctccacaacaaggaacacggctgtgagcgctga

SEQ ID NO: 346403 - DNA, 1407 bp, Pseudomonas aeruginosa
atgaacgacccccagggcttcgaggccatctcgcgccgcgaacagggcctgcaacggcggctctcggccgcgcagatgagcatgatcgccatcggcggcgccatcggtaccggcctgttcatgggcagcgccttcgccatcggtttcgccggccccagcgtcctgctcagctacgccatcggcgcgctgatcaccctgctgctgatgggctgcctggcggaaatgaccgtggcccacgctacccccggctcgttcggcgccttcgccgagcactacgtcggcccgctggccgggttcctggtgcgctacgcctactgggcggccatcgtcctggcggtgggcaccgaggtcacggcggtggccatgtacatgaagtactggttcgccggtgtcccggaatgggtctggatcctctccttctcgagcctgctgatcggcctcaacgccagcagcgtgaaggccttcggcaacttcgaatactgcttctcgacactcaagatcgccgccatcgtcgccttcatcctgctcggcgcctacctggtgttcggctccgccaacccggcctacggcatgcacaactacagcgcccatgggggcttcttcccgcatggcctgaagggcatgtggatcgccgtggtggtgtcgatcttcagctacctcagcgtggagatgatcgcggtcgccgccgccgaggccgagcatccggaacaggcggtgaagtcggcgttccgctcgaccatcgtgcgcctggtggtgttctacctgctgaccctggcactgatgctggcgatagtcccgtggaaccaggccgggcagagccagagcccgttcgtcacggtgatgcaggcgatcggcctgcccggcgcgaccggcgtgatgaacttcgtggtgctggtcgccgcgctgtcggcgatgaacagccagctatacatcaccacccgcatgatgttcagcctgtcgcgcgccgggcacgcgccgaagggcctcggcgaactgagccgcaagggcgtgccgctgaacgccctgctgttgtcgagcgtcggcatcgccctggcgaccctgctcaacctggtctacccggagcagtcgttcaccctgatgatggcggtgtcgatgttcggcgcgctcttcacttggctgatgatcttcttcacccacctctgcttccgtcgccaccgcgcccgccacggcggtgcgccgctggccttccgcatgcgcctggcgccctggtcgacgctgctcggcctgctgctgatggcggcgatcctggccaccaccttcttcaccgaggcgttccgcatgaccctggtcttcggcgtgccgttcctcgcgctgctcaccgccctctacctggcgttcgtccgcaggcccggcagggattccccggtagagcgggcaacgccatag

SEQ ID NO: 346404 - DNA, 774 bp, Pseudomonas aeruginosa
atgcgcggcccgcgccgtaccgtaggcttcgcaggcggcctgggtgatcagttgcgcggcttccagcagcgggtcgctggacaggtagcggtggcgggccaggcggacgatcaggttctgctgggtgcgcgagcgcaacaggtgctgcaggtggtcgtcctgggaacgctgatagagatccagggaggccttcaggcgcaggttctgcgactccaggtcgagcaggtcgtcgctgtgctcggcgagcgccggtcgttcgtcgaccatcaggtaaccgtgcagcaactggcggccgtgctgcttgaacggttcgccgaattccagcacgtgcagcacgccgttgggcgtgtgcagcttgtagcccacctggtagtaggggcgttgcaccagttgctgctggatccgctcgtgcaggtggtggcgggcctggggctccatcaggctggcgtagggcgcatcgagcagggcgcagagcgtggtcgccggcaggccgagctggcgctcgcaggcgggatcgaggaacagcagggcccagctcggctcgttcagccgctcgaaacgcagcagcccgagccgcgatggcacggggagctgcgtgacaacctcggccgccgaacggctggcggcatcgggatgacttttcatgcgaggctgattccaggtactgagcgagggggaggcctcgacccgtttcgatggggtgctggcaaagggtgcatgatgccgattggtctgacaagtaactctgtatcggcccggcaggccccaagttaa

SEQ ID NO: 346405 - DNA, 1947 bp, Pseudomonas aeruginosa
gtgaatttcccgcatctgttcagtcccctggaaatccggggcaaacgcctgaagaaccgcatcatgtcgagcggccacgacacctcgatgcccaccgacaaccgggtcaacgaccaactggtcgcctaccaccaggcccgcgcccgcggcggcgccgggctgatcgtcatgcaggtggcgggcgtgcacgacagcgcgcgctacacctcgcacgtactgatggccaccgacgacgcctgcattcccggctaccggcgggtcgccgaggcctgccacgccgaaggctgcctggtgctgtcgcaggtcttccatcccgggcgcgagatcatggagtccgccgacggcctgctggcggtggcctattccgcctcggcctcgcccaacgaacgcttccgggtgatgccccgcgaactcgaccagccgctgatcgacgagatcgtcgccggctacgccgccgccgcgcgccgcctgcaccaggcgggactggacggagtggaggtggttgccagccatggctatctgccggcgcaattcctcaacccgcgggtgaaccgccgcacggacggctacaacggcgacctcgacgcccgcctgcgtttcctccgcgaggtgctggcggcggtacgcgcggccaccgccgaggacttcatcgtcggcctgcgcctgtccgccgacgagcgcgatcccgagggtctcagcgaaagcgagtcgctgcaggcggccgaggcggtccagggcgagctggactacctgcacatcgtcgccggtacctcggcatccctcggcggcgccatccacatcgtgccgccgatggccatcgagccggcctacctggcccgcgaagccggtaccttcaaggcgcgcctggcgatcccgctgttcgtcaccgggcgcatcaaccagccgcaggaggccgaggcgatcctcgcccggggccaggccgacgtctgcggcatgacccgcgcgctgatctgcgacccgcagatgccgaacaaggccggggccgggcgcagcgacgacgtgcgcgcctgcatcgcctgcaaccaggcctgcatcggacatttccaccgtggctatccgatctcctgcatccagcacccggaaaccggccgcgagctgacctacgcaacgcccaatccggccgcgcggcgcaagcgcgtgctggtcgccggcggcggtccggccgggatgaaggcggcggcggtggcggcacagcgcggccatgaggtagtgctctgcgaggccggtgctcaactcggcggccaggtcaacctcgcgcaactgctgccgcgtcgtgccgaattcggcggagcctccaccaacctgcagcgggagatgcaactggccggcgtagaggtgcgccgcaacaccccggtcgaccgcgcgctggtggaacgcgagcggccggacctggtgatcgtcgccaccggcgccgaaccctattggccgcctttcgagcgtggcggcgagctgcaggtggtagatgcctggcaggtcctgcgcggcgaggtacgggccggtcgctcggtgctggtcaccgactggcggggcgactggatcggtcccggtatcgcggaaaagctggtacgcgagggccaccaggtgcgcctggcggtgaatggcacccattgcggcgagagcctgccgctgtacgtgcgcgaccagttggccggcgagctgcaccgcctgggcatcccggtgacgccctatgcccgcctgtacggctgcgacgacgccacggtgtacatgcagcacagcgccagtggcgcggcgatactgttcgaggaggtcgataccctggtgctgtgccacggccaccagccggtggatcgcctggccgatagcctggcaggcctggcggaggtggtgcgaatcggcgattgcctggcgccacgcaccgccgaggaagcgatctacgaagggctcagggccgcctggagcatctga

SEQ ID NO: 346406 - DNA, 207 bp, Pseudomonas aeruginosa
atgatcaccgattattcccatcgcacagtgatacaagaggtatccccgcgggagggcctccagattgagccagtatgggtagatactgctgacaagatcgctctgattaatcagctttctttggcaggcttctcgcgcatcaaggctggttcttttgtgtcgcccaaagctattcctgccctgcgggacggcgaagaggtgttttaa

SEQ ID NO: 346407 - DNA, 1335 bp, Pseudomonas aeruginosa
atgaatatttccgccaccactattcatggcgttgtcgatgatgccggcgttgaaaaagaaattgttcgcaaagtggcctggcgattaatgccgctaataatgacctgctatctatttgctttcttcgatcgcatcaacatcagctttgccaaattccaactgcagactgatttgtcgttgagcgataccgcttatgggctcggtgcagggctctttgtcgtgggctacatgattttcgaagtgccgagtaacatgatgctgtacaaagttggtgcccggcgctggatcgcccggatcatgatatcgtggggggtcgctaccgccttgatggccttcgttaccaccgaatggcagttctacgtgctgcgcttcttgatcggggccatggaagcaggtttcgctccgggcgtgctgtattacctcacactatggtttcctcagagctatcgcggccgcatcacttctactctactcctggcgtcggcgttcgctggcctgcttggcgcccctgcctctggccttgtgcttggccacatggatggctttctggatatgcgcgggtggcattggttattcctgctaggtggtgtgccttgtgtgctactgggactggtagtgctctccgttcttaaagatcgtgtggcggacgcaccttggctaacctcagacgaaaaagcaattctgagcagcaggatcgccagccatgaaactaataaacacagctcgctgctgactgcgattaagttgccaggcttctttatgctggggataatttacttcctcatccaggtcgcctcatacggactgaatttctgggccccgcaactaattcgtagttctggtacagaaagcccagtcgcaatcggcatgctcactgctattccatatgtctgcggggcgataagcatggtagttatcggtcggctgtcggacgccagtggcgaacgtcgcaagtatgtgtgcgctctggtaattgctggagcaatcggcttcttcagtgcaggtgttttcgcgaaaaacactacgctgctaatcgtctcgttggcacttttggggacgggcatcatcgcctcgattccggcattctgggctttgccacccaagttgctggctggcgctggtgccggagcggctggaggcattgcgttgataaataccatgggccagcttggaggtattgtcagtcctgtgatggtgggctatatcaaagaccttaccggtagcacgacacctgcactctatgtcattggcgtcaccagcttggtggctgcggcgctactcttctggggattgccagaacggctgcgcaccatagataaacctagccagcagtaa

SEQ ID NO: 346408 - DNA, 1059 bp, Pseudomonas aeruginosa
atgaggagcgccttcttgagccccggacattcccactcgcacggccatcccgaccatcatcacgatcacgatcacgatcacgatcacgatcacgatcacgatcacgatcacgatcacgcctccgcgccgccatggcggcgcctgctggtcgccgccctgctggtgctgttcgtgatcactgccgcctgcctggtgcaggtacgttcgggcgaggcgatggtcatcacccgtttcggcaatccggcgcgggtcctgctcgaacccggactggcctggcgcctgccgctgccgttcgagaacgcgatcccggtcgacctgcgcctgcgcaccacctccagcggcctgcaggatgtcggcacccgcgacggcctgcggatcatcgtccaggcctacgtggcctggcaggtgcagggcgatgccgggaatgtccagcgcttcatgcgcgcggtgcgcaaccagccggacgaagccgcgcggcaattgcgcaccttcgtcggctcggcgctggagaccaccgccagcgcctacgacctggccgacctggtgaacaccgaggcgtcgcgggtgcgcatcggcgatttcgaggcgcgcctgcgcgagcagatcgacagccagttgctggcgacctatggggtcagggtggtgcaggtcggtatcgagcgcctgaccttgcccagcgtgaccctcggcgccactgtcgaccgcatgcgcgccgagcgcgagaccatcgccaccgagcgtaccgccgagggccggcgccaggccgcggagatccgttcggcggcggagcgcgacgcgcgggtgatccaggccgaggcttcggtgaaagccgcggagatcgaggcccaggcacgggtcgaggcggcgcgcatctacggcaaggcctatgccggctcgccacagctgtacaacctgctgcgctcgctcgacaccctcggcaccatcgtcaacggcgacacccgcctggtgctgcgtaccgacgccgcgccgttccgcgtgctggtcgacgggccgccgacgcttcccgccgaagcagcggccaacgggcgccggccatga

SEQ ID NO: 346409 - DNA, 516 bp, Pseudomonas aeruginosa
atgcagagccttttcctcaacggcaccgttggcgtcggcaagtccaccgtcgccgaggccctggccgggcgcctggccgggcgcggcgtggcgcatgcgctgctcgacctggacgcgatccggcactgctggccggcgccggcggacgatcccttcaacctatcgctggaactgcgcaaccttgccgcgctggccgccaactatcgcgcggcaggagcgcaacgcctgatcctggcgggggtgctcgagcgtcgcgccgacctcgcgcgctaccgcgacgcgctcggcgggggcaggctgtcgctctgtcgcctgcaggcgtcgccggaaaccctcgccgcgcgcctgcggatacgccacgccagcgatccgcaggggctcgcctggcacctgcggcgcagcgccgtactggacgcgatactgcgcgaggcggcattggacgatctggtggtcgagaccgatcggatcgccgccgatgacgtcgcgcaggcgctgctggcggcgttcggctggtag

SEQ ID NO: 346410 - DNA, 828 bp, Pseudomonas aeruginosa
atgacccctgggccgatggaggagtgggaaaagccattcttcagtgaacgtatccatgcctgcccgcgtcgcactcactcgaccagctttcaattggtggatgagcggggggatggcagcccctatgccggtctggcctatgaagtcagcgattctgaggaggttgtctaccttggtgttctggacgaaacagggacaggccgaatcaatcggcactattgcgggccggtcgttctcaagctcgctcaagcctatcaagggagtgagaagagctacacgtttttacaaaagaggccacattacccgctccccatcactgaactgcaagtgcgtgccgagaagacccgctttgtcaaccctgaaggcgcccgcacccggtccaaccccgcccaaggccaggccgattctttctgccaggtcgaggtgagcgaactggtggagcaccgggcccatcttccgcccctggcgtcccggtactttccgccccggcaccaggtgcatgcgctgatgcgccgtccctcggccgccatggcggagttgggatttgctcccaggcctccccgggttcgcggtatcgcgctgttgccgaaccggcaccatgtgctggaggtgcgccccttgcgggcgctgagtccactcctgtccacgggcgaagcgttctgctacctcaacctgtaccagttggcgctgatgtcgaccctgagctatagcccgtttggccaggaacccgatacgcaaccggtggaaaccgacagcgtgagctttccggcgcaacccagcgtcggcaactggttcggcgatgccctggccaggtccgatgagctgtga

SEQ ID NO: 346411 - DNA, 960 bp, Pseudomonas aeruginosa
atgcaatcgactcgcaagctgctggccggcctcgcgctggccgcttccgccgggctggtccaggccgcgccggaagtacggatctacaactggttcgactacatcgccccggacaccctgaagaacttccaggcgcagaccggcatcgcgccgaagtacgacgtctacgacagcaacgaggtgctcgaggccaagctgctgtccgggcactccggctacgacctggtggtgcccagcgacagcttcctgcccaactatctgaaagccgaggtgttccagccgctcgacaagagcaagctgccgaactggaagaacctcaacccggcactgctcaaggtgcttgccggcaaggaccccggcaaccgctacgtgatgccctacatgtggggcaccaacggcatcgcctacaacctcgacaagatccgcgcggtgctcggcgacgatgcgccgctggattcctgggacctggtgttcaagccggagaacctggcgaagctgcgcccgtacatcacctacttcagttcctcgaagttcgtcagcgacctggccaacggcaacgtctgcgtggccatcgcctggtccggcggagcgatgcaggcggccaaccgggccagggaagcgaagaacggcatccgcatcgagtaccgcatcccgaaggagggcgccgcggcctggttcgacgtgctggcgatcccgcgcgatgcgaagaacgtcgagcaggcgcacgccttcctcgactacctgctgcgcccggaggtggtggcgccgatctccgactacgtggcctacgccaacccgaacaaggcggcggacggtttgatctcggcggagttgcgcgacaacccggacgtctacccgccggaagaagtgcaggccaggctgtattcggtggaaatgctgccgccgaagctggagcggctgcgcacgcggacctggagcaagatcaagaccggcaagtga

SEQ ID NO: 346412 - DNA, 642 bp, Pseudomonas aeruginosa
atgtactctaggtcgcgtggatttaccctggtcgagctgatggtcattgtcgtgcttttggctgtcatggtcgcgtttgccgttccgtcttttgtgggcctcataaaaggcaatagcatggcctcggcacgcaatgacttgcagaagagtctcgattatgcgcgggcgatggcaatgacaaataaggcaggcgcgcaggtttgtgtggctgatggggtgataaccatcagtcaagcagacaaggccgaaagatttattgcaagagagcgcactggcagcaacaacgttaagattgttgaatacggttacaaatatgaatgggccgtagtcagcaagctttcgtctagcgaatacaaaactattggctctaatggtcttgagtccggttgtgtcgtatttgccaacaatggaaccatacctgctcttgctaaacgtaagaccccccctctggggcaggatggaaagtgcagtacgagtggtggagggagttcgttcgtatacacggatggatttttcggaaagtctgagggagctgcaagtccagagtggcagattatatttaatagcgctggccagtatacggtaaagcctaaaggggcggacctaacaggagaggaatcttgggatacatttggctgctag

SEQ ID NO: 346413 - DNA, 225 bp, Pseudomonas aeruginosa
atgaacagccaaagcgtacccaaggacttccgtgaccaggcgcgccgcgcaccgccagcgaacgcctggcccggcttgcgcgccggcgccctcgcctaccgccagggctatcagcgcctcgacagccaggtgatgcccaccgtgatcatcgtccttgtgctgctggtcacgttgatccagttcggcggcgaccgcctggcccgcctgctgaacaaacgcctgtag

SEQ ID NO: 346414 - DNA, 813 bp, Pseudomonas aeruginosa
atgtccagggtcaccgtcgcctgctgccagatcgcgccgcgcatcggcgagcacgaattcaacctgcgcctggtcgaacaggcgatccgcgaggccgcgcgacgcggcgcgaatgtcgtggtgctgcctgaactggccaccagtggttatgtcttcgccgatcgcagagaggccctggccctggcggaaacccgcgaagggccgagcctggcgctgtggagcgcgctggccggcgaactcgacctggtggtggtcggcggtttctgcgagcgcctggacgaaggccgggtagccaacagcgccgccctggtcgacgccgacggcgtgcgcgcgctctaccgcaaggcccacctgtggaacgaggagggcgctatcttcgaggccggcgaccagtcgccaccgatcgtcgccactcgcttcggacggatcgcggtaatggtctgctacgacctggagtttcccgagtgggtacgcctgccggcgttgtccggtgcgcaactgctctgcgcaccggtgaactggccggcggcgccgcgcccgctgggcgagcggccagcggaggtggtcagggtccaagccaacgcctcggtcaaccggatgttcatcgccgcctgcgaccgttgcgggcaggagcgcggggtggactgggtcggcggctcggtgatcgtcgacgccgacggctacccgctggccgggccactggtgggcgaggagggcatgctgctggccagtctcgatctcgccgaggcagacgagaagcgcatcagccggcacaaccacgtgcaccgcgatcgccgcccgcagctgtattga

SEQ ID NO: 346415 - DNA, 1224 bp, Pseudomonas aeruginosa
atgggacgtcgcgaagcgtttccggagactaccggggccaatgcgtcggccgtggcgccgcggctgccgctgagcgcgctgctggcgatggcgatgtccggcttcgtcgccattctcagcgaaaccctgccggccggcctgctgccgcaaataggcgcggggctggcggtcagcgaggcgctggccgggcaactggtcagtgtctacgccctgggttcgctactggccgcgctgccggcggcgagcctgacccagggctggcggcggcgccgggtgctgctgctggcgctgctgatcttcttcgtctgcaacagcttcaccgccgtctccacggattatcgcctgaccctgctggcgcgcttcggcagcggcgtcgccgccggcctcgcctggggcctgctggccggctacgcgcggcgcctggtgccgccggaacagcaggggcgggcgctggcggtggccatgctcggtgcgcccctggcgttgtcgctcggcgttccgctgggcacctggctgggcggcctgctcggctggcgctgggccttcggcctgttgtcgctgaccgcgctgctgctggtcggctgggtgctgcgcagcgtgccggacttccctggccaaccggccgggcggcgcctgcgcctgctcggggtgctgcgcacgccgggcgtgcgcccggtactgctggtgatcgtcgcctgggtgctggcccacaacatcctctacacctatatcgcgccgttcctcgccaaggtcggcctgggcgcctcggtggacctggcgctgctggtattcggcagcgccgcggtggcgggaatctggctggtcggcgcactggtcgaccggcacctgcggcggatggtcctggccagcctggcgctgttcgccgtggcggcgctggcgctgtgcctgggcgctcgctggagctggctggcgttcgccggcctggccatctgggggctgacgttcggtggcgcggcgacgctgctgcagaccgcctcggcggacgccgccggggagggcgccgatctggcccagtcgatgatagtagtggcctggaacctggccatcgccggtggcggagcgttgggcggcatgctgctgcagcgctggggcagcgagatcctgccctggaccctgctaccgctgatcggcctggccgccgcgctggcctggggcaatgccgagcacgctttccgcgttggcccgcgcagaggtgacgagtag

SEQ ID NO: 346416 - DNA, 621 bp, Pseudomonas aeruginosa
atgtgcggtttcgaacaagggccagggcgcagcctggcggaaaatgtcgatcaggcgatcgaggcggcagtcgccgaccagcgcctggtgggggcggtggtgctggtggcgcaccgggggcagtggctctatcggcgggccgccggcctggccgaccgcgaggccggccggatgatgggcgaggacagcgtcggcatccgctgcgagccgcgtcggaccttcgaaccgtctgcctatgcgtccggcggagcggggatgatcgacagcgccggcgacgtgctgcgccttctggaaatcctccgccagggcggcgcgccgttgctgacgcctggcctggtggaggagatgggacgcgaccaggtgcccggcatggaactgccggccaatcccggtttcggcttcggcctgggcttctccgtgctgcgcgacccggccatcgcgcaatcgccggagtctcccggcacctggtgctggggcggcgcctatgggcattcctggttcgtcgaccggacccgcgaactgtcggtggtggcgctcaccaacaccctgttcgagggcatgtcgggacgcttcgtcaacgacctgcgcgacgccgtctaccgttccgcggaggtgcgctga

SEQ ID NO: 346417 - DNA, 1302 bp, Pseudomonas aeruginosa
atgagcctggatgtgtttcgccaggggcaggtgtggaaggccttgcaggagcagaacgctgcgcagactgaggccttgcatgtcggcagcatcctgccgatggacccgaagaagtatccgacgtccgcggatgacaaggacatggcgtatgagaagcgccaagcggacgccttagagctggggctgaaaaacttcctagagaaatggccgataccgacggtgacggtggtgcgtggttgggattcgaacacgcctaacctacgcttcactcccgaagaaacacgggaaagcctgtcggtaaaagtcaatgatctccgtgttccggcggggctgcattggcaccgtattgctaacctgcaagatggcatcatctgcaacgatacccccgagggggtattagaaaccttgttccgtctgttcgagcatcatcctgatctgcctgcggtactggtatatgccaacgaagggatcaatatggcatgggccttatcgagtaaaaatgtctctgggaagtctttaggaggaggttccggacctcgcgtgtcgggagctctcacagacaccatggtcgccctgatcgtcggccgccccgagcgggtcgactggctacgccagttcgccccctacaccaaggttaacgaaaaccggatcgaccccgaattccgtggctggggctggcgcaagccgccggtggagttccgccccacgcggttcattcctcagccctggaccgcgcgcgccctggagcagtgggatgcgttgccggtattggccaggctgcatcggccggtgagtgtgccgctgacccgcccggacaccggcgaacgcctcaagcgcgaagccctcaccgcgcaactggccgctgcctggaagacggccagtgccgggctgaggccggcgcccgcccggctgttctacgacggtgggctgaacaccacgccgctggccgaactcaccccggcgctgggcgccgcgcagagttcgctggacttgctggacttgctggacttgctggactcgcgggaaagctacgacctgacccagcgcctgggcgacaccggcgccgcctcgcccttcgtcggcatcgccctggcgaccatggccagctacctcaacggcgacagcagcatggtgatgccgttgcggcgcaaggaccaggcgaccctgatcggcatcagctcgccgaccccggggaagaagcccgctcacgacccgttcggcgtcgacctgctgccgcagaccgccagtcgactaacgacccggttgccgcccggcgaagactatgccctggaagagttctga

SEQ ID NO: 346418 - DNA, 270 bp, Pseudomonas aeruginosa; identical to SEQ ID NO: 324403

SEQ ID NO: 346419 - DNA, 1623 bp, Pseudomonas aeruginosa
atgcggttgtcgccggccagcgccgagagatggcccttctggttgcgcacgccttgctgggcctggatctccagcgactgcgcctgggtgatgccggcgctgttgtcgaacagcccggtgagcagcttcagccagcccttggcgctgttgagcacgccgccggcgccgttgtcgaggctggcgctctgcaggtcgaggttgccggcccggctgtccagacggccgccccggttgtccagcgcggcgtcgaggcgcaggcggttgtcgccctgggcctggagcgtgccctggcggttgtccaggcggccggcccgcacgtcgagggcgccggcctggctgaagaccaggccgtcctgctggttgcgcagggcgccctggcccaggcgcagggtcatgtcggcctggctggcgagggtgccggaggcgctgttgtccaggccctgggcgaagagttccagcagcccctggctgaccagcttgccgccgcggttgtcgacgctggcgctgcgcagcagcaggtcgccgccgctggccaggcgcgcgccgccggtattgaccagggcgccgccgaggagcgcctcgagccggccctggctgatcagctggccgccgctgttgtccaggctggcgcccgtgagcagcaggctgccgccgttgacctggccgccggcgttggtcagcaccgcgctggcgcggtcgaaggtcagcgcgcgctgcgccgagatcagcccgccctggccgttgtccagcttcccggtgatgctcagggtcacgtcgctttcgccggagacgatgccgccggcgttggccaggcgggcggcggcgatccgctgcgcccccttgctgaccagggcaccctggccgtggttgtccagcgcgccggcgaggctgaccgccagctcgccgttcttgctcgacagggtgccgccggcgctgttgtccaggctgccgccctcgaccgccaggccttcccagccggagaacaggccgtcaccggcattgcccagctggtcggcgaccaggcgcagcttcccggcgctgatgatgcggcccttctggccgttgtcgatgcgactggccagcagctcgaagccctgctggctggaaatctcgccgccctggcggttgtcgaggacattcagccgctcgatgctcagcggaccgcgggcgctgatcaggccgccctggttgtccaggtcgccgccctgcaggtcgagacggacgccgcgctcgccgatcagccggccctggcgttgcagcaggcgctcgacggtcaggcgcaggtcgcccctggcggagatttcgccaccgtcggcggaatcgacgcgccctgccgtcagttccagttcgccgtcgctggtgagcaggccgccgcggttgtccaggttgccggcgcccagcgtcagcgactgcttgccactgagggcgccgccacggttgtcgaggtcggcgctgctgacatcgagggcgccctggctgaccagctggccaccctgggcgttgttcagcgcgccagtggcgacgctcaggccggcgttgccggagagcaggcccttgccgctgttgtccagggaggcgctggcgagcgtcaggcgggcgccggaaacggtgccttcggcgtga

SEQ ID NO: 346420 - DNA, 645 bp, Pseudomonas aeruginosa
atgggcgtgaacccgaacatctccgagtccctcaccggaaccatcgaagccgccttcccggagttcgaggcgccgccggcgaaccccatgcaggtcctgcgcaactggctggaacgcgcccgccgctatggcgtgcgcgagccgcgggcgctggccctggccacggtcgacgggcagggccggccatcgacgcggatcgtggtgatcgccgaactcggcgagcgcggggtggtgttcgccacccacgccgacagccagaagggccgcgaactggcgcagaacccctgggcctcgggagtgctgtactggcgcgagagcagccagcaggtgatcctcaacggcatcgccgaacgcctgcccgacgcacgcgccgacgcccagtggctgagccgcccgtaccagacccacccgatgtccatcgcctcgcggcagagccagaccctcgccgacatccacgccctgcgcgccgaggcccgccgcctggccgaaaccgccggcccgctgccgcgcccgccgggctattgcctgttcgagctgtgcctggagtcggtggagttctggggcaacggcaccgagcgcctgcacgaacgcctgcgctacgaccgcgacgagggaggctggaagcaccgctacctgcaaccgtga

SEQ ID NO: 346421 - DNA, 1884 bp, Pseudomonas aeruginosa
atgaacggcctgcccccatcgctgctgcaacgcctgctcgagcggccggcgccgttcgccttgctctaccgtccggaaagcaatggcccgggcctgctcgacgtgatccgtggcgaggcgcacgagctgcgcagcctggccgagctgccgctggacgagcccggcgccggcctgccgcgccacgacctgctggcgctgattccctaccggcagatcgccgagcgcggcttcgaggcgctcgacgacggcgcaccgctgctggcgctgaaggtcctggagcaggagctgctgccgctggaacaggccctggcgctgctgccgaaccaggcgctggccctggacgaggaaggcttcgacctcgacgacgaggaatacgccgaggtggtccggcgggtcatcgccgacgagatcggccgcggcgaaggcgccaacttcgtgatcaagcggcgcttccaggcgcgcatcgacggctacgccacggccagcgcgctgagcttcttccgccagttgctgctgcgcgagaagggcgcctactggaccttcatcatccacaccggcgaacgcaccctggtcggcgcctcgcccgagcggcacatcagcgtgcgcgacggcctggcggtgatgaacccgatcagcggcacctaccgctatccgccgagcgggccggacctggccgaggtcatggaattcctcgacaaccgcaaggaagccgacgagctgtacatggtggtcgacgaggaactgaagatgatggcgcggatctgcgaggacggcggccgggtgctcggtccctacctcaaggagatggcgcacctggcgcacaccgagtacttcatcgagggccagagcaaccgcgacgtgcgcgagatcctgcgcgagacgctgttcgccccgaccgtcaccggcagcccgctggaaagcgcctgccgggtgatccgccgctacgagccgcaggggcgcggctactacagcggggtcgcggcgctgatcggcggcgacggccagggcgggcgcacgctggactcggcgatcctgatccgcaccgccgagatcgaggccgacggtcgcctgcgcatcggcgtcggctcgaccatcgtgcgccactccgatccccgcggcgaggccgcggaaagccgcgccaaggcctccgggctgatcgccgcgctgaagagccaggcaccgcagcgcctgggctcgcatccgcacgtggtggcggcgctggccagccgcaacgcgccgatcgccgacttctggctgcgcggcgccagcgagcgccagcagttgcaggccgacctctccggacgcgaggtgctgatcgtcgacgccgaggacaccttcacctcgatgatcgccaagcagctcaagtcgctgggcctggcggtgagcgtgcgcggcttccaggagccgtactcgttcgacggctacgacctggtgatcatgggccccggcccgggcaaccccaccgaggtcggccagccgaagatcggccacctgcacctggccatccgttcgctgctcagcgagcgccggccgttcctcgccgtgtgcctgagccaccaggtgctgagcctgtgcctgggcctggacctgcaacgccggcaggagcccaaccagggcgtgcagaaacagatcgacctgttcggcgccgccgagcgcgtcggcttctacaacaccttcgccgcgcgcgccctgcaggaccgcatcgagatccccgaggtcggcccgatcgagatcagccgcgaccgcgagaccggcgaggtccatgccctgcgcgggccgcgcttcgcctccatgcaattccaccccgaatcggtgctgacccgcgagggtccgcgcatcatcgccgacctgctgcgccacgcgctggtcgagcggcggccctga

SEQ ID NO: 346422 - DNA, 624 bp, Pseudomonas aeruginosa
atgagcggcattcccgaaatcctcgcctatcccttgccgaccgccggccagttgccggccaacctggcgcgctggaacctggagccggcgcgcgcggtgctgctggtgcacgacatgcagcgctacttcctgcgcccgctgccggcgagcctgcgcgccgacctggtggccaacgccgcgcggctgcgccgctggtgcgccgggcagggcgtgcagatcgcctacaccgcccagccgggcagcatgaccgaggagcagcgcggcctgctcaaggacttctggggcccgggcatgcgcgccagtcccgccgaccgcgaggtggtcgaggagctggcgccggggccggacgactggctgctgaccaagtggcgctacagcgccttcttccactccgacctgttgcagcgcatgcgcgccgccggccgcgaccagctggtgctgtgcggcgtgtatgcccacgtcggggtgctgatctccacggtcgacgcctactccaacgacatccagccgttcctggtggccgacgccatcgccgacttcagcgaggcgcaccaccgcatggccctggaatacgccgccagccgctgcgcgatggtggtcaccaccgacgaggtgctcgcatga

SEQ ID NO: 346423 - DNA, 1218 bp, Pseudomonas aeruginosa
atggacgatctattgcaacgcgtacggcgctgcgaagcgctgcagcaacccgagtggggcgatgcgtcgcggctgcgcgaggtgcaggcgtacctgcgcggcagcccggcgctgatccgcgccggcgacatcctggccctgcgcgcgaccctggcgcgggtggcgcgcggcgaggcgctggtggtgcagtgcggcgactgcgccgaggacatggacgaccaccatgccgagaacgtggcgcgcaaggcggcggtgctggaactgctggccggcgccctgcgcctggccggcaagcgcccggtgatccgcgtcgggcgcatcgccgggcagtacgccaagccgcgctccaagccgcacgagcaggtcgacgggcagaccctgccggtctaccgcggcgatatggtcaacggccgcgaggctcacgccgagcggcgccaggctgatccgcagcggatcctcaagggctacgcggcggcgcgcaacgtcatgcgtcacctgggctgggacgccgcttccgggcaggaggcgaacgcctcgccggtgtggaccagccacgagatgctgctgctcgactacgagctggcgatgctgcgcgaggacgagcagcgccgggtctacctcggctcgacccattggccgtggatcggcgagcgcacccgccaggtcgatggcgcccacgtggcgctgctggccgaggtgctcaacccggtggcctgcaaggtcggcccggagatcggccgcgagcagttgctggcgctctgcgagcgcctcgatccgcgccgcgagccggggcgcctgacgctgatcgcgcggatgggcgcgcagaaggtcggcgagcgcctgccgccgctggtggaggcggtgcgcgcggccgggcacccggtgatctggctgagcgacccgatgcacggcaacaccatcgtcgccccctgcggcaacaagacccgcctggtgcgcagcatcgccgaggaggtggcggcgttccgcctggcggtgtccggctccggcggggtggccgccgggctgcacctggagaccaccccggacgacgtcaccgagtgcgtcgccgattccagcggcctgcaccaggtcggccggcactacaccagcctctgcgatccgcggctcaacccctggcaggcgctcagcgcggtgatggcctggtccggcgcgcaggcgatcccgagcgcaaccttccccctggagaccgtggcatga

SEQ ID NO: 346424 - DNA, 444 bp, Pseudomonas aeruginosa; identical to SEQ ID NO: 324372

SEQ ID NO: 346425 - DNA, 792 bp, Pseudomonas aeruginosa
atgcagttgctgagccagtccaccggcgacagcaaccgagccatacgcgaaatcggccagatcacatggcgggagttcagggatgacccggacgttggtcgccggctcccaacccatctggagaagctcgaggggcgcttgaaccaccagcaatgggctattgatagtcagctcgaagcggatccagcggcagagttcggcatccgaactctgcccgatctacctcattcaaccccgagttcggatgccgaacccagacagaatccgccgagtacacccttggttcggatgccgaactcatatagtacgtatacatacaaacaagattctgtatgtaaaaagccagtacaaccgcgagcacgcgaggacgcacatccgaactggcaggatctcctgaacggactggaggccgagcaacggatccaagccgtaagcgcgctccgacgggtgtccgaggagctgcgtcatccggtcatcgagcagtggcggcaccgatgtgcgggaggaactgtcggtaaccccttcggctacctcatgacgctcatccagcgtgcagtccagggcaagttcaacgcctcttgggctccggaagaagcggctgaacgaaccatcccagcagcggaacgccccagtcgtgctccggcaccatcaagccccacgacgcctacacagcctcagattcagccaaagggagacacccggacagggagcgaggtcctcagccggctcaaggacctcattcggcccaggcacggattgagcgtgccatccgagcggggtgatgagccatga

SEQ ID NO: 346426 - DNA, 1920 bp, Pseudomonas aeruginosa; identical to SEQ ID NO: 324443

SEQ ID NO: 346427 - DNA, 759 bp, Pseudomonas aeruginosa
gtgaagacgtcggtcaaggtccgccactacgtgcctgacgcagtcgtctccagctatgcgaataccgggagcaacccctggaccgaggtgtcggcgctgggcacaccgaatcccctcgcccaggccggcaatgacgcgaccaccaactacaaggccgagaacagcatcggccgcttcaaggaagcggatgtgatcggccatcctggcggggccacgttcagccggttcgccagcgcctctgggtacgtttgccctggtgccaccttcccgctggtgccgtacttcctcagcacactggacgccattggctggcggcatggaattcccgagcaggtgtaccccgaagcgttggtcccagggctgcgcgaggtggggggagtcttctccggcgacatgtgggggaacctctatccgcgcagcggattcctgcaccagaccgacgactacaagacggcagccgtcatcgcccagcgcgccggcgacatcaccacgcgagtcggccaactccacgtctaccttcccatgcgcgcagcccccaaggacggctactggccggcgggcgagctgaaagagggcgatgcctcgaccgggaaatggcaggagctgaccccgtccctgagcctcaactgcgcggtgtttcccaactcagggccgaagacgcaagccgtcgacggcgattacgcctgggcgctctggcgtccctactcctgctgccagcgcaaggggcagatcttcctcggcagtaccgacttccaataa

SEQ ID NO: 346428 - DNA, 273 bp, Pseudomonas aeruginosa
gtggtcggtacgctgctcagcctcttcgccctgaaccacttcggtggcatccagggcctggaggcctggcggcaaagcaactactggagtttgttcgcctggcgggcgctgctgtactgcgccctggccatcgcctggttccggctcaagcagcgcaaggaactgagcgcgcatgagcggcagcgcattcggcggatcgagatcctggtgctgttgctggtcctgctcatcgaattcagcaaagcctacttccgcacgggaggcgcagcatga

SEQ ID NO: 346429 - DNA, 867 bp, Pseudomonas aeruginosa; identical to SEQ ID NO: 323751

SEQ ID NO: 346430 - DNA, 1278 bp, Pseudomonas aeruginosa
gtgggcattcagaaagcgaaagcctggtatgaggaggagaaaggagaaccggtcggcatccgcgagctatctcggaagctcaccgatgacggctatcctgtttcaccctcacacatcagcaagatgttggatgccgttgagatactgctgccagccatccctgtgatgctgtattcgggactcggcaaacctcaaatcgaaaaactcctgtcactcagaaagtcagcctcttcctgctggacacgtctatacgccggcgaaggcatcgacttcgagatgctgttccaggacaccctggcaatcttcgacagtagccctgacgaattcatattcgaccgattccaggacgaactcatcgaccagatgaagcgtcccttgggcctgcgttatgaccagatcctgctcgagatcaccaacgggcagcaggaacaacgccgcagcactctggtcgacctgcccacacctgccgggccacctgaaattccaccagttgggcaggaaaaccctgctgcgtcgtctactgggcaagcacaaatacagagccccgctaccggcctccaaacgtccaagaccaagagccccccgggtacatctaccctgccagctccgccgccaccagtccaacaacagcaactgaccgacgaggagcgtgcagcggtcttggcaggccatatcgtgagcccggtatcgaccaggatccagcagactcgccaacggcttgccggccttgagggtgaacatctacctgtcttcgatgaaacagccctgcaggcaatcccagtgcaagtcggcggtctgcacccgatcaccgacctctggtacatcgagcggtcgatcgatacccccgagatcttgcgacagcacatcgctgacctggctgaagagatcgctctgcacgtcggcgccccaggcgagatcgtcaggattcagggcggtgtgggttacacgtatcgcgagcccaatgaagaccgtgagattactgattcagcgctgcacctcatgacgttgcttcaagcgctcagcggccaggtccaagtcgttctgaacactcacgatcaacagacctgccgcgatgcactgggtgaattccagttctcagctggcctagctcagttgctgctgggccaacccaccacaagcgatcagccatccagccaggcaggccgtctcaatgacgaagccctggtgaaactgttccggatcattcgtcttgcccgacgcctggttgaccttgagctgccgccgaccgccttcgagcaagcagctaccgaccagtga

SEQ ID NO: 346431 - DNA, 885 bp, Pseudomonas aeruginosa
atgatccggaagtcgagagccacgctcttgctgatgcttgtcctacccgcactggcacaagcggtggagattctgcgctgggagcgcattccgctggccattccgttgacggtcggccaggaacgcattgtattcgtcgacaggaacgtgcgagtcggcgttcctcgggacctgcagggcaagttgcgcgtccagagtaccggcggcgcgctctacctgctcgccaacgagccgattcctccggcgcgcctgcgtctgcaggacgcgaccaatggcgagcagatgctcatcgatatcgccgccaccgaggcagcgaccgaccaacagccgcgcgagccggtcaggatcgtcgccggcgagcccgtggctccgcactatggccagtcccgggaagcccagccatcggcagcagcgaaacagaccgagcaggcagaagcaccgaaggccgtgccgcgcgaaacgcccgtccccgtggttctgacacgctatgcggcgcagatgctctatgccccgcttcgcacggtggaaccggtggatggcgtcggtcaggtgcgcgtcaagcgacagctcgacctgaccaccctgctccccagcctgcccatcacggctaccgccttgggcgcctggcggctggacgactactacgtcacggcggtgaagctgcagaacgccagcgcccagcacctggccctggatcccagggacctgatgggcaatttcatcgccgcgaccttccagcacccgtacttgggaccccggggcgacgcttccgacaccacaaccgtgtatctggtgacgcgcggccgcggccttgccgacgcgctcctgccctcctccatcagccagatcgatcccaaaggaggccgtcgtggcgctgaccggtaa

SEQ ID NO: 346432 - DNA, 378 bp, Pseudomonas aeruginosa
atgtccaccaccagggcgccggagtcggccgaggtgacgaagaacaccaccaccatcagcaccgcgaacagggagaccaggccgctcaggggaaaatggtcgaagagcgcgaacagcgccagcgagctgtcctggttgaccacctcggcgagctgggtgaagccatcctggaggatcatgtggatcgcggtgtcgccgaacacggtcatccacagcagggtgaagccggcggggacgaacagcacgccgcagacgaactcgcggatcgtccggccgcgcgagatgcgcgcgatgaacaggccgacgaagggtgaccaggagacccaccagccccagtacagcagggtccagccgccgatccagtcggtgggctcgtag

SEQ ID NO: 346433 - DNA, 807 bp, Pseudomonas aeruginosa
atggtcgccctgatcgtcggccgccccgagcgggtcgactggctacgccagtacgccccctacaccaaggccaacgaaaaccggatcgaccccgaattccgtggctggggctggcgcaagccgccggtggagttccgccccacgcggttcattccccagccctggaccgcgcgcgccctggagcagtgggatgcgttgccggtattggccaagttgcatcggccggtgagtgtgccgctgacccgcccggacaccggcgaacgcctcaagcgcgaagccctcaccgcgcaactggccgccggctggaggacggccagcgccacactgacaccggcgcccgcccggctgttctacgacggcgggctgaacgccacgccgctggcggaactcaccccggcgctgggcgccgcgcagagttcgctggacctgctggactcgcgggaaagctacgacctgacccagcgcctgggcgacaccggcgccgcctcgccctttgtcggtatcgccctggcgaccatggccagctacctcaacggtgacagcagcatggtgatgccgttgcggcgcaaggaccaggcgaccctgatcggcatcagttcgccgacgcctgggaagaagcccgctcacgacccgttcggcgtcgacctgctgccgcagaccgccagcggcgacggtccgccgtcagcggccgcccctgcggcgcccgccagtcggctcgctacccggttgccgcccggcgaagactatgccctggaagagttcctgagcagcctcaaacccggtaccgactggctggacgacctgtag

SEQ ID NO: 346434 - DNA, 633 bp, Pseudomonas aeruginosa
ttgaccggcgctgcgcgagaaatacgcaagctgactggtggcggtaccgacctgttcgggaagctgggtggctacttgagcttcgaacaaaagcagctcctacaagacgctgcgcgtttgctcgactcggtgaacaagcagatcgagcatgcgaaggaaaagcgtgatcgcgacgagaaacaagccaagaaacggcgtgagctgcgtgggcgcctggccaagcaactggtcgcctcgaactacccgcttccggcaaacacgctcgaagagcggctggaaatactgcagatcgcgctgatctacaaccgggccaaggtgttcgatcccctgtactccacgcaccagctccactcaaaactcaaacgctggctggagcgtcccaagcagctcatcgggtggcgcagtgaagccgagtatttcgctagtcaggtggggagcctgcgatgtgacttcattagccacctgactaacgaaatcgcctacgacgatggcagtgaagtcgaggagcgcctgcgcgtcatcaagcagacggtcgctgactgcaccgcacagatcgctctgaccagcgaggagcaggaaacccttcggctctggaaagacgctctgcaatcggctccggagggcctcatatga

SEQ ID NO: 346435 - DNA, 732 bp, Pseudomonas aeruginosa
gtgacccgggcgggctacaacctgttgaccagccgctcagtgaatgactcgtcgagcgtgccttccgccacttgcaacaacggcctggtctgcaacacctggtcctccccccaggaagccgccgcgttcgccacccgggttctgggcgaacaacagcaacagacctgtgaaggctgtcagaagacggtgacggcggcaggcgtcggcctgaccccgctgatccaagagacctacgacaagaagctccagtcgctgcaggagctgctgtcgaaaagtaagccactgaccgccgagaacctggctgcggccggcaccgatgccttgccgatcacccgcggcgtcatcgaggcgctgcgcgacgagcgtgaccaggacgtcctggcgcgccgcctggcgtccgatgtctccctgatggacgtgctcagcaaggccctgttgttgcagcgcctgatgttcgccggcgccaaggagcccaacgtcgccgccaacggcctggccacccaagccgtcgatcagcagaccagcctcctgcagcaggagatctccaatctcaagaccgaactggaactccgtcgcgagttggccagcaattcgcccatgcgggtcatcgagcgcgggcaacagcgcgcctcagggtccagtggcgtgttcgagtcggcgcccgatgccgatcgcctcgatcgcctgcaggccccctctgccgccgacggcaagacgggagggagaccgtga

SEQ ID NO: 346436 - DNA, 246 bp, Pseudomonas aeruginosa
atgcaaggcctcggcctgtaccgcattctgctcctgcaaggccttccatacctgaccctggcgaaacacatccaggctcatgcctatgctgagcacatccagggtttccaggcgcggcgaagttttcggagcgtgataagcatcagcggacatagcggcctccttggccggggcgtaggcggtaacggacgtcgccggactggcaaagcagcgcatcgcggaaaagtccgtaccgttcgcctgtga

SEQ ID NO: 346437 - DNA, 291 bp, Pseudomonas aeruginosa
atggccagctacctcaacggtgacagcagcatggtgatgccgttgcggcgcaaggaccaggcgaccctgatcggcatcagttcgccgacgcctgggaagaagcccgctcacgacccgttcggcgtcgacctgctgccgcagaccgccagcggcgacggtccgccgtcagcggccgcccctgcggcgcccgccagtcggctcgctacccggttgccgcccggcgaagactatgccctggaagagttcctgagcagcctcaaacccggtaccgactggctggacgacctgtag

SEQ ID NO: 346438 - DNA, 222 bp, Pseudomonas aeruginosa
atgatccggcagctcaacgccctcgaggacaccgcccaccgcagtgcccagggtgccgatgagcccggacagcgcttctacttcgactactcgcgcctggccgctgatctgcagcgcatccgccaaggcctgcaggactacatgacgcccagccgcgcccaaccgcgtgacccttccgacctatctggggattacaccctgcgcggagggccgatgccgtga

SEQ ID NO: 346439 - DNA, 222 bp, Pseudomonas aeruginosa
atgatccggcagctcaacgccctcgaggacaccgcccgccgcagtgcccagggcgccgatgagcccggacagcgcttctacttcgactactcgcgcctggccgctgacctgcagcgcatccgccaaggcctgcaggactacatgacacccagccgcgcccagccgcgtgacccttccgacctgtccgggaattacaccctgcgcggagggccgatgccgtga

SEQ ID NO: 346440 - DNA, 198 bp, Pseudomonas aeruginosa
atgtcagatcgctggttgtcggtcgaggagatcgcagagtatctcggcgtcagcaaggacaccgtctatgcatggatcagcaagcggaacatgccggctcaccgtatcggccggctgtggaaattcaagaccgaagaagtggatgaatgggcccgttctggaggggcggcggatgccgagagcaagggcaaggaatga

SEQ ID NO: 346441 - DNA, 459 bp, Pseudomonas aeruginosa
atgtcgcgcattcagccctcgtcccccgagaccagtcgccgcatggcgaaggttcggcagaagggaaccgatgccgagatcgcattgcgaagagagctttaccgaaggggcctgcgttaccggatcgactacgaggtcctgaagaaacctcgccgcgtcgcagacgtggcatttccgggtttgaggatcgccgtcttcgtcgacgggtgcttctggcacgggtgccccgagcatgccacctggccgaagcagaacgccgagttctggcggcagaagatcgagacgaatcgcctcagggacgccgacacgaattcgaggcttctcgaagtcggttggacggtactgcgattctgggaacacgagtccccgatcgaagccacggaaaccgtcgcacaggcggtcgccatggcgagagcgaagcactgcacatcgcctgctggcgcgcacaagaagaactga

SEQ ID NO: 346442 - DNA, 3141 bp, Pseudomonas aeruginosa
atggaaatctcgaacgatcagaagcaccacacctaccgtacccgtccggagcccggccagctggtcgaggttcgccggcgccagtgggtcgtggcggatgtcgcctcctcgaaattggaatcggcttcggcgtcgcagaactgcgtgacgctttcttccatcgacgaggacggcctcggcgaagaactggaagtcatctgggagatcgaacccggcgcacaagtcatcgagcgtgcgggcctgccttccattaccgggcaagaccactccgacacgctcgaagccttcctggatgcggtgcgatggggcgccgccaccaatgcagaccgagggtttctgcaggcaccgttccgcagtggcgtcagcatcgaggactttcagctcgatcctttggtgcgcgccatcgacatggcgcgcgtcaacctgctcatcgccgacgacgtcggcttgggcaagaccatcgaggcggggctggtgatccaggagatgctgctccggcaccgtgcccgcaccgtcttgatcatctgtcctgcatcccttcaggagaaatggcgcatcgagatgctggagaagttcggcctcgacttccgcgtggtcgacactgcctacatcaagcaattgcggcgcgaacgcggcatccacgccaatccgtggacatctcatccgcgcctcatcgcctcgatggactgggtcaagagtggcgaggggctgcgcgccatgcgcgatgtcctgccgccccatgccggccatccgcgcaagttcgatctactggtcgtcgacgaagcgcacaacatcgcccccgccgccggcgcgcattacgccctcgagagtcagcggacccgcttcatccgcgcgatcagcccgcatttccagcatcgcctgttcctgaccgcaacgccgcacaacggctacaccgagtcgttcacctcactgctggagttgctggacgatcaacgcttcgcccggaacatcctccccgacgagaagcagctgagccaggtgatgattcgtcgcctgaagagcgatctcgtcgatgctgacggcaagcccctgtatgcccagcgaaagctccaggcgctggcggtcccatacacggacgaggaacgggagatccaccagaagctgaacgattactgtgccagccgcgaaaaagacgcggagaagaccggcagcacattcggcacttcgttcgtcaatcaactgctcaagaagcgcctcttctcgtcgcccgccgcgttcgcttccacgctcgagaagcacgtcgcctcgctgtcgaatggcgccaagcccaagggtcgagatgccatggccgagcgcatcctgcgcaaagccatcctgaaagcagacgaggattacgccaacgaccaggaagtcgagaatgctcaatcggaggccgtcgaggaggcatcacgccgttcccaaccgcttacgcaagagcaacaacggattctggccgacttgaggcaatgggcacagcgcgccaagaaccagaccgactccaaggccagagccatcctagattggctctcagccaatctgaaaccgggaggtcagtggaatgaccgccgggtgatcctgttcaccgaataccgcaccacccaccagtggatgcacgagatcctcgccagccatggtttcggtggcgaacgactcggtctgctccacggaggactcactcaggatgagcgggagcccatcaaggcagccttccaggcatctcccaaggattcccccgtccgcatcctgctcgccacggatgcggcctccgaaggtatcgacctgcagaaccactgcaattgcctcatccacctggagatcccctacaaccccaacgtgatggagcagcgcaacgggcgtatcgaccgtcacggacaacgcgagaaagaggtgctgatctggcaccccgtcgacggcggtgacaaaagccatgcatcggtcggtggccatggtgacgacattctgcgtgcgctgcgcaaactggagtcgatgcgcgccgacatgggcagcgtcaatccggtcatcgcgccccagatgtccgggctcatcgaaggctcgctgaaggatctggacacccgcctcgcggaggccaagattgccaaggccaggcgcttcgtgcgcgccgaacgcgagctgaaagagcgcgtcgccaagctccatgaacgactcctcgccacccagcaggattttcacctcacgcccgatcacatccagatggcggtgaagactggtctcgcgctagcgggccgccccccgttggaacccgtcgccctcgcagatgcaccccaaggcagcgcattcaggatgccacccctatcgggatcatgggcgcgctgtctggagggcctgcgtcacccgcatacccagcagatacgccccatcacctttgaccacgctgtggccaaggggcgagacgatgtcgtgttggtccacctgaatcatcgactggtgcagatgtgcctgaggctgttgcgcgccgaggtctgggcgcaggatgacgtgaagaaactccatcgcgtcaccgtgcgcacattaccggatggcagcatcgagggcccggctgtggtcgtcatctcgcggctggtcatcaccggtggcaaccaccatcgccttcacgaggaactgaccgtctcgggcggctatctgcgcgatcagtcgttccggcgcgaagagggtgtcacgcgtgtccagcagtggctggacgaggcgcagccagtcactgcgagcgattcgctactcgatgccattcgggtgcgcttcgatcgcgcccagcccgccatcctgcaagcggtcgacgcccgctcgaaggatcgactcaagtttctggccaatactctgcagacccgcaagcaacaagagatggatgacatcggtaccgtgctcgacgagttggagaaggctatccagagcgagttgaagaaagaccaacagcccgagcagctttcgctgttcaccgaggacgagcgcactcagctcagacgcgataccgccgcgctggaggcacgcctcgcgcgcatcccggccgagcgcatccaagaggtccaggccatcgaaacccgctattccaagctcgacgatcgcactttccctgttgccgtcgtcttcttggttcccgagtcagccatgcaaggggatgcagcatga

SEQ ID NO: 346443 - DNA, 4077 bp, Pseudomonas aeruginosa
atgagcaatcacgacctgcaccacgactggctggcgctcatcgagatctccggcccgttcctcgccgttcccgttctcaaggaagcctttccccaaggtctggaagaactcgacggaaccaagcgcaaacggctgcgtcaggcctacgaggaatggcgcgaggcgctggagacggacgatccgcagtttgccgaattgcacgctgcgtggattgatgaggtgttggcgcgcgggctggaactcgacgaggatggcaaaggcgacgttctgaagcgcgccgactggtgcgcggccgaactgaatgtgagcctgccagaacacggcgtgacgctgtccccggacctcgccgtcatcgacgagcaacgggccgacaagccgcagatgctcatccacacttacggacaggatgtcgatctcgatgccactctgaagctggacggatgggccgccaccccggccgatcgcatggttcagttgtgccgcgccaccggctgccgcctcgggctggtgaccaatggcgagcgctggatgctggtcgacgccccagttggtgccgtcaccacctttgccagctggtacgcccgcatctggagtcaggaacccatcaccctgcaagccttcgtgcacctgctgggtattcgtcgcttcttcgtcgatgaaaccgagcaactgccggcactgttcgaccgctcgctgaaatatcaggacgaagtcaccgacgccctcggtgagcaggtgcggcgcgccgtcgaagtgctgatccaggccctcgacaaagccgaccaggaccgcgaccgcgagttgctgcgcgacgtgaaagagccggtgctctacgaagccgcgctgacggtgatgatgcggctggtgttcctgctttccgccgaggaacgcggcttgctgttgctcggagacgagcgctacgaggccaactatgcgctctcgaccctgcgcatgcagttgcgcaaggaatccgaggagatcctcgaacgccgctgggatgcctggtcgcgcctgctggcgatcttccgtgccgtatttggtggcatcgaacacgagaacctgcgccttccagcgctgggcggctcgctgttcgacccggatcgttttcccttcctcgagggccgcgccaagggctccgactggcgcaccgacccggccaagccgctgccgatcgacaaccgcaccgtgctgctgttgctcgaagccatccagcagtttcagggcaggacattgtcctaccgtgcgctggacgtcgaacagatcggttacgtctacgagggcctgctggaacgcaccgtcaagcgcaccgccgaggtcacgctggaactggatgggaccaagaatgccaaagccccctgggtcaagttggccgagttggaatccgcccgcctcgacggtgccgaacgccttgccgaactgctccaggagcgctccggcagttctgccagccgcgtgcgcaacgatctggtaaagcctgtcgacgatacgctcgccgaccgtctgctggccgcctgccatggggacaccaacctccgtaatcgcatcaagccttttgcctacctggtacgcaccgatccatggggttatccgctggtctaccccgccggggccttcatcgtcaccaccggctctgaccgtcgcgagactggcacccactacaccccaaaatcgctgaccgagaccatcgtcaccgagacgttgacgccgatagcgtacgtagggccatccgaaggtaccccgcgtgagcagtgggtgttgaagtcacccgccgaactgctggacctgaagatctgcgaccctgccatgggctcaggcgccttcctggtgcaggcctgccgctggctggccgatcgcctggtcgaggcctggtcactggctgaaggcagtggaaatccggtgagcgtggatggcgaagtcctggatgtgccgcacaccaaggagcctctgccccgcgacaccgaggcacgcaccgtgatcgcccgccgcctcatcgccgagcgctgcctctacggcgtggacctaaatccgctggcggtcgaactcgccaagctctccatctggctggtgacgctggccaaggggaggccgttcggctttctggaccacaacctacgttgtggcgacagcctgctcggtattcatcggctggatcagctcaccgaactcaccatgacgccgaccgggaaaggtcagcaacgcctgttcgggcagaacatcgaacaagccgtgcgcgaggcgatcgaattgcggcaagcgctgcgccagatgcccatccgggacatccgtgacgtcgaggctatggcgcgactggatgccgatgcacgccagaagctcgacgtgccggagcgcatcgccgatgcgttcatcgccgaagtgctttcttcgggagggaatgccaacgtcctgtccagtaccgtcggcacgctcgcgattcacgccgggcaggccgtcgatggtaagcgcgacgcgatagaaaccatgattcggcgagcgcacaacgcattgagcgccgatctccctcctgaaaagacaagacgtttgccgttccattggccactggaatttccagaggtctttgcgagatcgctctccggattcgatgctctcgtcggcaacccgccgttcctgggcaaccgcctctggaaaagcgcaatgggtgacaagctgcaatggcagtgccagatggtcttgggtgcatctccgggcaagatcgacttgtgcgtggtcttccatcgtcgcgccgtcgacctgctgcgaaccgatggctgttatgggctgctcgcgaccagcaacatcgccgagggtagtgccatcgatgtcggcctcggtgtagtggttcagaacggcatgatctatttcgccaagaaaggcatgccttggcccggcacggcagccgtggtggttgccatcgttggtttcatcaagggcgaatggccggccgaatgcgatgccgatggccggaagtgtgctcgcatcggaccgaggctggagccagaagcctcggatgtctgggccccacaaaccctgccggatgcactctttgctttcgaaggtgtaaacaacagcaaaggtctggcattcgtcatcacgccggacagcccctggtttgagcgactccagaatgaaccggacagcctgctccgtccttacatcacaggtgacgacatcacgagctcggcgctcaatcgcatcggtcgatgggcgctggatatcggtgatcgcagtttggacgagatcgccagacgatggccgatcgcccatcgcttcatcgtcgaagaagtgcaaccgactcgcacggtcgccgctctcaagagttacaaaggtttgatcgatcgttggtggcaattctggaaccaccgcgccgacctgatgcggcgcatacggcagcgcggaaatttcatcggctactcaaagaacacaaagtacccggttggcatgctcgctccgtccgattggatctacacgaacaaggtacttctgatcggaatggagcgggatgacctctatgccatctcgctaagcacaggctttcgtgcgtggctcgaacgattcagcggtgggaatctgggcgagacgctatcgctttccatcagcgagtcggtcgccaagtacccagttccgagcagtgaagtctcccgggcgggcatcgatgcggcaaagcgtttcaacgacttggcggttgcattcggcgctgcgcacgaatgcgggttgaccgacgtcatgaacgccatccatacccctggcgaggaggatgcaacgatcgtcgagctgcggcagttactggtcgtaatcgataacgaggtgacagcggcctatgggtgggatgaccttgagatcgtctacgacttccgtgagatcgatggaggctccgccaatgatccttggcgttggtctttgtcgagcgaccttaccgctgacctccttggacggctgaccgcactcaatcgtgaacgcttcgaagcagctgcgagtagcagcagcggcgcgtccacaacaacaaagtccaaacgcggacgcagaccgaaggcggcctctcccgccaccctcgacgggctgttcggtgagggagagctatga

SEQ ID NO: 346444 - DNA, 1956 bp, Pseudomonas aeruginosa
atgagcgacaaatacagaatgacggtcgacctgaacgtgctcgaccacctcgggatcaacctctacagcaacatcgccgccgttctgaccgaggccgtcgcgaacgcctgggatgccgacgccgagaccgtcgacatcaagatcgattcggacggcaaccggatcgagatcctcgatgacggtatcggtatgtcggtcgatgacatgaacggcaagtacctgcgggtcggttatcgacggcgagatgaagatctcgagcatggcaagacgactgccaagggccgaccggtgatgggccgcaaagggctgggaaaactctcgctgttctcgattgctaacgtcatcgaagtcgagtcagccagagatggctcagctcatggccttcgcatgaccgtggacggaatccacgaatcggttcagaagagggagcccttctacagccccgagtccctgcccgccgatcagatcgcggtaaccaagggaacacgaatcgttctgcgcgatatcaagcgccagcggctcggtcgtggtgcgctggctcttcgcaagcgcctggcgcgccgcttctctgtgatcggggaggcccacgggttcaagatcgatctcgatgggcagcccatcacaccctccgatcgtggcgacctgccgatggtgcagttcctctggcagttcggtgacgacgcactcgacctgagtcccgccggtcagctcctggagaaggaatcgcttccgaaccgcttcgatgcttgggatacagggtggaaggtcagtggctggatcggcacggctaggttccccaaacaactggatagtgaggatgccggcaatctgaatggcatcgtcgtgttcgcccgtggccgcctgtttcacgagaacatcctcgacaaactgaacgacgggcggctctacacgaagtacctcaccgggcagatcgaggccgatttcctagacgccgacgacgcaccagacatcgcgaccagcgatcggcagcgcgtgcaggaggatgacccccgatatgggcagctgatcgctttcctgaaatcacgtcttacgcaagtcgagaagcgctggacggaatggcgcaagaagcacgaggtcgagaaagcgaaggaaacatcgcccgccctcgccgagtggctcgatacgctccccgagggatacaaaaagagcgcggagacgctgatcgccaaactcagtgcgctgccggtcgatgaggaagaggatcggaagctcatgtaccggcacggcatcctggcattcgagcgcatgaagctgcgcggctcgaccgaggagtttgtgacgagcatcgagagtgccgacaggctgctggccgtgctcgccgacagagactcgcttgaggcatccctctaccgggacatcgtcaaatcgcgtctggatgccatccgggatttccagaccatcatcgatgaggacgcaaaggaacgggtgctccagaagtacctgttcgatcacctctggttattggacccggcatgggagcgtgccacgggcagcccgatcatggaatcgcgcctgacgacggaaggcgtgctgatcgaagacatgaccgagaaagagcgcctgggccgcgtcgacatcgcctatcgcaccaatgcgggcaagcacgtcatcgtcgagctcaagaaggtcggccgcaagatgggattgctcgaactggtggagcaaggtcagacctacgtcgacaagctgaaaaagatcctgcgcgagcaaaacgatgtcagccccaatatcgaggtgatcttcgtccttggcaagaccgtcaacgaagaggcatcgaaccccgaccgcctcaagtcatcgatgacatcgatctcaccgggcagccgcatcgtccattacgacaccttgattcggggcgctcaagaggcgtattcggcatacatcgagaagagcaagtcactcgacaagctcgaaaagatcgtggacaggatttga

SEQ ID NO: 346445 - DNA, 4020 bp, Pseudomonas aeruginosa
atgacgaaaacttccaacgcatggatcgccatcgatcatggcctcggcaccgaccacaggctcgcgccctatatcttggttctgaagggtgagcgttctctctatcaggccatcgaggaggacgactgggttctggtcctgaaccccgttggtagcatcacccgtgtcgggcgtgtgctgcgggttcgttccgatctcgaaaccaccacgctctatttcgaccgactgctgtcgatcacagaccccgtctcgatcggcctcactgcactcacgccaccgtcttcgagcagcatcggtcgggtccagtggaccgatttcgtcgaagccctgcccaaggcattgcacaagaccatcgccgaagtgccgacggtcggttccgatcccagatctccccagcatcagcaggaactcgcctacatccgcgaactgctgcaactggccgtgatggacgacttgctcggcccggctggcggccctcatgagcgcatcgtcgacatgggtgtgcgggatcgctatctggtgggcaagctcgccccgcgtgaggcggcacagggtggcatcgaagggctcgaagggccactggcgaacgacgaggtcgaagagcccaccgacccgaaggcgcccggccagcatgaacccggtgcggagttcggcacggcgacggggcgtgtcgagcccgagtctgacgccgccgatgagatcgacgctgccagcaatcaatcgttggtaccgagcagcctgggcatgaccttctgtgtggatggtgacgccgaacggatcgaaatcgaggtgcgctggggtcgctacgagcgcagcgatgagcacgagatcttccgcatccgcaagaacaaggagaccggcgccgaggagcagaccaaggccaaggtctggcaacgcatcccttgtggcggcaagctggtgctgccgctcaccgaaggcgtgatccctcatcaggcgccggacaagacctatcccgaagtgcgggtgcagggctccgtgcgcgccaagaacgcgaatggcgatcgcttggtgacgctgttcctggtcaacgcacaggaagaacccgagaccaaccgcgataccgcctgggtcttccagccggagctgatcgtgcgttcggaagctgaagcacccaagcgcgcaatcttccgccgccggcctgtgctggatgcggacggtatggacccggagcgtgaatcgctggagatgatctaccgcaaccgggtggagttcgcggtggggcacggcgtcgccgtccatgccgaagcggcggatgacgtgacgctggccaccgaggtgcgcatcactgtcatgccgcagtacgaggtgcaggtcaccgagacaccggggctggaccccgccgaccggccggcgatgaaggaaatggtgagcagtggcctgctcgacatgcagcgcctcgccacactggacatcgatccgctggtcgacgccctcaacctgttgaccaaggattacgccgcgtggatcgatgagcagcgtgctcgggtcggcatcgacgtgcttggctacgacgcgcagtcgcaacaggcaatggatcgatgccaggagatccacactcgcctgcagcagggtatcgatacgctgaagagcgacgcgaatgccctggcggccttccgtttcgccaaccgggcaatggccacgcagcgcgtgcgtagccaatacgccctcgaaatccggcgtggcaaggacgtcaccgtcgagcagttcgacgtactgaagaaccgcagctggcgcccgttccagttggctttcctgctgctgtcgatcccatcgctggccgacccgacgcacccggatcgtgtgcaaccggtcgaagcctatgccgatctgctgtggttccctaccggcggtggcaagacggaggcgtacctaggtgtagccgccttcaccatggccattcggcgcatgcagggcaacctgggcggctacgacggctcgcgcggtctggccgtgatcatgcgttacaccctgcgcctgctgacgctgcagcagtttcagcgtgccacggcactgatctgtgcgatggaggtgctgcgtcgcgaggcgctggccaagggtgacgaatcgctcggcatcgaacccttcaccatcggactgtgggtgggcaacaaggtgacccctggcacgaccgaggacagtcatcgggccatcgaggacatccgcaatcccggtaagtacaacgccggcgcggcgtctcctgcgcaactgaccagttgcccttggtgtggctcggaagtcgccccagggcgcgacgtggaggtcgacaaggggcgtgggcgcaccttcgtctactgcggcgacaagaagggccgttgcgacttctcgaaaggcaagtccagcaagctcccgcacgcgggcattccggtactggtcgtggacgaggagatctaccaccgtcccccgacgatgatgatcgccaccgtggacaagttcgccatgatggcgtggcggggccaagtgcgcacgctgttcggtcgggtcggccaggaatgcgagcggcacggcctgctatggcaaggcgcggactgccatggtaaccaccaggccggaaaggggctcgctgccaccaaggtcaagaacatcagcccgatccgaccgccggacctgatcatccaggacgagtttcatctgatcagcgggccgctcggcaccatggttggcctgtacgagacggccgtggacgagctgtgcggctggaagctcggcgaacatatggtcaagccgaagatcatcgcgtcgaccgccacggtgcgtaaggcccgcgagcaggtgaacaacgtcttcatgcggcgtgtgtcggtgttcccgccgcacgggctggacgtggaagacaactatttctcggtccagcgaccgatcgaggacaagccgggacggcgctacctcggggtctgctctcccggaagttcacgacctgcgatgctgatccgcgtctacacggcgttcctgactgctgctcaggcactgttcgatcacttcggcgagccagcagatccgtacatgaccatggtcggctacttcaactcgctgcgcgagctggggggcatgaagcgcttggccgaggacgacgtgcagacgcgttcctaccgggtgcagatgagcatggtcgagcggcccgcgttggcgcaacgcagcgtcagcaacatccgcgagctgacctcacgggtctccagccaagacatcccgaagtacctcgacaacctcgaggtgaagttcaagtccgagttcgatgccgcagccggcaagtacgtgaccaagtggcaagagggcgacacccgggcgatcgatgtggtgctggccaccaacatgctgtcggtgggggtcgacgtcaatcggctgggactgatggcggtcaacggccagcccaaaggcacggcggagtacatccaggccaccagccgagtgggtcgttccttccccggcttggtctgcacagtgctcacctgggcacgaccacgagatctctcgcactacgaaaccttcgagcattaccacgccactttctacaagcacgtcgaagcgcagtcggtgacgccgttctcgccgcgcgcgatggaccgtggcctgaccggctcgctgctgagcctgatgcgtctggagaacgatgttttcagccccaacgagggggcaggcaagttggacaagtcagaccagaccgagatcaccgatgccatcgatgtgctcgtcagacgagcctggaatgtcagcgagctgtccagcaccaagggcctggccgaacaggaactcaaggagcgcgcagatgagtgggccaaggaagtaggcaaaggtggccgcatcctggcctatgagaagcgcggccccgagaaggacaagacagttgcattgatcaggtcaccgggcatccaggcctgggacaactggaccgtaccaatgtcgatgcgcgaagtggagcccggcgtgcgtttgatcatgaatacaagccacatcacggacgaccacgattggaagcctcgtcccgcgacgaaggatgaggactga

SEQ ID NO: 346446 - DNA, 762 bp, Pseudomonas aeruginosa
atggagaggctcttggacgccgtcgcagctgtggtctgtctggtctctcctgagaaggtacaggccatagctagccggattcgtcggaccgatgccagcaaagcagccggtgcgctgtcgggcgtggtcagcacccccgttgctgctgaggttgtggatcagctcatcgatgcttggcgagccagtgaggtcagcgccgatgagcttgcatcgatgctgctcgccgccggccatgttttcaccaaggctacgaatcaacaatccaccgaactcgtgtggacgggaccgacgacacccttcgtctcggctcgacgaaccgagcagacgctactgcaggtcatcaacgccgctgagcagaccctgttcatcaccagcttcgtggcctacaacgtctcgaccatcgtcaaggcgctgaatgcggcaagtgatcgcggagtggtcatctccatgctgctcgaattgtctcaggaccacggcggcagcatctcgtttgacgcgattggcaagatgagcacgctggtctccgctgcgaggctttattcctggcgagacaaagccgccccgttctctgacgggcgcgttcacgccaaagtcgccgttgccgatggcaagatgtgtttcatcaccagcgccaacctgaccggccacgcgatggagcagaacatggaggccggtgtgcttctcaccggcgggcagattcccaagctgctactagaccatttgcaggcgctggtagacacgaagacggtttcacccgtctga

SEQ ID NO: 346447 - DNA, 693 bp, Pseudomonas aeruginosa
atgcagcagctgcgatgctacggcgacgacagaaacaatgggttctgcgtgcattgcggcgggccaagcgaaaccatcgatcacgtcccgtcgaaagttctcttggatgagccgtatccagagaatctcatggcggctccggcgtgccgtgaatgcaacaacggcctttcactcgacgaagaatatctggcctgtttgctcgaatgtgtcatcgccggggacatcgcacccgaaaaactgcacagggccaagattggccgtatcttgcgtgcgaactcctcgctgttgacccgattgcagcgggcacgcacagatggtgcagaaggccctgtctgggcagccgaaaacgaccgcgtgagtcgcgtcatcctcaaattggctcgatgtcatgccgcattcgaactcaacgagccacaactccacgaaccatcacgcctcggattcaagccgctgtcgctcatgacggaaaaagagcgcaccgcattcgaaagcgatgacgacgcgttcgatgtctggccggaagtcgggagccgtgcgatgcagaggctgcttgtggcgggcaccgacactttcaccgagggatggttggccgtgcaagaaggaaactatcgcttccataccagccaagccaatgggctgaccgtgaaaatcgtccttcgggaatatctcggctgcgaagtcgtctgggactga

SEQ ID NO: 346448 - DNA, 252 bp, Pseudomonas aeruginosa
atgcgagtcgagacaattagttatttgaaacgtcatgcggctgacctggatttatccgagccaatggtcgtcacgcagaacggtgttcctgcctatgtggttgagtcatatgctgagcggaagcagcgcgatgaagcaattgcgctggtgaagttgcttgcgattggctcccgccagtacgcagaaggcaagcatcgctctgttgatgatttgaaagctcgcctttccaggaggttcgctcagccagaataa

SEQ ID NO: 346449 - DNA, 1500 bp, Pseudomonas aeruginosa
atggaagaaagcgcccaacagcgctccgagcgctacatatccgcgcgcaaccagcatccagcctggctcctgctcgcgtctcgccgggcacctttggtgctgggctgcctgcgaaccctgttcgagcaagcgcatgacggtatcccagtggaggatgcactccaggcactcgcgacaatccttgcagcctatgccagccaggaactttacgagatcagtcccgaggatacgcacctgcaggctggtcgcgaactgcgagagtggatcaagcgccgcctgatcatcgagcgcgagggacggatctacgcaaccgatgctctggaggtcgccatccagttcgtggagtccctggacagtcgcatcatgacctccaccgcctcccgcctctcggtggtccagcgtgagatcgagaatctggagaccggcctgaatccgagcaaggaaagccgcatcgccagtctgcgccgtcgaatcaaggatctggagctcgagctggagcaggccgaggccggacagataagcgtgctggacgaggcccaagcgatcgaaggcatccgcgaggtctacaacctggcgattgggctgcgcgccgattttcgccgggtcgaagactcctggcgcgaggcggatcgtgcactgaggcaatcgatcatcagcgagcaatatcaccgtggcgaaattgtcgaccgactgctcgatggccaggacgcgctgctgaatacgccagaaggtcgcgtgttcgacagtttccaacaacagctacgccagtccatcgagctggacaacatgcgtgtacgtctgcgcaccatcctccgccacccgactattcccaaagccctgaaccgctcgcagcaagtggaactgcaatggctggtcttgcgcctcgtccaggaaacgcaaagcgtcctccaggctagggcacgcagcgaacgggacgtgaaaggcttcatgaaaaccggcctcgccgcagagcatcaccgggtaggacacctgctgaacgagatcttcaacttggcgctcaatatcgactggcagcgccaatcggtacgccgccaggccatcccgctcccgccggttggcgtagctatcaccagtgtgccggctgccgagcgtttgcgcttcaaggctctggacgatgaagtgcgaagcgagctgaacctgcatgacaagcaggctggactggatcagattggcgatgacttctgggacgcctttgacgggctggatcgagaaacgctgatccgcaacacattaagcgtactggccgagcagcgcaggcctgtgagtctcggcgaactggcacatctgctgcctcccgcgcatgacctggaaacattcgcgctctggctgggaatggcgcgcgaggctggcatcgaggtgctggataaagagaaggaaacagtggagttggtggacgaagagcaacgtcgctggatcttccacttgccgtatgccgggctggaaagcgaggcgctcaaggatatcgactgggagttgtga

SEQ ID NO: 346450 - DNA, 753 bp, Pseudomonas aeruginosa
atggcaggcatttttgatcgcgttaccggagccactacagaacgcggcaccctgcaggcttcgccgcagagcgaaatagatgacgactcccccagtatcgagttagccgaggcgctcgataaatctgtcgatgagcccagaacaccgcggcggactcgcgaaaccgttcaggaattgctcaagtacggactgctggaagaaagccacaaacccaacttgtatcgcacagcgctcacccagcacgaagatatagcccgagttctggagcccctcgacctgcgcatgggtgtcgatgaggtacgcggcttggtattcgtgaccgtacggcaggacgaaacggccgagcaggatgaatggtctcacccactggtacgcaggcagcgtctgaatctggaacagtccctgctgatcgccatcctgcgtcaacacttcattacctatgaacaggaaagcgggaccggcgctagccacacacaggtcgccgtcgacgacctgattccgcaactgcaggtctatctcggcgatctaggcagcgatgcccgagaaagaactcgtgttattggcctgctggatcagctcaaaggccatggcttggtctctgctctggacacccatgatcgggtgatcatccgccccatcatcgcgcacctggccaacccggagaaccttcaggccctgctggcgtggctgcaggcacagatcgagaagtcgaacgagaccactgagccggctgctggcgaggagatggaatga

SEQ ID NO: 346451 - DNA, 3306 bp, Pseudomonas aeruginosa
atgaaacagtcgacgctttggcgtaacagcgagaccttcatcctgactcgcttggaactatacaactggggcgggttccaggaccttcaccatgctgagatagaccctgccggcactgcggtgatcggccccaccggcagcggcaagaccaccctggtcgacgctctgatgacactgctctgcgccaacccacgatacaacctggcctccaccggaggacatgaaagcgaccgggatctggtgtcctatgtccgcggtgtttccggcccaggcgatggcggccccggtcaatcccatatcgcccgccccggaaaaacagtaactgcgatcgccgccacgcttgagcgcgacggtcagttggtacgtctgggcgccatgctctggttcgaaggcatcagctccagcgcaacggacatgaagaagttgtggctatttagcgaggcacccgaacaaaccctggagcactggctgcacctgcatcacgaaggcggcatgcgcgcactacggcagatggacaaggacagcaccggcatctggacctactccagcaagaaggccttcctggcccggctgcgcgactacttcgaggttggcgagaacgccttcactctgctcaaccgcgccgcgggcctcaaacagctcaacagcatcgacgaaatcttccgcgagctggtgctggacgacaactcggccttcgagcgcgcagccgaagtcgccgccagcttcgacgaccttaccggcatccatcaggaactggaaatcgcccgccgacaacaacgctcgctgcaaccgatcgccgatggctggcaacgttatcaggcgcagcagctacaactggaggaccagcaggcgctcgatgccatcctgcccgtgtggttcgccgaacaggcccatcaactgtggcaggcagaaaccagcaggctggacgctgcattcagacaggcaaagcaggagcaggaccaatgtcagcagcgcctggatgaacagaaagggctggtcgaccggcaacggcagctttacctgaaagccgggggggctggcatcgatcagctcagagggcgcatcgccgaatggcaaaaattccgtgcccgacgagagctccaggcaacccaatatcagcggctggccagaaacctcaacctggcggacgagctttccgcgacggccctgcatgccaaccaggaaaaggcccgtgagcgactacagagcctggatgcgcagatcagcgcagcacaggagcaggccttcaaggcgggggttgccgaacaggcgctgaaagagcagctcggcgagctgcaacgggaaaaggccgaggtggagcgtcgtccgggttcgaacctacccggactacaccaggccttccgcagcgagctggctagggcactggggctggatgaagcagccctgcccttcgtcgccgaactcgtgcaggtcaaacccgaggagcagtcctggcgcggcgccatcgaacgagcgatcggcagtcaccggctgcgcatcctggtaccgccggagtcatccagatccgcactgcagtggatcaaccagcggcacaatcgcctgcatgttcgcctgctcgaagtgaaggaacctgtttctcgcccacgccccttcgaggatggcttcacccacaagctgacctgcaaggagcatccttatcgcgccgcgctcgaagcgctactggccgacaacgaccggcactgcgtcgacagcccggagcagttgcggcacaccccgcacgcgatgactgcccaggggttgatgtccggcaaggagcgcttcttcgacaagcaggaccagaagcgtctggacgaggactggctcaccggtttcgacaaccgagatcgcctggcttatctcaccgagcagattcgtaccctcgaaacgcagctgacaaccgcgacgcaagcccttcgtatcgctcaggataccgctggcagtctgcaggatcagtaccgcgcgctggagcagttccagcgcctggagttcgaagagatcgacctgcccggcgcgcagcgccaactcgataaacttcagcagcatctggatgccctgacccgcccagactccgatgccggcacagccaaggtcgaactggacaaggcagaaagcctgcacaaggagctggaccagcagctgcggaaggccatcgagacattcagcgctgcaaggaaagatctggaacatgccgacgcagcactgcgcagagcttttcagcgcgccgggcagggtctgagcgatgctcagcgcaccttggcagccacgcacttcccgcgcttgacgctcgaacagctggacgaccttcaggacatcgagcgcaagcatgcgcacgagctgcagcagcagctcaaggctggcagcgagaagctgcagaaactgcgcgaagaactcatcaagcgcatgtccgatgctaagaaggaagacaccggcgctctcgcggaagtcggtagggaactggaagacattccacagtatctagcacgactgcaggtactgaccgaggaagccctgcccgagaagctcaagcgcttcctggattacctgaaccgctcctccgacgacggcgtgacccagttgctcagctatgtcgaccaccaggtcgccctgatcgaagagcgcttggaggatctgaacagcaccatgcgtcgagtcgacttccagcccggtcgttacctgcgcctggtagcaagcaaggtcgtgcacgagagcctgcgcagcctgcaacgcgcgcagcgccaactgaactcggcacgcttcaccgacgacaatggcgaaagccagtacaaggccctgcaggaactggtggccttgctcaaggatgcctgcgagcgcagccgcaccctagccgctcgcgccctgctggacccacgcttccgcctggagttcgccgtttcggtgatcgaccgggaaagcggcgaggtcatcgagacccgcaccggctcacagggcggcagcggcggcgaaaaggaaatcatcgcctcctatgtactgaccgcctccctgagctacgcgctctgcccggacggcagcagccggccgctgttcggcaccatcgtcctcgacgaggccttctcacgcagttcccatgcagtcgccggacgcatcatcgcggccctgcgcgagttcggactgcatgccgtgttcatcaccccgaacaaggagatgcgcctgctgcgccaccacacccgctcggccatcgttgttcatcgccgaggaccggaatccagcctggcctcgctgagctgggaagccctggacgaactccaccagcaacaccgccaggtccgccatgaagtcgcccagtga

SEQ ID NO: 346452 - DNA, 1143 bp, Pseudomonas aeruginosa
atgaagtcgcccagtgatatcggccagagcctggcccgccaatggcaacagccgcgcatccggcgggagcgcctgctcgatcccggcggctggccccgcgacttcaccatcggcaaaccctcggctggcctcttctcggccaatccccaggccgtgcagcgacatgtcgaagcctggcggcaagtgcggatcggtgaggttacgtgggaacccgtcgactaccgtgccgccctcggaccggtccagatgcccatgacctggaggctgcgcagcccgtcggagtgggttgctgctagcggcgatcccgaagtgatgcgggaataccggatactcgaggcgctggtggagcagaccgaccgctgctttcacaccctactggtcagccagcgcagtctctggctgaaaaaatcagccgacgaggtcatcaccactgcacgactggcagcccgactgtcgccgggctgcgcacaaggacgccccttgcgcatgctggccgagctcggcgtggacaccaagttcttcgagcgcaacaccgccctgctgaccaagctgctcgacgagcgcttcgaaggcgaggtgtccgcacaggggctgacgaccttcctggatgccttcgaagacagcagccactgggtactggtcgctccgctgtcacccggcctgctgccgttcaaaaggctcaggctgaccaccgctgaactggcggaagtcgatctgccctgctcccgtgtgctggtggtagagaacgaacagtgcatccaccagttgcccgagctaccggacaccatcgcgattcttggcgccggactggatctgcagtggctgggctccccgtacttggccggcaagtccctcggctactggggtgacatggacacctgggggctgctgatgctggcacgcgcgaggcagcgacagccggccatcaaggcgctgctgatggcgcggtcgatctttgatcggtatgaatcgaccagtgcggtcgctgagccagtcaaggcccaggacgcggcacccgatggcctacagccgtgcgaggccgacttctatcgatacctgcttaggcgcgagcgtggtcgcctggaacaggagtacctgccaaaggacctggtggaaaatgctatcgctacatggactatgtga

SEQ ID NO: 346453 - DNA, 249 bp, Pseudomonas aeruginosa
atgactttgccatacgagcgcagccgcagcgtcatacagaccggagcatttctcaaaaatatctgtataaatcctgaaatcccagaaagcgtccgaaatgaagccaaatatcttcttcggcattaccctactgctgacgatatcaaaaccatcggccgtctggaggagttcttgctcaagccttctgatgacgaaaagcgagaaatcctcatcaacctacacatgccactgttcagctcagagatatga

SEQ ID NO: 346454 - DNA, 795 bp, Pseudomonas aeruginosa
ttggaccgcaatcttattggtgtagatcgggcaatccaaatcaaggaaggccagatcgagctactgaaagagcgcaagcagatcctgatccagcaggccgtaacccgtggccttaaccctgaagcgcccatgcgggactccggtatcgaatggattggtgagattccggcgcactggtcgataaagcgagccaagtatatttttcgcgaagtagacgagcgctcccaagatgggcagcaagagctactctccgtttctcacctgacaggggtcactccgcgctcagagaaaaatgtctccatgttcatggctgaggactacaccggttcaaaaatgtgccggaaagatgatcttgtattcaatatcatgtgggcatggatgggcgctctgggtgtcgctgatcgtaccggaatcgtcagctcatcctacggtattttcaggcagttaaagcccggaacactcaatccgcagtatctcgagatgctgctgaagactacaacctatatcgagcactacaacaaggtctcgacaggcttgcattcttcacgcctgcgtttctatgggcacatgttcatggccatggaaatcggttttccaagccgcgaagagcaggattcgatagtagcgcatcttgatattgagtcggaaaagataaataaggcgactgatctgctggagcagcaaatcggcaagctcaaggaatacaaagccaccctgatcaatagcgccgtgaccggcaagatcaaggtgccgggggtggtggagcccgagatgcaggacgtggaggtggtctga

SEQ ID NO: 346455 - DNA, 1644 bp, Pseudomonas aeruginosa
atggatgctctgcagcaactgcagcgcttgcttgccggcaacggcgaaagcgaggtggtggagttcaaggaagccaagaacaattacgacttcgacaagctcggccgctatttttcggcattgagcaacgaggccaacctcaaggggctgcccagcgcctggctggtgtttggtgtaaaggataaccagcaggtggtgggtacacgctatcgcgagcagcccaagcagttgcagtcgctgaagaaggaagtggccgacaaggtcagtcagcgcctgacctttatcgagattcatacggttcttcatcccgctggccgggtgctgctgctggaaattcccgccgccccccaaggcctgccggtggcctgggaagggcactactatggccgcgatggtgaatccctcggcccgctatcgctcgaagagatcgagcgcatccgcagccagaatcgccagcgggactggagcgcaggcatctgccacgacgcgaccctagatgacctgagcgacgaggctattgcacttgctcgccgcgagtacgccaccaagcatcctcgactggctgccgaactggcgaactggagtaacgaggtctttctcaacaaggccaagctgaccatccaggggcagatcactcgtaccgccattctgctgctgggcaaacctgaggcggcacactggctcaaccctgcctcgcccaccatcacctggattctcaaggatcgcgacggcctggagcgtgactacaaacacttttcctgtccgttgctggtcgacgccaacgaggtctaccgcaagatccgcaacctgaagtaccgctacatgtcggatggatcgctgtttcccgaggaggtcgaccagtacgatccttttatcatccgcgaagcgcttaacaatgccattgcccaccaggactatgagctgggtggcaaggtcactgtggtggagttcgaggacggacggctgtgcttcagtaaccccggcacctttatccccggctcggtggagcaggtaatccactccgacgcaccggaaacccgctatcgcaaccgctttctcaccgatgccatggtcaatctgaacatgatcgacaccatcggcagcggcatccgcaagatgttcctgatccagaaaaaccgcttcttccccctgccggaataccagctggaacaaaaccgcgtgcaggtgaccatcaccgggcgcgtactcgacatgggctatgcacgcaagctggccgagctacccaacctgacgctggacgacatcatcctcctggaccgagtacagaagcgaaagccgttgaccgatgcacaggcccgccacctcaagcagcaagggctgatcgaaggacgcaagcccaacttccatatttctgcccaagtggcgcggcacagcgatgacatggccctgtacatccgtacccgcggtctcgacgatgcacactacaagagcctgatctgcgacctgatcaagcggtccggctcggccagacgtgccgatatcgacaagctgctgctagacaaactccccgaggttctagaccaacagcagaaggccaacaagatcaagaatctgcttcaagccttgaagaatcagaaggttatcgagccgcagggtaagctctggaaaatgtctaaaggctga

SEQ ID NO: 346456 - DNA, 138 bp, Pseudomonas aeruginosa
atgtacaaagcttctgttcttgggctcgccttattctgcgtcaccaccgggagcactttcgctgatgaccctgacaaggaagatgacaaacgcagggcagagttctatcgagagcgggataaggcctaccgtgaataa

SEQ ID NO: 346457 - DNA, 2349 bp, Pseudomonas aeruginosa
atgagccgcacgtcccgcttccatcccgccacccgcttccagccttacgccggcccggctggcggctggggcgccctgcgcagcgtggccagcgcctggctcggcagcggcaatgcgctgaagaacatccgcgccatgctcaagaccaaccagaacggcggcttcgactgccccggctgcgcctggggcgattcgccggaggccggcgcggtgaagttctgcgagaacggcgccaaggcggtgaactgggaagccacgcgccgccgcgtggatgcagcctttttcccccgccacagcgtcagccagttgcgcgagcagagcgattactggctcgaataccaggggcgcctcaccgaaccggtccgttatgacgcggccagcgaccgctacctgccgatcagctgggatgatgcgttcgcgctgatcgcacggcacctgaacggcctggccagcccgcaccaggcagccttctacacgtccggtcgggccagcaacgaagcggcctatctctaccagctgttcggtcgcagcttcggcaccaacaattttcccgactgctcgaacatgtgccacgaggccagcggcgtcgccctgaccgaatccatcggcgtcggcaagggcacggtgacgctgggagatttcgatcacgccgatgcgatcttcgttctcgggcagaatcccggcaccaatcacccgcgcatgctcgaaccgctgcgccaggcgctggagcgcggtgcccaggtggtctgtttcaatcctctgcgcgaacgcggcctggaacgattccagcatccgcagaagcccatcgagatgcttgccaaccaggacgcgccaacccacagcctctacctgcgccccaaccttggcggcgatctggccgtactgcgcggcatcgccaagtacctgctgcaatgggaacgcgaagcgctggcgagcggcggaccggcggtgttcgatcgcgacttcatcgccgagcacacccatgccgtcgatgcctatctggaggcgatcgatgccacgccatgggcgcggatcgaacagcagtccgggctggaccgcgacgcgatcggccaggccgccgcgatctaccgcgacgccgggcggaccattgtctgctgggccatgggcatcacccagcaccatcattcggtggcgaccatccaggagatcgccaacctgctgatgctgcgcggcaacctcggcaagcctggggccggtgcctgcccggtgcgcggccacagcaacgtgcagggcgatcgcaccatgggcatcaacgaacgcccgccggccgcactactggatgcgctggagcgccatttcgccgtgccgatgccccgccagcccgggcacaacaccgtggaatgcatccaggccatgctggccggcgaggtgcaggtgttcatcggcctgggcggcaacttcgcccaggccacgccggacagcccgcgcacgcagcaggcgttgcgcaactgcgcgctgaccgtgcagatcagcaccaagctcaaccgcagccacctgaccatgggtcgcgaagcgctgatcctgccctgcctcggccgcaccgacatcgaccgccaggcctgcggcccgcaggcggtgaccgtggaagattcgttcagcatgatccacgcctcccggggccagctggagccgctgtcgacgcagatgcgttcggagcccgccatcgtcgccggtatcgccgccgccacgctgggcaagcgcccggtgggctggctctggctggtggaggactacgcacgaatccgcgagctgatcgcggcgaccatcacgggtttcgccggcttcgaccaccgcctgcatcgccctggcggtttctatctgggcaacgcggccgcgcgccgggaatggaacaccgccagcggccgcgccgagttcaaggcgcatgcgctgccggccgacctgttgcccgagcaggcccgccggccgggcatgaaggccgatttgatcctgcagacactacgctcccacgaccagtacaacaccacgctatacggcctggacgaccgctaccgcggcgtcaaggggatgcgcgaggtggtgttcgtcaatccggccgacatccagcggctgggcctggaagccggccagcaggtcgatctggtttcgctatgggacgacggcatcgaacggcgcgtaagcggcttcaccctgctcgcctacgacacgccgccgggtcaggctgccgcctactacccggaaaccaacccgctggtgccactggaaagcttcggcgcgcgcagctatacgccgacgtcgaagtcggtcggtatcaagttagaaccgtcagtcggaagaaataaccaaatcgctctaggtagctgcagttga

SEQ ID NO: 346458 - DNA, 924 bp, Pseudomonas aeruginosa
atggatttgaagcagctggaattcctggtggcgctcgacgaaacgcggtatttcagccagacggcggcgcgctgccacgttagccagccgaccctgtcgatgcgcctgcgcagcctggaccgctacgccactctgaacaccaccgatcctgccgaaccgcacgacgcacacgctgcgctgctggccgaggaatgcgcgctggccatcagctacaacggtctgaaccatgccgtgatgatggtgacgccgcaggatctggaagagttcgtcgtcggcttcagcctcgctggcgggctgatcgagcgactcgatgacctgcgtgacctgcgcctgctcggcgacggcagcgcccgccgcgcggaggtgcaggtcagcccgtgggcgttctggacactcaagcagcagcgtcgccagctcgccggcaccagcggctgcgggctctgcggggtggatgcgctcgatcaggcactgccgcggctggtgccgctgcagccggcagcactgccgcccgaagggcatttccatgagctgcgccagcgcatcgccagcgcccagctgctggcgcgcgacagcggtgcgctgcacgcggcactgtatgtcgacggcaacggcgtgatcgccctctgccgtgaggacatcggccggcataacgcgctggacaagctgatcggcgcaatgatgctgcagcgccgtaacccgagcgaaggcttcgtcgtggtcaccagccgctgcagcctggaactgatccacaaggccgtgcgcgccggcatcggcacgctggtcagcctctcggcaccgacccagctcaccgtgcagtgggcgcgccagcaccacctcaacctcattcatctgccccaccacagcgcgccgcgggtctacagccctgcgcctgcgctgcccgaccagaacggatgccacccatga

SEQ ID NO: 346459 - DNA, 870 bp, Pseudomonas aeruginosa
atgacagccgcaaacgccgagttaccggaaaacgactattgggtgcctgcgctgcaacgcggcctgcgcatcctcgaaatgttcgatggcgtgcagcgcaccctcggctccaacgaaatcgccgcccgcctcggcgtcagcgtttcagcgatctaccggatccttttcacgctttcggagatgggctacctgcgcaagatcgaccgcaacacctacgaactgggcacccaggtgatcagcaacggcttcagctatctcgccagtcgcgatatcgtcgatgtcgccatgccgctgctgaacaccctgcgtgacaagacctccctgtcctgccacctggccatccgcgagcagaccgaatcgctgtacctttaccgcgccttcgccgcccagcgcctgtcggtgaacatccccatcggcacgcgcatcccctgccactgcacggcgatgggccgcatcctgctcagcgaactgcccgccgagaccctggatcagctctaccagcgcgtgcgcctggacgactacccaccacccgcgcccaaatccctgccggaactggcacagttgcttggcgaagaccgcgaacgcggctgggtcctgcatcggtcggactactccaccgccattgcctccgcggtgcgcgaccataccggcagcatcgtcgcggcgatcaacctctcgggtcccgaggcagtcctggacaacgaagcggtgcgatcacagtgcttgcagttgcttctgcataccgcaggcgagatttccgcgcagcttggcagtggttatggtgacggccttgcgggtcagaacgccaggagcgtcagcgaaacgaggccatgcgcgccgaagtcgactttcccctggaggcgagactga

SEQ ID NO: 346460 - DNA, 678 bp, Pseudomonas aeruginosa
atgcaggcactcgatccccagcatttcacggaacgcagtccgctctaccgcaagcatgccggcgcctgtttcggccagctcggcgacagcgcgatcgttaccagctacggcggcgacgaaaccgcccaggccgagcgctgcggcctgctcgacctcaccaacctggcacgggtgggctttcgcggggcagaagccgccgcctggctggagcgttgcggcttcagcctgccgtccgcacccaaccgggtcgtcacccaggccgacggcagccacgtagcgcggctgtcgcagaccgagtacctgctgctcggcagcctgacggacgccggcaagcgcgtcgcgcgtgcggaagccgactggaccttcggcaccagcgccgtttacctgctgccgcgccaggacagccatgcctggctgctgctgactggagcgcacgtcgccgaggtgatggccaagctctgcggcgtcgacctgcgcgccgaagcctttgcacgcggtgcggtggcgcaaacctcggcggcgcggatcaacgtgatggtgctcaacaccggcagctgcgctctgcccggcttccatatcctctgcgaccgcgcctcggcgagctatctctgggacgcgctgctcgacgccatggccgagttcggtggcaagccggtaggcatggacgctctggcatga

SEQ ID NO: 346461 - DNA, 2907 bp, Pseudomonas aeruginosa
atgacggccttcaatcgcctacccgccccgctgggcctgctgatcgaccgcgggcagccggtcagcttcagcttcgatggccagacctaccaaggcctcaagggcgacagcatcgccagcgctctgctcgccaacggccgctggctgctctcgcgctcgttcaagtatcaccgcccgcgcggcccgctgaccctcgccggccaggatgccaacaccctggtgcaactgccccacgagccgaacgtgctggccgacatggagccgcttgcggccggccagcaggtcaccgcgcagaacgtctcgggcagcctggacaacgaccgtgatgcgtacctcggcaggttttcccggttcatgccggtgggtttctactaccgcagcttctacaagcccaagggcatctggaatcgctgggagcccttgatccgcaagaaggccggtctcggcgtgctcgacgtgaacttccagcccgagtactacgacaaggcgttcctgttccccgatcttgccgtggtcggtgccggcccggccggcctggaagcggcgctgagcgccgccgacgccggtgccaaggtgctattgatcgaacagcaggcgtatctgggcggcgccctggcctggggtcgttttgatgtggacggcaagcgcgccgaaagcctgcggcagaagctggtcagcgccgtagagagccatccgaacatccagatcatgctggaggccacctgcaatgcctggtttaccgagcactacctgccggtgattcagggcaagcgcctgtacaaggtgcgcgccaggcaatgcatcgtcgccgctggcgcgttcgaccagccggtggtgtttcgcaacaacgacctgccagggatcatgctcaccagcgccgcccagcgcctgatcaagctctacgcggtccagccgggccaccgcggcgtggtgctcactggcaacgacgacggctacctggccgccctcgacctgatcgaggccggcgtgcaggtcgccgcactggtggacatgcgcccgcagcccagcgacagcagcctgcttgctgcggtgcaggcgcaaggcattcgatgcgagctgaacagcacggtgtacgaggcgctgcacaccaggggcatgcgccacgtcagcggggtggacatccgccgcatcgtcggcaagggccgggtggccgaaaaaagccttcagctcgactgcgacctcgtctgcatgtccgccggctacatgccggtctaccagttgctctgccaggccggcggcaagctggcctacgacgatagccgcgccaccttcaccctgagcggcctgcccgccgggctacaggccgccggctcggtcaacggccgccacagcctcgacaacctgctgctcgaagcccgggaggctgcgaccagggcctgcaccgccctgggcctgaacccgccaacggtgaccggcagcccgctcgccgaggtatcgccgaactttccctggccgatctttgctcatcccaagggcaaggaattcgtcgacttcgacgaagacctgcaggtgcgtgacatcgtcaacgccacccgccacggctatcgcgacgtgcaactggtcaaacgcttttccaccgtcggcatgggtccgtcccagggccgccattcggcgctgcccaccgcgcgcctggtggccgaagccaccgggcgcagcgtcagcgagaccggcgtgaccaccgcacggccgccattcgtggccgagaagctcgcccacgtcgccggccgcggtttcgatccctaccggcagacgccgatgcaccaccgccacctggagctgggcgccaagatgatgcctgccggtgtctggcagcgccccgcctattacggcaagcccgaggagcgcgacgcctgcatgcaggccgaggcgcgccacgtgcgcgagcaggtcggcctgatcgacgtctccaccctcggcgggctggacgtgcgcggcccggatgccgccgagttgctcaaccgcctgtacaccttcgcctttctcaagcagccggtcggtcgctcgcgctacgcgctgatgaccgacgagcaaggcgtggtgatcgatgacggcgtctgcgcgcgcttcgccgacgaccatttctacgtcaccgctaccaccagcggggtcgatcgcatctaccagcagatgctcaagtggaacgcccaatggcggctgaacgtggacgtcaccaacgtcaccgccgcgctggcggctgtgaacctggccggcccgctgtcccggcaggtgctgcgcaaggtctgtcatgacgtcgatctgtccgccgacgcctttccctatctcggcgtgcgcctgggcaccgtgctcggcatccccgcccggctgatgcgcgtcggcttcgtcggcgagttgggctacgagattcacgtcccggcgcgctacggcgagtacctctgggattcgctgatgcaggccggcgagaaggacggcatccgcccgttcggcgtcgagacccagcgcctgctgcgtctggaaaagggccacgtgatcatcagccaggacaccgacggcatgaccaccccggccgagatcgacatgacctgggccatcgcccgcagcaagccgttcttcgtcggcaaacgctcggtggagattctggaaaagcagccgctgcgccgcaagctggtcggcttcaccctgcccaagggcgccagccagccactggaagggcatctggtgctgaacgggccggacatttccggcaacgtcacctcctgtgaatacagccagaccctcggccagatcatcggcctggcctatgccggcgcgcaccaggccgagcccggcagtctcattcccattcgcgtcgaaggcggcgaagtggtccaggcgaccgtcgtcaagctgccgttcttcgatccccagaaccaacgtcaggagctgtaa

SEQ ID NO: 346462 - DNA, 309 bp, Pseudomonas aeruginosa
atgaagatcatgccctgcccgctcaacgggccacgcaacatcagcgaattcacctatggcggcgaacttaaggccatgcccgatcagaacacctgctccgatgaagaatgggccgactatgtgttcaacaaggagaaccgcgccggcgtggtcatcgagtggtggatgcacaacgcctccagctactggttcctcgccgagcgccacacggtgagcgacgaaatcctccgcaccttcgacccgaaggaactcttcacccgccgcgttgagttcagcgccgccccggccagacaggaggtcaacgcatga

SEQ ID NO: 346463 - DNA, 921 bp, Pseudomonas aeruginosa
gtgaacactcagcaaagcgacaaactcatcgatggcaaggccgccgccgcgcaggtgatcgaggaagtggccgccgaggtcgcgacgctcaaggccgaaggcctggagcctgccctggcggtggtgctgatcggcgacgacccggccagccacgtctatgtgcgcaacaaggtgctgcgcgccgagcaggccggtattcgctcgctggagttccgcatgcaggccgacagctccgccgaggccgtgctggagatgatcgccgggctgaacgccgaccccagggtgcacggcatcctggtgcagctgccgctgccggcgcacatcgacgaacgcctggtgctgcaggcaatcgacccggccaaggacgtcgacggcttccacagcgacaacgtcggcggactcagccagggccgtccggtgctgacgccctgcacaccagccggctgcatgcgtctgctgcgcgatcgactcggtgacctggcgggcaagcacgcggtggtggtcggccgctccaacatcgtcggcaagccgatggccgcactgctgctggcggccgactgctcggtgaccgtcctgcattcgcgcagccgcgagccacaggcgctgagccggcaggcagacatcctgatcgccgcggtcggtcggccacggatgatcgacgccgcctggatcaagcccggcgccgtggtgatcgatgtcggcatcaaccgcatcgaggaagacggccgaacccggctggtcggcgacgtcgatttcgacagcgtgctgccgctggtgtcggccatcaccccggtacccggcggcgtcggcccgatgaccattgccctgctcatgcagaacaccgtcactgctgcgcgccagcagcgcaaacaggcggccgcacggtccgccgaggagtcgacatgcctttcaacctgctga

SEQ ID NO: 346464 - DNA, 861 bp, Pseudomonas aeruginosa
atgcaacacgaacaattcatcatcaagatcagctgcccggccacctctggcatcgtcgcctcggtgacgagctttctgtccgaacacggctgctacatcagcgaaatgtcccagttcgatgacgagctcagcggccggttcttcatgcgtgctgtgtttcgcttcaacaccggcctggacggcgacatcgacctgatcgagcgcggcttcgtcgatgtcgccggcaagttcgacatggactgggaactgcacagcaccgcgcaacccatgcgcgtcctgctgatggtgagcaagttcgaccactgcctgagcgacctgctgtatcgctaccacaagggcgagatggatatgcagatcaccgccatcgtctccaaccacctcgacctgcgccccatggccgaacgcgagggcatccgcttcatctacctgccggtcaatcgcgacaacaaggcgcagcaggaagccgagctgatgaacatcatcgaggacaccggcaccgaactggtggtgctggcgcgctacatgcagattctctcggacgacctttgcaagaagctcgccggccgcgcgatcaacatccaccattccttcctgcccggcttcaagggtgccaagccctaccaccaggccttcgaccgcggggtcaagctgatcggcgccacggcgcactacgtgaccagcgacctggacgaggggccgatcatcgagcaggaggtccagcgcgtcgatcacgcgtacaagccggacgatctggtgaccatcggtcgcgataccgagaccgtggcgctttccaaggcggtcaagttccacctccagcaccgcgtattcctcaaccacgacaagacggtgatcttccggtga

SEQ ID NO: 346465 - DNA, 900 bp, Pseudomonas aeruginosa
atgtgtggaatcgtggggctctatttgaagaacccggcgctggaatcccagctcggtgcgctgttcgagccgatgctgctggcgatgaccgatcgcggtccggacagcgcaggctttgccatctacggcgatgaagtcagggagggctgggtcaagctgaccctgcagagcaatgacgccagccttgactggaaaagcctgatgggcgcgctggaagggcgcctgggttgttcgctggactggttcaccaatgccagcgcggcggtgctcaaggtcgccgcggaggaatcggcggtgcgcgcggcgctcagggagctggcgcctggcgtgcgcatcatgagcgccggccagagcatcgagatcctcaagggcatgggcctgccgcgcgaaatcgccgaacgcttcggcctggcgaagatgaagggcagccacatcatcgggcactcccgcatggccaccgaaagcgcggtgaccatggaaggcagccatcccttcaccaccggcgacgacctctgcctggtgcacaacggctcgctgtccaaccacttccgcctgcgccaggaactgcgccgccacggcatcgaattcgagacggaaaacgataccgaggtcgccgccggttacctgacctggcgcctgcaacagggcgacagcctgcagcaggcgctcgaccacgccctcgaggagctggacggcttcttcacctttgccatcggcacccgcaacggtttcgcggtgatccgcgaccccatcgcctgcaagccggccatcctcgccgagaccgacgactacgtggccatggcctcggagtaccaggccctggccagtctgcccggtatcgacaaggcccgggtctgggagccggagccggccaccctgtacatctgggaacgcgcatga

SEQ ID NO: 346466 - DNA, 1353 bp, Pseudomonas aeruginosa
atgacgaccacacttcacgcttcgctcgcacccgcttcgccgctgctgcggcgcctgcgcgcggccctgccgctgctgctgatggccttcgcgccactggcgctggccgaggaggcgacgctggataccggcgtcaccgcctggatgatgaccgccacgctgctggtgctgtgcatgtgcctgccgggcctcgccctgttctacggcggcctggtgcgcgccaagaacatgctttcgctgttctcgcagtgcttcgccatcgccggcgtgatcggcgtgctctgggtgctctacggctacagcctggtgatcgacaccagcggcatggtcgagggtgaattcagctttaacagcttcgtcggcggcctcgatcgggccatgctggcgggcctgaatggcgacagcctggtgctggggatgccggaaggggtgttcatcaccttccagatgacctttgccatcatcaccccggcgctgatcgccggtgccttcgccgagcgcatgaaattcgtcgccgcgctgctgttcatggcgctgtggttcaccttcgtctacgcgccgatggcccacatggtctggggcggtccgggcgcgctgatgcacaactggggcgtcctcgatttcgccggcggcaccgcagtgcacatcaacgccggcgtcgcggcgctggccgcctgcctgctgctcggcaagcgcaagggctatccgcacgagatccgtccgcacaacctgccgctggcgatgaccggcgcggcgctgctgtgggtcggctggttcggcttcaacgtcggctccgcagccggagtgggtggcatttccggcatcaccatgctcaacacccagctgggcgcctgcgccggcatcgtcggctggatgctcgtcgaactgctgaagaccggccgtcccagtgccctgggcctggcgtccggtgccatcgccgggctggtcggcatcaccccggcctgcgcctacgtcgggccgggcggcgcactggccatcggcctgctcagcggcgtgctgtgctacctcgcagtcacctcgctcaagcaacgcctgggctatgacgacagcctggacgtgttcggcctgcacggcgtcggcggcgtggtcggcgccatcctcaccggcgtgttctgcgtgccggcgctgggcggctacgtcgagggcagcgagatcattccgcaagtctgggcacagctgaagagcgtgctgttcaccttcgtctactgcttcgccgtcagttgggtgctgctcaagctggtcgacaagctggtcggtttgcgcgtcgacgaacaatccgaagacatcggcctggacctcgccgagcacaacgagaccgcttacaaccactga

SEQ ID NO: 346467 - DNA, 561 bp, Pseudomonas aeruginosa
atgaatgtcgaagaggctgtagtgatgcacagcaagccggtctacccggcggttctatcgctactgggtgcgggacgacgactgctggtgattcaggacgccagcctggctgaggcggcgcgcctgcacgggcagctgagcgccgacggccagccgctggaactggccagtctgcatggcgaggcagcctggactggcgagcatcgtagttgcggtgcgttcgcgctgcttgaggtgcgcctgctcagcctgctgtcctcggccccggtcggtactcgcctgtacgtctgcggcgacgaaagctttctctggaaaatctctgggctggcgcgcgacagcggtctgctggacgaagagatcgagcgggtcaaggtcggcgctgcgcgtgagctgtattgcgtgcactgcgccacccagcagtgcatcggtgccgaaaatgtcgtggtctgcagcggctgcggtgtgcaactgatggtgcgcgagcatttctcccgccgcctcggcgcctacatgggcgtctgcctcgatgcgcagcggccacatggggagggccggccatga

SEQ ID NO: 346468 - DNA, 945 bp, Pseudomonas aeruginosa
atgagcgcagcgatagccgtccgcgtcgcgcggattcgccagctgacgccgctggtgcgggaattcaccttcgagcccgtgcatggcaggctgccgggcttctccgccggcagccatgtgctggtgcacctgcccgacgcgcagcgcccgctgaagaatgcctactccctgctcggtgacccggccgattggcgccagtaccgcatcgccgtgcggctcgccgagcggtcgcgtggtgggtcgcgctacctgcacgagaaggtcgctgagggtgatgaactgcagctgtcgccgccggccaacctgttcgcgccgagcaagctggcgcgccaccacctgctgatcgctgggggcatcggcatcaccccgttcatggcctacagcgccgacctgcaagcccagggcgccagcttcgagctgcattacgcctttcgcgccgggttgaccgacgcctaccgggacgagctgcgtggccaactgggtgagcgcctgcacggctacgacgcaacgcagcgccagcgcctggacgtcgccgcgcggctgcgcgcccagccgctcggcactcatgtctatgtctgcgggccgcagcgcctgctcgacgaggtgcgcgaacaggccgcggcgctgggctggccgcagagtcgcgtgcactgggaggccttcgccaccgcggagccgggcgagccctttgtcgccaccttgcagcgcagcggccgccagttgcaggtgtcggccgaggccagcctgctggaaaccctggaggcccacggcgtggaagtccccagcctgtgccggggcggcgtctgcggcctctgcgcaacgccctatgtggctggcgaggtggagcatcgcgaccatttcctctccgccagcgaacaagccacccgcctcatgccctgtgtttcgcgcggccgttgcggcagcgcgctgacgctcgatctctag

SEQ ID NO: 346469 - DNA, 1026 bp, Pseudomonas aeruginosa
atgcctgtgaccctgaaacccgtcgagacctatcgcgacgacttcaccttccgcaacagccccgaggccatcgcgcgcttcccgtttcccttccccgaggacagctacatgtactcggtgaacctcgagccggccacgccgcgcgaaccgggttcggtgttcgagcactggttcgatatcgacgagcactatcgctccgagatggccgaacgggcgcgggtgctcgagcgcgatccggatcgctgcctggtcatgccgcacatgcggcaggcggcctgggacaccctcgagatgctgatgacccacctggccgccgactacccgcagtggttcgagctcgagcgcgacggcaaccactggacctggagcaaccatgcgctggacctgcgccagagcttcgtcttcggcgatccggacacgctgccctgcgagccgctggagtacatcacccgccaggtgcagggcgatttcgcgctgctcgaccagcgcgacggcaacctctggatggatgccgggatggtcacctgcccggcggactggtcgatcaagttcgacgccggcatgaatttcacccaatggcattcgccggtgccgatggcgcaccagctgggcgtgttcgagcgggcgctgaagtacctgctgaacatccaggtcgaccatccggtgcgtcgcctgaactggaccatgacggtcaacccgcgcctggatacctcctcggaaaccttccacgaatggggcgccgagcgcgcccaggtcaccgccgaaaacgtcgcccggctggtgcacctgcgcgtcgagctgcagttcatgccgcggctgccgcgcagcaatgcgctgctgttcggcatccgcacctacctgatcagcctcgaggagctggccagcaacccggcctgggcctgccgcctgcaccgcgtactgcgcgacctgccggaggcgatcgccgactacaaggggctgaccctctaccggcagacggtggtggactggctgcgccagttcgacccgcaggcctgcgccgcctga

SEQ ID NO: 346470 - DNA, 1134 bp, Pseudomonas aeruginosa
atggcaaattcatggcgcatttccgccctcgcgcatcgccaccgtgccctcggctcggcgctggaagactggaacggcatgggcaccgcctggacctatggcgcgacctcgttgagcgaggcccacgaggcgatccgcacgcgggccgggctgatggacgtatccgggctgaagaaggtgcactacgtcggcccgcatgccgagtcgctgctggagtacgccaccagccgcgacatctcgaagatctacccgggcaagtcggcctacgcgaccatgctcaacgaggccggcaagttcgtcgacgactgcgtgatctaccgcaccggccccaatgccttcatggtggtgcatggcgccggcagcggccacgagatgctggtgcgctcggcgcagggccggcaggtcgcggtgctcttcgatgacgacctgcatgacctttcgctgcaagggccgctggcggtggactttctcgccgagcacgtgccggggattcgcgagctgccgtacttccatcatctgcagacgcgtctgttcgaccgtccggtgatgatctcgcgcaccggctacaccggtgagcgcggctacgagatcttctgcaaggcggccgatgccccgctgatctgggacagcatcctggagaagggcaagacgctgggcatcattccctgcgccttcacggcgctcgactggctgcgggtggagagttatctgctgttctttccctacgacaattccgagaagtaccccttcgccgaccagccggccggcgacaccctctgggagctgggcctggacttcaccgtgtcgccgaccaagggcgagttccgcggcggtgccgagcatgcgcggctcaagggtcgcgagcgtttcaggatcttcggcgtgctgctggagagcgaccgtccggcagcggaaggcgacacgctctgggccgaggggcggcaggtgggcgtgatcacctgcgcgatgtactcgaagctgagcaacaggtcgatggccatcgcccgcctggacgtgccctacgccgaacagggcgcgccgctcgaggtgcgtggcagtctcaccgcccgtgccatcgcccataccctgccgttcgacgatccggaaaagaagaagcgcaccgccaaaggctga

SEQ ID NO: 346471 - DNA, 339 bp, Pseudomonas aeruginosa
atgatgagtgccttgagtggtggctggggactgttgatcctcgccgggctgagcgagatctgctacgccgcggtgatccccaggaccgatggtttcacccggctgtggccgacgctgtactgcgtattcttcatcagcctgagcctctggctgctgtcgatggccgcgcgctcgctgccgatcggcacggcctacgccgtatgggtcggcatgggcgcggtgggtaccgcgctctggggcatcgccttcttcgacgagccggccaatgccgcccgggtcatctgcctcgggctgatcgtcgccggggtggtcgggttgaaggtgttttcggcggggtag

SEQ ID NO: 346472 - DNA, 177 bp, Pseudomonas aeruginosa
atgagcatcagtaccttcgaaggcgccagcgcggttttcaccttcgccgacaagcccaccatcctgatggtgatcacctttctcgtcgccgccgtcagcctgttcgcgctggtggcgaccatgatccacgagaaacacagctacgccgatccgcaaccgaaaaagctcaagcactga

SEQ ID NO: 346473 - DNA, 1368 bp, Pseudomonas aeruginosa
atggaagagcaaacgacacccacgctcgaagaactgcacgcactgatagagatgaccaacacgctgaacatggaaatcttctactggtggtgcacggcgctgatggtcctgatccacgccgggttcctctcctacgagatcggcgcctcgcgcctgaagaacgcgctggccgccggggtgaagaacatcctcgcgttcggcttcgtcatccccagcgtgttcctctgcggctgggccatctacaacgccttcccggacggcctggtgccgcgcatggatgccttgctggcggccatgccctggagcgaatccatggggcccaacctcacggacaatgccaccggcatcttctggggcgccttcgcgctgttcgccgccaccaccggctcgatcctctccggggcgatcatcgaacgggcgcggatgagcgccttcatcatcctcaccattgccctgggcggcgtgctctggctcttggcagcctcgtggggctggcaccccgaaggctggctgaccgtgcagttcggctaccatgacgtcggcgccgcaggcgtggtccaccaggtcgcaggcttcttcgccctggcggtggtgatcaacctcggcgcgcgcatcggccgcttcaacccggacggctcggccaaccagatcgtcggccacagcatgccgatgagcgtggtcggcctgatgctgatcatcgtcggcttcttcggcttcctcggcggctgcatcatctacaacggcggcgcgcagtggatcaacatctacggccagccgaccaacctctccgccttcgccttcaacaccctgatgggcttcgccggtggcctgatcggcgcctacctgaccacccgcgagccgttctggatgatgtccggcgggctggtcgggatcatctccgtggcgccgggactcgacctctaccaccccggcctggcctacctgatcggcatgggcgtcgccgcagccgcacccttggtgaacaacctgctgctgaaactgcagctggatgacgcggtaggtgccttcgccgtgcacggcttcggcggcttcgccgggctggtgatcagcggcgtcttcctcgccggctacccgaacgtcaacggcatggccgagatcagcttcaccgggcaactggtcggcgcgctggtgatggcctcgctcggcttcattcccggctacgccatctcctacgggctgaagaagatcggcatgctgcgcgtcccggcgaacgccgaggaacgcggcctggacctcaccgaagtgcccgcccaggcctacccggaatggaccgccatgtacggccacgccagcaccgcggatggtcgggaagtcaccaccctggtcgtggaagccaaaccggcctga

SEQ ID NO: 346474 - DNA, 2346 bp, Pseudomonas aeruginosa
atgaaccttcccgttttttcccgccccagcgaaccggcgctgttcgcccgtgcgcctgcgcttgaacgtcaccgcgtcgcgccgggcggcctcaccgtggtcagccttgaggccggcgatcggctggaggtgatcgatatcgagggcgaccagccggccgaactcgccgccttcgccgacgacggccagcccgcgctggccgccctgggcctggaagcccggatggatgccgacttcatcgcccgcctgctcgccgctggcggtagcgatgccgccagggtgcgcctcggcctcgcccggcatcgtgtcgactgcagccgtacgctggttgccgcacggctctggcccgccgcgacgccagccggctttgcgcggcggctggaggccagcgacaacctgctggtggtggtcgccgcgccgggtgggcacacgccagtggacggccagcgacgcgccagcgaactgcgcctgctgatccagcgcgccaaccctcggcagactctccgtccgccgctgccggagccgatcggcgagctgctcgacgaattcaccatccggcccggcagcgcccgcgactatcgggtcggcgccggccagtacatccaggtcatcgacgtcgccggccggcagtgctcggacttcgtcgccttcgaccgtcgcggcctggatgccggtcaccagatcgacctcgacccgaccgtcacccgcaccctcaacggccatgcctatcccggccccggcctgttcagccgcttcttcgaccgcaacatgcagccgatgctggaggtggtgcgcgacaccgttggccgccacgacaccttcgccctggcctgcacggcgcgctattacgagtcgcagggctacttcggccatgccaactgcagcgacaacatcagccgtgcgctggccggccacggcgtgcacgcccgcccgggctggccggcgatcaacttcttcttcaacaccgccatcgacgcccaccagcagctcaccctcgacgagccctggtcacgccccggcgactacgtgctgctgcgcgccatgaccgatctggtctgcgccagcagcagctgcccggacgacatcgacccggccaacggctggcagcccaccgatatccacgttcgcctgtattccgaaaaggagcgcttcagtatcgccatggccactcgcaagactcccgacgccgatccggtgctgacccgtgaaagtggcttccatccggctactgccgcacttacccggcacttcgtcgattaccgcggctggtggacgccgacccatttcgacggcttcggcgccatcgaggaataccacggctgccgcgagcgggtggcggtgatggacctgtccgccctgcgcaaattcgaagtcatcgggccggacgccgaagccctgctcaactactgcctgacccgcgacgtacgcaagctggcggtcggccaggtcgtctacagcgccatgtgctacgagcacggcggcatgctcgatgacggcaccctgctgcgtctggggcccgacaccttccgctggatcggcggcgaagactacgccgggatctggctgcgcgagcaggcgcagaagctcggcatgaaggtgtggatcaagtccgcctccgagcagatccacaacatcgccgtgcaggggccgcgcagccgcgaactgctgcagcagctgatctgggcgccggctacccagcctgcgctggccgagctgggctggttccgctttctgctcggtcgcctggatgactacgacggctgcccgctgatggtctcgcgcaccggctataccggcgagctgggctacgagatctggtgccacccggaccacgccatgcagctctggcagcgcgtctggcagctcggccagccgctgggcctggtgccgctggggctgcatgcgctggacatgctgcgcatcgaggccgggctggtcttcgccggctacgagttctgcgaccagaccgaccccttcgaggcaggcatcggcttcaccgtgccgctcaagaccaagcaggacgacttcatcggccgcgccgccctggagcggcgcagcgcccagccgcagcgccggctggtggggctggagctggagggcaacgaggtggcgatgcacggcgacggcgtgttcgtcggccgcgcccaggtcggggtgatcaccagcgccacgcgcgcgcccgtgctgggcaagaacatcgcgctctgtcggctcgatatcgcctgctgcacgccgggcacccggctcgaagtgggcaagctcgacggccagcagaaacgcatcggcgcacgggtggcgagcagcacggtcgcctacgacccggacaagagccgggtacgcgcatga

SEQ ID NO: 346475 - DNA, 1371 bp, Pseudomonas aeruginosa
atgagcacccgtatcgccatcatcggcgcaggcccctgcggcctggcccagcttcgcgccttccagtccgccgcagccaagggcgccgagcttcccgaactggtctgctacgagaaacagagcgactggggcggcatgtggaactacacctggcgcaccgggctggacgaacacggcgagccggtgcacggcagcatgtaccgctacctctggtccaacgggccgaaggaatgcctggagttcgccgactacaccttcgacgagcacttcggccggccgatgggctcctacccgccgcgcgaggtgctctgggactacatcaaggggcgcgtcgaaaaggccggcgtgcgccagtacatccagttcaacacggtggtacgcgcggtgaccttcgacgaggcccgcgggctgttcagcgtcaccgtgcacaactacgacgaggacctgaccagcacccgcgaattcgactacgtggtggtcgccagcggccatttctcgacgcccaacgtgccgcatttccgcggtttcgagagcttcgccgggcgcatcctgcacgcccacgacttccgcgatgcgctggaattcaagggcaaggacgtgctggtggtgggcagcagctactcggccgaagacatcggctcgcagtgctacaagtacggcgcccgctcgatcaccagctgctaccgcagtgcaccgatgggctacaagtggccggccaactgggaggaaaagccgctgctctcgcatgtcaggggcagcaccgcctactttgccgacggcagcagcaagcacatcgacgcgatcatcctctgcaccggctacaagcatcacttccccttcctcgatgaaagcctgcggctgaaaaccggtaaccgcctctggccgctgaacctctacaagggggtgttctgggagccgaacccgaagctcatctacctcggcatgcaggaccagtggtacagcttcaacatgttcgacgcccaggcctggtatgcccgcgacgtgatcctcgggcgcatcccgctgcccgagcgcgtccacatgcacgccgaaaacatcgcctggcgccaggaagaggaaaccctcgaaaccgcccagcagatgttcgagttccagggcgaatacatccgtcagttgatcgaagccaccgactacccgtccttcgacatcgccgcggtcaaccaaaccttcctgcaatggaagcaggacaagtacgaagacatcatgggctaccgcgacaagtgccaccgctcgctgatgaccggcacgctggccaccccccaccacaccgaatggctgcaggccctggatgattccctgcaggcctatctctgcgacgagccggaacagcgcctgaaaacggttggctga

SEQ ID NO: 346476 - DNA, 1089 bp, Pseudomonas aeruginosa
atgctgctgctgatgcgtaacaccgcacgatcctggttcgccgaccggcgaaccaggccggagtcgtgcgaacgactgctcggcgacctgccgctgcgcctgctgcaacagccggacagccaggcgccgctgctggcgctgttggcctccctgatccggcacacaccggtgcggtacgcctggctgttgctgcccgatccgcaggatggcggctggcaggtgctgggcgaggcgcccgatgcctgcccccacggccagccgttgtcggccgctgacggtgctcagcgctgcgctacctgcctgaccgccggacgccatcggctgatctgcccgctggaactcgagcgcggtcggctggccgtgctgctgctcgattaccgacggcctcccggctggttgctgcaacggcaggccgtgcgcctggccgcgcgcctgggtgaggtgctgcgcgcgttgcggcagggcagggcgcgaggccggcacgaaaccgcgatggacccggccctgctagcccgcgagctgcacgactcggtggcgcagcagctgagttacctgcagatccgcgccacgcgcctgcaggccgtgctggacgagccggaacaagtccgcagcatggcgcaagacctgcaggaacagctgcgctgcgtgcatcgccaggtgcgcgcgctgatcgccactgcccgcccgggcatgaacggcggctcgctgcgccaggctctggaagcctgcgtggcggaattctcgcgtcgcagcagctgcgtattcgaactggacaaccgcctaccggccgggcacctgcccgatgcggtggccttcgaagtcctgcaggtcgtgcgcgaggcgctgaccaacgtgatgcgtcactcccatgcccggcaggtgcttatcgaactgcacgagcaggaccgacagggtttcgagctgcgcctgagcgacgatggcctgggcctgcggcagatgccgtcggaacacggccaccacggcttgcggatcatgcaagagcgcgccacggcgattggcgccgagctttcgatcgggccggccgagccatgcggcactctggtgcgcctgcgctggagtccgccatga

SEQ ID NO: 346477 - DNA, 282 bp, Pseudomonas aeruginosa
atgacaaagcacctgcgcgtgctgttggtggacgaccatccgctgctgcgccgcggagtcgccgaactgctcgatgcgagcgggcgcttcgccgtggtcggcagtacctccaccggcgcggaggggctggccctggcggcggtactggtcccggacctggtactgctcgatctgcacctgcccggcctcggtggcttgcaggttctggcggacttcaagcgccagtcgccggccagccgcgttgcaggctggcgccgacggctacctgctcaaggacattga

SEQ ID NO: 346478 - DNA, 375 bp, Pseudomonas aeruginosa
ttgcaggctggcgccgacggctacctgctcaaggacattgatccaaacgccctgctggccgcgctcggtgattgcgtcagcgggcggctggtgctcgacccggcgctcaccgaggtcctggccagcgggttgcgcgagcgcggcccgccagcggcggccccggccgagttgaccgaacgcgagcggcagacgctagcgctgatcgccgaagggctgaacaacaagctgatcgcccgccgcctcggtatcagcgacggcacggtgaaaatccatgtcaagcacctgctcagcaaactgaacctgcattcacgtctggaactggcggcctgggcctatcgcagcggccatatctctggttgggaggaaggcgcatga

SEQ ID NO: 346479 - DNA, 810 bp, Pseudomonas aeruginosa
atgagtctcctgcaaggctgtcggttcgccttaaacggcctcttgtggcgctggcggcagatgcctgccagcgacccacgcgacgacctcgactgtctcccgctggcgctggtgcggcttgacgaggcaggccgaatgtcacgcctgagcaacggctgggagcggctgagcggccaccggtgtggcgactgcctgtcgcgccgacacgtcgacttcatccatatcgaggaccagccccactggaaccaggcactcgaggcgttgcgcactggccaatccgagcgggtcttcctgcttcgctatctgacgcatgccggcgaattgcgctgggtggaggtgcgcctttgccgccagcaccagggctttctcgccagcctcgccgacgtcagtgcgcagatccccggacaccggcggctagaggccagtcaccgcagcctcaacaacctgctcgacggactgccgatgatgatttatcgctgccgcaacaaccgcgactggactatggaatacgtcagcgccgcctgtctcgccctgaccggctacagcgtggagcgcttggtggacaaccgcagcttgacttacaaccgcctgatccactttgaggacagggagcatgtctggcaggagattcagcgagcaatccgcgcgcggcagctatttaccatcgagtaccgcctggtcggtgccgacggccaccccaaggcagttcaggagcgtggttgcgggatctactccgatgcgggcgaggtgctcgggctcgaaggagtggtgatggagcaggcccgcacagtgcgccaatcgggacggtga

SEQ ID NO: 346480 - DNA, 711 bp, Pseudomonas aeruginosa
atggcaagaacgaatgaatttggtcaaaccatcggttttccagttgcaaactggacgccgagaccgcagccaggcgctgtgactttaaccggtcgttactgccgcctggaaccactcgatgcccaggcccatgccgccgaccttttcgccgcctatcggtctgcagtcgacgacagcgactggacctacctgtcgatggagtctttcggcagcgttgagcagtatcgcgaatatgctgagaaagcggcccgaagcgtcgatccccggcatttcgccgtcatcgatgcgagttccgacagggcggtcggcaccctggcgctgatgcgtatcgacccggcgaacggcgtcatcgaggtcggaaacgttgctttttccccgttgcttaaacagtcgacgcgctcgaccgaggcgcaatacctgctaatggcctatgccttcgatgaactcgagtatcgccgctacgaatggaagtgcgatgacctgaacggaccgtctcgcaaggctgccgagcgccttggctttcaatacgaggggacctttcgccgcgctgcgatatacaaggggcgcaatcgtgataccgcttggtattccatcattcgcgaagactggcccatcatcaaggccgcgctcaacgcttggctaagcctggataatttcgatgtggatggaaaacagcaccggtcattggcggcaattagggctactgcctaa

SEQ ID NO: 346481 - DNA, 1224 bp, Pseudomonas aeruginosa
atgaaggcgttgtcagctctggccccggaggtcaaacagtacctgctggtgaccggcaattactgggcattcaccctcaccgatggcgccctgcgcatgttggtggtgttgcacttccatagcctgggctacagccccttgcagattgccgcgctgttccttttctacgagatttttggcgtggtcaccaacctggtcggcggctacctcggtgcccggctgggcctcaatcgcacaatgaacattggcctggccatgcaggtggtcgcactgctgatgctcaccgtgcccgccgcctggctgaccgtgccctgggttatgggcgcacaggcgctgtcggggatcgccaaagacctcaacaagatgtcagcaaagagctccatcaagctcctggtgcccgatgcccagcagggcacgctgtacaagtgggtggcaatcctcaccggctcgaagaatgcgctcaagggcgtgggcttcttcctcggcggcgccctgctggccgtgctgggttttgccggcgcggtattgaccatggccggcgtgctggcgttgatctggatcgctagcctgttcttgttgaagaaagatctaggcaaggccaaagccaaacccaagttcagggacatcctttccaagagccgggcgatcaacatcctctctgccgcccgcctgttcctatttggcgcccgcgacgtctggttcgtagtcgccctgccggtgtacctgagcacggttttcggctgggacttctggatggtcggcggttttctggcgacctggatcattggctacggcatcgtgcagtccttcgcgccagccctcaccggcaagcgcagcgggcatgtgcccgatggtcgcgctgcgtttctctgggcggcgctgctggccggcattccggttgtcattgccctcggcctagatagcgactggcctaagcaagcggtgctcgtgggcggactgctgatcttcggcggcgtgtttgccatcaactcgtcgctgcacagctacctgatcgtcagctacgccaaggaagacggcgtgtcgctggatgtcggcttctactacatgtccaacgcgcttggccggctggtcgggacactgctgtctggctgggtcttccagcagtacggtctggaaacctgcctgtgggtctccagcggatttgtcgtgctagctgcactgatatccatcggcctgcccagacaccaacaaccgacaacctaa

SEQ ID NO: 346482 - DNA, 1005 bp, Pseudomonas aeruginosa
atggctatcaagattggtatcaacggtttcggtcgcatcggtcgcctggcgctgcgcgcctcctgggattggcccgagttcgaatttgtccgcatcaatgatccggcaggcgacgccgccacccatgcgcacctgatcaacttcgactcggtgcacggtcgctggcaccacgaagccggcagtgatggcgattgcgtggtgatcggcggcaagcgcatccaggtcactgccaacaaggcgattgccgacaccgactggtcggactgcgatctggtgatcgaggccagtggcaagatgaagaccgtggcggtcttgcaggcctacctcgatcaaggcgtgaagcgggtcgtagtctgcgcgcccgtgaaggagaaaggcgcactcaacgtagtgatgggcgtcaaccagcagctgttcgatccggcgcagcaccacatcgtcaccgcagcctcctgtaccaccaattgccttgctccagtggttaaggtgatccacgagaacctcggcatccgccacggttcgatcaccaccattcatgacctgaccaacacccagagcatcctcgacaccccgcacaaggatctgcgccgtgcccgcgccagcggcatgagcctgatcccgaccaccaccggctcggccaccgccattgccgagatcttccccgagctgcgcggcaaactgaacggtcacgctgtgcgtgtgccactggccaacgcctcgctgaccgactgcgtattcgaagttgagcgggccacctcggtggaggccgtcaaccaactgctgaaggcggctgccgaaggcccgttgaaaggcatcctcggctacgaggaacgcccgctggtctccatcgattaccgcaccgacccgcgctcctcaatcatcgatgcgctgtcgaccatggtcgtcaatggcactcaggtgaagctctatgcctggtacgacaacgagtggggctatgccaaccgcaccgtggagctggccaagctggtcggcctggccgtttaa

SEQ ID NO: 346483 - DNA, 501 bp, Pseudomonas aeruginosa
atgaatcacccctacgacctgctcagcatccccggcatcaagggcaaactgatcttcacgccctgtcccggcaccaaggacagcagccttgccgactcgctggccacactcaaacaggccggcgcctctgccgtgatcagcctgatgccggcaagcgaactggccgccaacggggctgaggacattggcaagcaatgccaggtgcaagacatggcctggttccacctgccggttgcggatgaacaagtgccgcttgaggatttcggccagggctggaaagcctccaaacaaagcatccttgaacggctcaacgccggccaggacatcgccatccactgcaagggcggctcggggcgcaccgggctgattgctgcgcgaatcatgatcgaagccggcattccccgcgccgatgccatcgccctggtgcaagccctgcgtcccaaggccattcaacacccggcccaccttaactggatcacccagttcggtgccgcccactaa

SEQ ID NO: 346484 - DNA, 471 bp, Pseudomonas aeruginosa
atgaaagttctctttctctgcaccgccaatagctgccgcagcatcctgtcggaggccatcttcaatgcgatggcccccaagggcatgcgggcctttagtgcgggtagtcaccccaagggagaagtcaacccattggccttgcaggcactgcttgatgccgggttcgatgttgaaggcctgtacagcaaatcaaccgatgcccatcaggctcttgcccctgacatcgtcattaccgtctgcgacaaggcagccggagaggcctgccccgttttttttgggccggcaactcgtggtcactgggggctgagtgacccatccgaagtcaacggttctgaggcagaaattgacaccgcgtttgcagccaccatccagcagatacagaagcgagtgagcgcatttatcgcactgccctttgctcaactcgatagcgatacgctcaaggcagagctgaacagaatcggctcgttgtag

SEQ ID NO: 346485 - DNA, 783 bp, Pseudomonas aeruginosa
atgagccagaaaaagcgcgtcctgttcctctgcgtagccaactcagcacgctctcagatggctgaagccctgcttcgccataccgactcagaacactttgaggtctgtagcgcaggttctgcccccacagaagtcgacatccgagcgcgcgatgcgctggagcatcttggtgtttccactgacgggctttatagcaagtccatcgagcaagtcgctggcgagcctttcgactatgtgatcacgctatgtgacaagtctgccttggagtgcttggcaatgcctggcgccggcgaatacatcgcctggaacttcgaagatccggtgacaagctcgcagaaagacgcctaccgcaagaccctgcatgagattcacgaacggataaagatgttcgttctgatcaaaaacagaccgactaaagaaccttctggcagccaagccatgtcgccaaccgaggtgttcaaatgcctggccgacgagacacgggcgcgtatcgccttgctggtgaccctggagcaggagctgtgtgtctgcgaactgacctcggcactggaggaggcgcaacccaagatctctcggcacctggcactgctgcgcggctgcggccttctggaagatcgacgcaatggccagtgggtgtactaccgcctgcacccgcagctgccggaatgggtgaccggtatcctcaagcagaccctggacaacaatgccgagtggttgcgccaagacgtccaacgtctctggcaaatgcgtgatcgccctgggcgcaagcctgcctgcaattga

SEQ ID NO: 346486 - DNA, 273 bp, Pseudomonas aeruginosa
atgaagaacctcaccctctcagcactgctcctctcttctctgttcaccggctccgttatggccagcgaattcgataagcctggttttgttaccgaggttgaggatggtcgtctatgggttttccgcgaggactcccaggagctaaaagatttcaaagcctctggtgagccagccaagcagttcaccgatatcggctctggcccgaatgggatgacagtcaaagcagctgatgagaagacactcaaggactaccttgaagtcatcaagaagtaa

SEQ ID NO: 346487 - DNA, 801 bp, Pseudomonas aeruginosa
gtggtgaatgtaggcgtgcgtgattccacctacgtgctcgacggtctgctgtaccacgagtccgatctgcggatcgaggagcactacaccgacaccgctggcttcaccgatcacgtcttcgccctgatgcacctgctgggcttccgcttcgcgccgcgcatccgcgacctcggtgaaaccaagttgtatgtgcccaatagcgtccaagactacccgacgctgcgtccaatgctcggcggaaccctgaacatcaagcacgtctgcgctcactgggacgagattctgcggctggccgcgtcgatcaagcagggcaccgtcaccgcatcgctgatgctgcgcaagcttggcagctacccgcgccagaacggcctggccgtggctctgcgcgagctgggtcggatcgagcgcacgctgttcatcctcgattggctgcaaagcgtggaactgcgtcgccgcgtgcatgccggattgaacaagggcgaggcgcgtaactccctggccagggcggtgttcttcaaccgcctcggcgagatcagggatcggagtttcgagcagcagcgctaccgggccagcggcctcaacctggtgacggccgccatcgtgttgtggaacaccgtgtacttggagcgcgcgacccaggcccgagaagaggcaggcaagccagttaatcctgagttactgcaatacctttcgccattgggctgggagcacatcaacctgaccggcgattacgtttggcggcaaagccgcaagctggaagacgggaaattcaggccgctgcggcagctcggaaaaccttag

SEQ ID NO: 346488 - DNA, 1170 bp, Pseudomonas aeruginosa
atgtttcctccgaccaatcatcagagcaggatgttctacgactacctcacggtagagcaggtattcccgtaccagctcccgcaggttggcgacactggcatctgctactacgaccggaggaccggcgagcaactgcgcgacacgtctcctagcttcaaggttgagggcagtcactcgacgtcgattcgggttcgggtcgatgggaacaagctccgagtcgaagggaatccgagtgcagtcaaccgcttggacaacctgcatggattccagtccatcgctgagtgtgtcgcggtctataacgacatcctccacgagatcaaggacgacaagggcaaccgtctgccgccgttcacggcttgcactgattggggccacctccagaccgaggacggctcgaaaactcggatgatcggcaacggtgcgcgcctgcgccgggttgacttgacgacgaatcggacggtggggaagggcaatgaactggcctacatccgcgccctgagtactcagcgtgtgggctacaagaatggccacctctacgaagatggttggacctgcgactggcaggcccgcgaccactactacaaggcctacggcaaggctcaggcaatccgcaagttcctgtttccgaagtgcaaacggaactttggcgaagactcctccgaattccgctacctgctcgatctggccgcgtactgcgatcagcagggcgtcgtgcgcatggaacaggaactcaagagtgagtatctggcccgtgagcggctggagtggtgggggctttttgatgaaggccgctttgcggcgatccatggggagtttctgaggggattcgacaagctcgaggtgatggcgatggattacgagacgattgcggaaaggctgctttctgaaggggttgtaggcagcactcaagcggctaatgcgaccgccaatattgcgatgaagtggatgcactgcccgggcatcagtttcgacttcaaaaagcgcatgaatcagacctaccgggcgcgcttgaaccggatcggcatcaatatcgcccagccctacgacgtgacccgtcattcggtcgtgatgattcgtcgtgctgaggaaatcgtcaccagcgacgtgctggatttgccggagttctatcggcatgcaccgcgcccacgtcacctgcggttggtggcctga

SEQ ID NO: 346489 - DNA, 939 bp, Pseudomonas aeruginosa
atgaagctgctagcactgatcctttccttgcccaccgagaatgccactgctcggcaacgggcttggcgctcgctgaaagcctccggggcggcagtgctgcgtgatggtgtctatctgatgcctgagcgcgaggactgtcgcgccaccctggatggtttggcctcagatgtacgggacgctggtggggcagcccatgtgctgcgcgtcgaagagcctgagggagcgaactttaccgacctgtttgatcgcggcgaagactatgcggccgtgctgggtgaagtcgtacaagtgcggaatgtgctgactgccgataccgtgcaggacacgctcaagcaggtacgcaagctccgcaaagctttcgccagcctggtcgaaatcgactttttccctgatgaggcacaacagcaaacggataaagccttgcaggagctggagctagcctgcgcccgggccctgtccccggatgagccgcacgccatggccggtgtcatcgcgcggctgcattcatccgactaccaggagcgcacctgggcgacccgccagcggccatgggtggatcgcttggccagtgcctggctaatccgccgttttatcgacccacaggccaggattctgtggctggccagtcccggggattgtccggccgatgcgctgggtttcgacttcgacggcgcgaccttcagtcatgtcggcagtcgcgtcaccttcgaggtgttggcggcaagcttcggcctggagcagcccgctatcgcacggctgggtttacttgtgcattacctcgacgtgggcggcgtgcagccgcccgaggccgccggtatcgagagcgtgctagccggactgcgcgaaaccctgactcaagacgatcaattgctgaccgccgcttccgccatttttgacggattgctggccagtttcgacaaaggagtaccctcgacgtga

SEQ ID NO: 346490 - DNA, 939 bp, Pseudomonas aeruginosa; identical to SEQ ID NO: 335811

SEQ ID NO: 346491 - DNA, 447 bp, Pseudomonas aeruginosa; identical to SEQ ID NO: 320902

SEQ ID NO: 346492 - DNA, 327 bp, Pseudomonas aeruginosa; identical to SEQ ID NO: 16903

SEQ ID NO: 346493 - DNA, 1014 bp, Pseudomonas aeruginosa; identical to SEQ ID NO: 80749

SEQ ID NO: 346494 - DNA, 840 bp, Pseudomonas aeruginosa; identical to SEQ ID NO: 6027

SEQ ID NO: 346495 - DNA, 756 bp, Pseudomonas aeruginosa; identical to SEQ ID NO: 334462

SEQ ID NO: 346496 - DNA, 1005 bp, Pseudomonas aeruginosa
atgctgttccaggacacgctggcaatcttcgacagtagccctgacgagttcatattcgaccgcttccaggacgagctcatcgaccagatgaagcggcccctgggcctgcgttatgaccagatcctgctcgagatcaccaacggccagcaggaacagcgccggggcactctggtcgatctgcccgcacctgccgcaccacctgaaatcccaccagtagggcaggaaagtcctgccgcgtcgactactggacaagcacaatcacagagccccgctgccggcctccaaacgtccaagaccaatagcctcccgggtaatccctctaccccgccaactccgccgctacctgtacaacagcagcaactgaccgatgaggagcgtgcagcgctcttggcaggccatatcgtgagtccggtatcgaccaagatccagcagactcgccaacgtctggccgctctcgagggtgaacatctacctgtcttcgatgaaacagccctgcaggcaatcccagtgcaagtcggcggtctgcacccgatcaccgacctctggtacatcgagcggtcgatcgatacccccgagatcctgcgacagcacatcgctgacctggctgaagagatcgctctgcacgtcggcgcccctggcgaaatcgtcaggatccagggcggtgtgggttacacgtatcgcgagcccaatgaagaccctgagattactgattcagcgctgcacctcatgacgctgcttcaagcgctcagcggccaggtccaagtcgtcctgaactcacacgaccagcagacctgccgcgatgcactgggtgaattccagttctcagctggcctcgctcagttgctgctgggccaacccaccacaagcgatcagccatccaaccaggcaggccgtctcaatgacgaagccctggtgaaactgttccggatcattcgtcttgcccgacgcctggttgaccttgagctgccgccggccaccttcgagcaagcagctaccgaccagtga

SEQ ID NO: 346497 - DNA, 543 bp, Pseudomonas aeruginosa
gtgtgcgacgagcagcgcaacctggtctttctttcggcctggggccgcgacaccgtgacacaagagttcctggccaggctgacgctgggccgggaagaaaatggcatcgaccatttccacatcatcgtggacggccgccgcttacctgtcttcccaaaccaggatctcctggagaaacgcaccacccgccagttccgcggcacgttgttcggcagcctgctcaatctttggctgttcgatcggcgcgcctcggcgcccgaccgaggcaatcacctcgccttcgcactcctgcagcgcgatgaggatccacaccaaaggctctggccgctggtgatggagacctgtccgctccccctcctgcagcactggcgcgagccagtgatggaggtcctcacccagcaccagatgttgacggccctacccgggacgatcggcaacgtctgcgcctggcgactcgccctgcgggtcgacgtgctcgagcccaccctcggtgagctgatccgcgaaagcattcttaccaccgatgctcaggcgcaagcctga

SEQ ID NO: 346498 - DNA, 255 bp, Pseudomonas aeruginosa
atgaacccactgttcaccaacctcacccaggaaaccctcgcctacctcgaggaccaactgtccaacaacgacgtcgccggcgacgacgagctcatcgacctgttcatcgaggagctgtcgctgaccttggagcaggcggaagcggctgtcgcgctacgcgatcagtacctctgccaggtcttcctgatcggccaagggccgctgcaccaagccgatgggctctgcttcgaccctcacaccaagagcgttcggtaa

SEQ ID NO: 346499 - DNA, 213 bp, Pseudomonas aeruginosa
gtggtgccgaccctgcaggaactgcgcaagcagggcgtgcagatcatccgctccccgcacatcgccaacatagaacttcaatttactattggcataatgcttccgcatatcatcctgttttttttcgtcacggctaaatatacggatctccgcaatatctgtgtcgagaaaacgtttaagcacagcattaccgaaagaacccgtaccacctga

SEQ ID NO: 346500 - DNA, 150 bp, Pseudomonas aeruginosa
atgaccttccttctgctgtggtccgcctgggcgatgtacagcacctggcgcggctgggccaccaacaacctcgacagcgccactgccggcgcttccgcgatacggatcttggtcctcctcggcatcacctctttcttcctcctcagctga

SEQ ID NO: 346501 - DNA, 348 bp, Pseudomonas aeruginosa
atgagattcgcaaaggtattcctttccttcggcgttatagtcctctgcgtgctcctcatcggtggcaccagcgaggccattcgaaagcacgtcacccagtccatctatgattcttcacccgaagtaagggcggcgatctcgcgcgcgtccacgctgttgaaaagcagcgccgctgccgagcagaaacaagtcatcgacgagttccggccttaccgcgagaagagcgaccaagcctacagactcatcttctggggccagataggcgcttatctcgccctcatgctggcgtcgaccttcctctatctgcgactcaatcccagagccccgaaagagcccgtgtcggattga

SEQ ID NO: 346502 - DNA, 357 bp, Pseudomonas aeruginosa
gtgaccttcgtgaacacgaagtcgaagcgggctcggtcagtgcctatcgatagcattctcgaggacgccctgcaggatcacttcaccaggtacgggactttctccaactgccgtaacagcttcgatcagaccataaagacctgtatcaccctccccgccggccaagcatcccacgtgttgcgccacaccttcgcgtcgcacttcatgatgaatggcgggaatatcctgacgctacagaagatcctggggcatacgtcgctggcgatgacgatgcgctatgcacacctgtcgccggatcacctgcaggatgcggtgaggctcaatccgacacgggctctttcggggctctgggattga

SEQ ID NO: 346503 - DNA, 609 bp, Pseudomonas aeruginosa
atgagtattgataaaaagatagatggaagctggctagttgatattgagccggttaagggaaaacgctttcgccgtcgcttcaagacaaaagccgaagcgcaacgcttcgaagcactgatgcgtcagcgcctggcgcagaatccggaatggaatccacaacccaaggatcgtcggcgactgtccgagctagtcgagcgctggagtgttctgcatggtcacgcactgagcgatggcgagaaccgcacacggctgttactgcagctggccgaagacctgggagacccaatagcgctacagctgacgggcaaccagtatacggagtaccgggcgcagcaactggccgcaggggcgcacggcaagaccttgaacaaccggctggggtatctgcgggcggcgtacaacgagctgcaccagttgggcgagattgactacgcgaatccgctgcagcgggtgaagttgctcaagctccaggagcgggagttgacctggttggccgaggaacagatccgcacactgtttaaagccatcaggaagcgctgtaagggtttgcctcgcgctggggagaggctgaggggcttgttcctggacgtgtgcgcggcggctgcgtga

SEQ ID NO: 346504 - DNA, 1170 bp, Pseudomonas aeruginosa
atgaaatacatggggcataaaggaaagcttcttcctgttttaggcgagattcttaaaacagaaagcgccagctcctctgcaattgccgacccattctgtggctctgccgctgtatcgtggtatctagctcaaaacaccgaaaagaaagtcgtatcaggcgacctacagactttcgcaacttgcagagctgctgcgattattcaacgaacacaatctattgacttcaattccaccatgaaaacatggtggaaaagatctcaaaaaatagtagaggatatagtagagcgctttccaaactctgcaagatctctcgaaccagaccaacagtccaccgaggacattattggccttgtaattagatcaagaatattttgcgatactgtcctccccgccattctcgcaggaaataaacatcaatttcctatgacaaaggcttatggcggatattacttttccccgctccaggctattacgctcgacgccctgcgctcaaccttaccgagagaatcaaacgctcgtgcgatagcccttgcatcgctgatcgaaactgcgagcaaatgcgctgctgcaccaggccataccgcacagccattccagccaacagaaacctctgcaaaatacatctttgaagcatggcagcgcccgatttttaaaattctcagcgaagcggcaaagagcatatcgaagcgccacgcaaagactgccggcgagaccatcaccggcgacttcaataaaactttatccacactgaattcagaagatttagtatttgccgacccgccttactcaggcgtgcattacagccgtttctatcacgtcctcgaaacattagccaaagggaaagagatctctgtgtctggcagaggcagatatcctgatatctctcagcgtccaagctctctttttagtcaaaaaagccaagcaatggctgcagcgaagtccctagtcgagggatgtcatcaaaaacggttaaaccttgtacttaccttcccttctgagggatcaagcaatggattatctgcaagtgatttcattgatatagggcgcaatcttttttcctctattaaacaacatgaaattgactcagacttcagtacactcggaggaaacaagataattagaagcgcccgcctaaagtgcaaggaaagcatcgtctgcttcagaatatag

SEQ ID NO: 346505 - DNA, 1248 bp, Pseudomonas aeruginosa
atggccgcacgcaatggaaggcgcaaaaaaccgaatagccggacgaatcaacaacctgactacgaggccatctgccaactggcagatggaacaggtgtccttaatggattcgaaagactcggcccgataaatcaatttacggatttacttttaccacaaaacaatacggaccctgcaatgagacttgcagcggaacaaatatttcatatgattgaaggttggcgctacgcagcgtctgcaactgcagcctaccttagtaactccaagcataactccgtccacttctcctactatgccgaactcagagcagctctttcgctgctaagctggagcggaataagagtccgacaaggcgatcactattacttagacgggcaaaatacaaagatcgctattggaagctgccgaacccatacagccgtttgggcattctggcagcactggacaaacagagcagatgctaattcattattcagaaacaaaatcagattcgccccaagcgtagcactcgcagacgttctggcatctcttcaatatatccagcctcatgcagccctgcaaaactggggaatagacctggcgaagattaaagatgaccataatgcgagaaacacgtctagctacgaagcaatatgggcaaccactcctttgacgagaatgaacgccaacgatgctgagttaatattaagtctttgggatctaattcttccaagcgaaggttctggcctaaggttcgacagcgctttaatctctcactttgttcaagccgcactcccgggcatgatgcaaataacaggaaaaaatcaaagccagataactgtagatattgcaaaaaatatatctcagaacactggagccgactacgacatcatcttgcgccgacttaacccagcactgtacaatactaccccttttagcttggcagcgtccgttgacaccaatccagaaaatgtaatgtgccgggcatttttccttcttcgactgtcaatgcttgcagtgaaatcaagtcttagctcagtaaccaatacagccactactcaatggctgtcaaactggctagaacatgcaggactttggcaggaagatcccaacatactccccgaagacatccctattgattatgaaaatgcaattggcagcatcgatgtaagcggcagcctgccgtttgatatctggttgcctaacaatctagaaaatacagccaggctcgttcggcctgacgcttgtttagtttggaacgtactttaa

SEQ ID NO: 346506 - DNA, 1572 bp, Pseudomonas aeruginosa
atgaatggacaaaaaatcccactcctgaaagtaaaacaatggcttaattcttgggagcaaagcatttggtctcctgacgaaggattaccgaagcctcctcaaaatttctacattgcgtctatgcctcttaagctattgagaaacttagctggggttagccgaagacaaattgaagaaaggaaaaaggttgaaaagggggcgggttatcagcgcgctcaccaagcaagccggtcgagaagcattgctcgttatattcaatttggctatccactttccaatcagaccggactagagccaaacgagcatagcaaactaatacatcctggctggctcccaatgtcgatccttgtgaatataatcaagcctggagaaacacgacgcaggagcggaaaagaagtaacattagaatcggacgaagcagtaacaatatccgaaagcaatggctttagcttcttagagatcccctcttcgctagactccacggcagcaggaagcaaaaaaagtgctcttgagcctatcgagattattgatggacagcatcgactttttgcagttgacgagcttaccggcgaagagctggatgaaaactatgaagtccctgttgtatttttcgacggcctcacagagtcttggcaagcatatctattttgggtaataaacgtagagcctaaaaaaatcaatacaagcttggctttcgacctttacccagagttaaggagtcagtcttggcttgagagcggagaaggtattaaagtataccaggagcatcgtgctcaagaacttacagaagtactttggcgtcaccctaagagcccatggaaaagtagaattgagctccacggaaacagaatagacgggcatgtttcaaacgccgcattcattagatctctaatggtaagttttgtcagacgctggggtaacgaacacaaagttggcggcctatttggatccatagataagcaggggaaagaaaaagtcttaccatggaaaagatctcagcaggcagcatttctaataacctgctggacaatggtccatgaagccgtaaaaaactcaaaatctccttgggttttagatttgcagagttgtgaaaaaccagagaacttagatcttctgcaagaaaaaaatgaattcctcaagaatactgcattctctggtccgaacactctgctagcaacagatcagggctgtcgagctattcttctagtattcaatgccatgagccaaattgcctattcagaaattggcctagaggaatgggaaattgacgccatctcagatactccaaacgatgaggatgtatcattagcgcttgatgaactgtccagactaaagcccataaacagctatctttacgaaatagcaaaagcattaactgataccggaatggattggagaaccagtagcgcgccttctctttcacgggaagagtcaaaagtccaatctgcttacagaggtagtagtggttatactctacttcagcaagagtgctacaaacaccttattaagtcgaaggacccgctagttgttgagtctgcaaaagcagccatttcgctcctgggaattaagtaa

SEQ ID NO: 346507 - DNA, 207 bp, Pseudomonas aeruginosa
atgctgaattacttgcttgtgaccgctgctctcgcaatggcacttggcctagcttttgaagtcctgcgtccggtcgaagagagccttagctttcacctggtcaccagtaccgtccgcgcattggtgctctgggtcatgcctgcgacggcaatcgccactctgttctatggcgcttattggctcgcaatacagaggagggggctatga

SEQ ID NO: 346508 - DNA, 291 bp, Pseudomonas aeruginosa
atgcagaccctctcgcaatacctgtatcgcccacacgcaccggactgcgactgctctgtgtgctttgtcacaaggctggggcccgtattgctcaaccagtctatgtgcgccgactgccagccccctgggcgcccttatctgctcgatggccgctggcactgccgtcgccgttcttactgcgtgaagcacgacccaagccgtcgaccgccgaagtactggcacgttgtctacgacagcggcaagccgactccatttgttcccatccgcgaacccttcgagttggagggctga

SEQ ID NO: 346509 - DNA, 300 bp, Pseudomonas aeruginosa
atgcaattcgaactcattgccctgtgcctcaacgtcaagaaagtcaccgtcgaaggccgcacctactgctccgcgatcattgctcgcgaacccatgaccgagcaggagcgtctgcagaaccgcggctacctggtgcagaaggtcagcgcggaaaccgccgtcttcgaccagatcaccgacctcgataagcctggtcagcgcaagttcttggccaccctcgtcaacgcggctggcgggaaaagccaaccgcacttgctcggtgtggtgcccatgccctcgaacagcaaggctgccgcgtga

SEQ ID NO: 346510 - DNA, 252 bp, Pseudomonas aeruginosa
atgaaaggcatgaaaaaccagatcgccaagttcaacccggtccgctccttccgcaacctgtgcatcgccggcaccgtcaccgctgcctcctcgatgccggtgtgggccgccagcgtcatcgacaccagctcggtggagcaggccatcaccgacggcaagagcgacatgtccaacatcggcggctacatcgtcggtgccctggtcatcctggctgtggctggcctgatctacagcatgctgcgtaaagcgtaa

SEQ ID NO: 346511 - DNA, 1137 bp, Pseudomonas aeruginosa
atgcgctggcttctgttcacacttcttgcgctgatgtgctgcgcctcggcgatggcggaggactactactgggacaacggcctcgatggcattaagtaccccagcccaaaggcggcctgtcaggcggtagtcgatagaaacgaggcgagcgctgccaactcctaccccttccacgccacccggctgacggcaacgctgattgaccccggccagaacgctgcccgctgcgatatccactacgcctaccagcagaacgaagcgatttggaaggtgcaatttccggactatcccaagagctggacctatgcgtcgcgcgttgtcttccgtaagggcaacggctgcaccgagggcgtctacaacaccgagctaggacagtgcgaggcaccgcccaaagactgcgagtcaaccaagggcgaacccttcccggcgaagggcgctgatgcgccggtcgtcaactctggtggccgaaactacgttgccgatgccggcccgcccactgcctgctaccagcagtgccagtacaagagcgagtccggccgctccaccagctgctatctggtcaaaggctccaccacccaaggcttctgcaattacatcctcaacggcaccggcgatccactgaaccccagcaccgagccgccggaccctgccgtccctccctcagaccccaacgatcccggctgccccgaaggctgggtatggtccggtacgacctgcgtgaaagctgacccctccaatcctggcgatggaagtggtgaaggcaacggagaaggtggtggcaacacgggcggcggaaccggcggcggcgatggctccggcaatggagatggaagcggctccggcaacggtgacggctccggcagtggcaatggagatggcagcggctctggcaacggcgatggctccggcagcggtaatggagacggcgacggggacggcgaaggccaatgcgaccccgccaaagaccccaacggctgccagggcgaaggccccggtaacgagctgaaagagcccgatgccggcagctgggacgaagccaacaaagagtgggagcagaaggttcaggaggccaagaaagaactgaaggatgcggtgaaagccaacatcgatcagctcaagggcgccttcgatctctag

SEQ ID NO: 346512 - DNA, 357 bp, Pseudomonas aeruginosa
atggaatggctctccggctttctcgaccagatcatcggcttcttccagtggatttgggacttcttcgcccagggcatatacgacttcgtcaaagacggcctggtcgtggcaaccaaggcgatcatctacagcaccctacagaccttcatcctgctgctcgatgtcagcttcaccgtcgcccgcgagctgatcgacggcctcggcatcccggccatggtgcgtggcatgtacgcagccctcccggcacccatcgcagcggggctggccttcttcggcgtgccccaggcgctcaacatcatcatgaccgctgccgccacccgcttctgcatgcgcttcgtgccgatcattgggaggtga

SEQ ID NO: 346513 - DNA, 1116 bp, Pseudomonas aeruginosa
atgtccatcaaaattcaccacggccccaacggctcctacaaaacttccggcgcgattcaggatgacgccgtccccgcgctcaaggatggccgcgtcatcatcaccaacgtccggggcttcaccctggaacgtgcttacatcgtcttccccgatctgcccaacaccgcgcagatcatcaaccttgatctcgaatccctggccgacctcgaaaagatgcgcacgtggtttcagtgggcaccgcggggcgccttcctgatcttcgacgaaacccagctgctgttccccaagtcctggcgcgaacgcgatctggagaagttcgacttccccggcggccccgaggcagcacacgaagcggataggcccatgggctggctggatgcctggacgcggcaccgtcacttcaactgggacatcgtcctcaccacgccgaacatcagctacatccgcgacgacatccgcatgacctgcgagatggcctacaagcactccaacctcgcggtcatcggcattcctggccggtacaaggaggcccagcatgacgcccagctcaaccgaccacctgccgacggcaccatcgtcgaatacaagcgaatcaaaaagcagaccttccgcctctatcaatccaccgccaccggcaagacccaggacaccaaggccggcaaaagtctgttccggtcgcctaagttggttcttctactggcactgctggccggcactattggctttgtcagctatatgggacctctcaaggtcatcggcggcaagcctcctgaagccgctcccgcacctcacttggcggctcctgcggctagccctgatcccgctgcgcaaatccctgctgtggctaattcagcgcgttctgctgcgagtagctttgttcctgctggtcttctacctgctgggccagctggtgcgtctgttgacctgagcgcgcatcccttcgctgatcgccgcatcagcatcctcgcccacgcctaccggcgctcgaagggcgacatctacatgttcgctctggacgacccagaaggccggcatgaatccctctacacccatcgcagccgccaccagttcgccgccgagcactgccccttcgctgacggtagttcccgactctga

SEQ ID NO: 346514 - DNA, 1275 bp, Pseudomonas aeruginosa
atgaaggcacccaaggacctgatccgcatccacttcgacgacacgggcaactttgaagaatccgcctccggacggttcttcctggacccgggcaacggatcctcggtcgacctttccgcagtgcggatcctcggctgtcacgtcgacacggttcgccagctgtacaccggagttcttcgtcccgaagtcctggccctgttcgaggccacggaactggtcgacttcgctggacgacaatggcatcccggacgggtagggcgggactccggctaccagttcaagctgcagaacgcagaccttggcctggtcctgctgatcaagaactacaacgtcaaggccgagtcacccggcccacacctgaagatcgaagtcagccctcacctgatcgagcagcattccccggccaacctgcaggtgatgctcggagatctggccagcaagatcctcctcgcagtcgagcccaggcaatgcgctgtccacctcgctgtggatttccagggctggacgccaccctccagcctggtcagccgcatgcgctgcaaatcccgcaatgtgcgccagttcgatggcatcggcgacgtggtctttgacgagctggcagctacctacagccgtggccagtcctacctgttcggatcggcctccgccatgcagtgcgccctgtacaacaagacccgccaagccaaggccgtagataagctggattactgggaaaaccgctggcaggaccaggacaaccccttcgacgcggacccggccaactacgaccccgaccaggaggtctaccgcctggagtttcgcttccatcactcggtggtcgagcagttcgcacaaggatcctgcgatgcatccggcgcagtgctggggtccaccaccttcgctgaactatccgctcacctgcagggattgttcgagtacggcctggacaacttccggcttctacaccgaccaggctacgtggatccgctctggacgctactgcacagcgacgcgagattcctcgctccggtcgaccgcttcttctaccgccgttactacaagacggcccggggcttctcgggaaagaacatagagctgatgctgggcaacgccatcacgctcttcgcgcgtaaccgcatggacttcctgtcctgctgggccgcactcaagtcgttgccggtgttcccgctgatcgaggagtattaccgggagaagggcaggtctacgacctggttgaagaagcatttggccaaaaagctggaggagcgctacatccgctatgggatggccgcttga

SEQ ID NO: 346515 - DNA, 249 bp, Pseudomonas aeruginosa
atgcgcgttgaaacgatcagctacctcaagcggcatgccgcagacctcgaccttgacgagcccatggtcgtcacgcagaacggcgtgcccaccctggtagtcgagtcctacgccgagcgtaggcgccgtgaccaggctatcgccctggtgaagctgctcgccatgggatcgcgtgagtacgctgaaggcaagcattgctctgctgacgaactcaaggcccgactggccaagcgacgcacgcagcagtaa

SEQ ID NO: 346516 - DNA, 342 bp, Pseudomonas aeruginosa
atgacagtacgcgagatccgcttcactgaaacggcagtcttcagcatccaggaccaggaagaacacctggccgattaccaccctcccgaacttgctgcagcaaagatcgacggcttgatcgatgagatcctgaccaggctgcaggatgcccccgtgggttacccggtcagccgccaggccagcgacctgggagtgacccgctatcgcgaactcaaccacgacggctaccgcgtgctctacgaggcctacgagcacgaaaacgtgatcgccgtagaactggtcctgcgccagaagcaggacgtcgaagcagcccttatccggtactgcctggtgggcatctga

SEQ ID NO: 346517 - DNA, 648 bp, Pseudomonas aeruginosa
ttgtactggttaggaccatttcagtactcatccaaacaagagctgcttgataggctcaaggtcttcgtgggcaccgcaccggttggcaagatttcgcacaaaattgccatccaaaagcttcatctactcattgcgctacacccagacgcagagcggaaaattgggtcaggcattgaccacttcaaagtccagcggaatgtgttaggcgcgggccagggactttggatcgttcgcagcgacggcacagaagagtcgttctcctacaagctctgtatcaccggtgtacgccaatcatcctacgggaaggtctgcgaggcgcttaggttctcggttcgctcacagctaatagcgtttcgagagacgctgacgctacccgctaaatgtgcaatcagcggcaaggacattgtgcatcgtagtgatctacatatagaccacaagattccgttctggcggctgctgctggccttctcagaggtccatagagttgagctatcccggctcgatacggtcggaagcggtgaggccttggccttggttgatcagaagatcagcaaggcctttcaagcattccacatggagcatgcggagctacaaccttcctgcaaggccgcaaattccttgaaaggagggcaagtggaacgctcgtaa

SEQ ID NO: 346518 - DNA, 1497 bp, Pseudomonas aeruginosa
atgagaattattaatgcaaacagtgtcgaagaggctgtagatctcgcaacaaggctcaaggcggacggtcgctacaactggtttcgaggtcagctacgcgagtgggaaccggcgtcatcatttgaacgaaaacttctacaagacccggaagtacaacccaagctcaatgcaaaactgaatagatttcttggatggactcaagcacacccggcgcttaagtatctcgcggcaccggagcatgtcgatgcgctgcttgccgtacttcagcactatggttttcccaccacatatatcgattttactacagagccagcagtcgccggtttctttgcatccgataccaaagtgcagcctgaagggcctggaaactctgtcatctactgcctgaacactgatgaccttacggaattttatgaatgcctggacagcgtcgaaagtcctacacagttaattgttgagccagtaacagtagatgtccccaatctgtggcgcttacagtcccagcacggccattttttgttcgcgaaccactcctggtaccgatactatgacatggacagaatcgtttttccttggagcggtcctcctgccttcccttccagagaccagatatatcctgcgcacaaaagtgcattagagcaattgctggactcttattttttcaatgaaagacgtgtcgaaaacgagataatgcttcgggaaatggccgaggcagcaggaaagcaaagcttgtttaagcacttcgatatcagcaagccttctacgtatgaacaggactcttttacttctccacccaaggctgtggatgggtggagcacggacgcgttgaaagactggctcatgactccagctgaacaatttgatgtaactgtcggccggcggatttcgatttcgttacggagtgagccggcagctcctagccctgcggaccaagtacgccattcgatcaataatgcgttgaatttgcatccaaaactgagagcggaagcagtcgactggtgtttcactggcctacctgaaaatgtgaatgaacaactattcatatcctctacacgggacgcatggaacggaatgcggaacctcccctacaccaacgacgatatcgcaggtgccatttctgaactggttgttctatgcgcaatctctgagtgccagtcactggatggcggagcaacagggagagcatttacaaggtggacttcagacgcgatttacgtggaactcgggaatcaagacggctcgtactctagagcgtactgttctgaaaaaaatctactacaagcattggatcctgcttggattgctaatcttagaaagccggcgtcagcaatctcgatatctgaggcatttcgccaaactcacgaccctcgcctgatgtttaatttcgaacggctggcgagtatctatgctcgcgaggtgatcccttctcaactcgtgctaaaacgatttgtagtcctctataaccctgcaaatcttgaagtctttggtcttccatga

SEQ ID NO: 346519 - DNA, 1866 bp, Pseudomonas aeruginosa
atgaatctgatcaaacaaatcgaaattgcatactttcggtctatttacaaagagaagcttaataactgctccggaaccaatatcattttcggtagaaatgatgcaggtaaaagcaatatcctgcgtgcattgcatctctttttcaataatgagacaaattccaaccaggtattcagatttgagcgtgacttttcacacgcgcgtcgatctgaggctacgccagaaaatgatataaagaagtttgtttatgtgaagttgtggttcaatactcctgcaaactggcgagcatcactaggcgagtcattctgggtgaagaaacaatggagtgtcactaatcaggaagctccaaagttttactcttcgattcaggaggagaggcttcaacaatatctaacgagatttctgaataaaattcaatttcattatattcccgccatcaaggataggaagatattcgaaaggctacaggcggaaatttacaaggtcatttccgagcatgaggagttttcagggtctcttagaaacttcactgatgccttaagaaatagaacggaacagttaactcaaggccttatggctgcgcttgggatcaatagttctgtgtctacgcctcgcgatcttacggatctatttagatctctagactttgaagtcatgtcggaagaaggtgatgcatatagcctgactttacagcgcggagatggcatccaagtaaggcacattccgcagatattatcattcctttccgatcatagttcgaaggagttccacatttgggggtttgaagagcctgagaattcgcttgagcttgcaaatgctatagaagaggcaaagaccttcttggagcttggtaattcccgcaacaagcagatcttcttgacaagccatagcccggcattcttctcgctaaaagacaacggggtaagtaagtattttgtatcaaagacccagaggcacgaagggaggttgaactctgttgttcaggaactatcgaaaacctctaggcaactcccgagcgaattgatgggggaaacgccgcacttggcggtaattagtaactatcttgaagatgctcatgctgaaattgagagatcgaaagcagatagagcggccttggaagatgagttggcacagcgaaacacgtcaatagtcttcgtcgaaggcgtgactgacgcgactgtatttacaaaagcttgggagctttttgtcggtggtgaaatgcctttcatttttgagtcgggaggtggaacctcaaagatgcaggccttggcagagaacggcaaagtcatcgaatccttggcgccagggcgggctgtctttgctctcgttgataatgataacgaagggcgtgcgctttatggtagcggacacctaaaagacggagggatctggaaacaggataactccaataaagtgtattggtgcaggctgcccattcttgaagagctacgacaactcatgacgagatgtggagtaaacaaaagtgcgtggccgggttgcttagagaatctattctctgctgacttgaagcacagagcaacagaagagggtgtgctgacactgacaagaacgccgcaccccgaatttttaggtgaacattacgcgaaagttactgattatcttgtcgagcgagcagaccatcacgaataccacatcctatgcccagaaccagaaagcaaggataccttcgcagaatgggtagttgagcaggcagaccaaatccctgaaattcttgagccgttgcgaggaacgatggagggcttgcgggatgtattggatcggattgctgccgaagctgcccaggcacctgcacctgctcaggctgctgcacaggcacaggctcccgcaccggcagcggctgtttaa

SEQ ID NO: 346520 - DNA, 186 bp, Pseudomonas aeruginosa
atggagagctttttccgttcgctgaaggccgagcgggtgtacctgacgcgctatgccagctaccaggaggcgaaaaccgacctgttcgactacatccgcttttacaatcaccctcgtcgccactcgacgcagggctatctcagcccgatggagtttgagcggcgctatgcgagcagtaactcttaa

SEQ ID NO: 346521 - DNA, 789 bp, Pseudomonas aeruginosa
atggcgaagaaagtcggccagcgccggccggagcggcgaccgcgcaagatcaccctgcggctgggcgaaaaaatagagcagcatatctcggagcttcaactccgctttggcagcgcctgcgaggccctgtttgtcagtccgactggatcgcgcttatctgcttcgaggatcggcgcgggcctcaaacacgagctgcgcgaagccggcatagaacggccaaatcaagtgtcgatgctgctgcgtcatcatctcgggcaaggcttggcggaccaggggacgccagcagaaatgatcgccgagttgcttggtcacaacagcacggtcgcggcgcgcgcctatatcacggcaaccccgaatattgcccgcatcaaagagcgagcgctgggcaagagcccggcctatcaacgcatcatgcgcagtctcttgaccggagaaatcgtgcagcgtcgcgatataccggccgaacaggaggtccgtggtgtagtcgacatgcagtacatcggggacatcggtgggtgtgcgctccccgctcacacccactgcccctacaaatcggtctatgcctgctacacctgcaagaaatttcaccccttcgccgacggccgtcatgaacaggtgaaagaggcactgcaatgggaagcgcaacgcttcatcgatatggcagagcgagctggcgatctcaaccacaatcgacctttggcacaacaccaggtcacgatcctcgcggtgacggccacgatcgagcgttgccgtaagcatacggggggcggagaaaatgacccagtctag

SEQ ID NO: 346522 - DNA, 717 bp, Pseudomonas aeruginosa
gtgactaagtctgtcaaccaagagcgcgcaccactggcctccccttcgacgacctacgtgttccaggggccggcccggattgccattcgcacccgcaccaacgaccaaccccggtacgtggatacccgctcgtgcgtctggacctggtacgacggcggcatcccaatgacagtcaattgggcagagctaaagctgcatcagcagttcatggaaatcgcaaaaggctttatggtccatgcactagaaaaatattcaccgtcaaccgcatatagagttttcaggctataccagcgtatctcggagagtgagattgcctttgcttttccttggcaggcgagcgatattgttaatttttccaataagttgagcagcccccgagaatacatgattgtgtttcgggcgctctatcggtgggcgaaggacagaggaatatcaggatttagagatgatgtatatctggagattaaatatcttaaaacttatcgagcgtccccctgctcaaagatatttctctcgcagactggactgaagcttgatgaggaagagcgcttactgaagcgaattggacaagaagctttagtgggcgattggggaaattttcaactaaatataattcttcatctgggattcgaactggcgcctcgctccattcaatttcactcactggatattgcagacttcgaagtcattgaaacctccgtccatgataagtactaa

SEQ ID NO: 346523 - DNA, 1140 bp, Pseudomonas aeruginosa
gtgaagctgatccagtgtcgtctctcttccggccagcgagtaccgctgctggtgcaggatggtgttgccgctccgttacccgtgctcgtcccgttcctctatgttcagctccagctcaaacaccgtgcctatagcactgctgccgcccacctgcgggcgatccaggccttctatgcctacgctgaatgccgtggtctggatgtcgatgaggagattttgcagtgccgctttgagtccctcctgaccttgcttgacggttattccgtttggcttatgagtggtcggcaagtcgacaatgtggttggtcgaattggtgctgctgatccgtcattgttccccagagttgatctgcgcacccgtgaccagtacctggtcctgctgaaacgctatctcgcctggtcagccactcgttatttgtcgcgtatcccacacaatgccgtcactcatcaggaactcaataccgcttttgttgctgtcgccgaggccatcgaacgtcgcttcgagagccacatcacccgggttcgtcctcagcaagtgcgttaccgcagcctgacagatgcgcagttggcgatcatccgtgcagtgagccggcgctcagcaaaatcccttcccgcagcgagtgcaactgcgcaactggttgatgatcgaattatcgaattattgctcgagactggcatgcgccgcggcgaactcttgaagctctacacgacggatattaaccagggctctcagcacgcctatgtcagtatcaatgatcgtgagcatgatccagacgacccacgtgccgaagagcctgcgctgaaaacgcacagccggaccgtgggcatctctgcgcagttgaatgaagtttatgaaaactacattcaacgtgagcgccgccctatacgtaatggcaagcgaattaagttgccatttcgctatctatttatatcggatcggggtcgcccactgtcgctccgtgcgctagcgaacgtcctcgatcgattatttctgaccattgaactggctcatccgaaattactgcctactctttccgctcacgactttcgtcataccttcgccgaccgtttcttggcctatttagtcgagacgcggaattatgaattggaacgcgcgatggatgagctccgacgggtctga

SEQ ID NO: 346524 - DNA, 546 bp, Pseudomonas aeruginosa
atgacgtggataatcacctacaccggcagccgcttcgacctgatccagcctgacccggcaagcattcatccgaccgacattgcccacgccctcgcccagcaatgccgcttcaacgggcactgcgcgccgcactacagcgtggcgcaacacagctacttcgttgccgacttggttcccgaagaacaccagttggccgcgctcctacacgacgccacagaggcctacatcggcgacatggttcgaccgctcaaggatctgctaccagagttccggcagatcgaggccgtcatctggtcagccatctgtgagcgcttcgacctcgacgagcaactgccagtagaggtgaagcgcgcggacctgattgcgctcgccactgaacgacgcgatctgatgcccttccatcaggatgaatggggttgcctcgaaggcatcgagccccatcaagcgccaatcagcccctggtccgcagctgacgcgcgataccacttccaccggcgcctgctagagcttctcgcggttacccatcgcaagggggtgacggcatga

SEQ ID NO: 346525 - DNA, 840 bp, Pseudomonas aeruginosa
atggagggcgcggcagcgtcaggcggtggcggcgtgaacgcggaactgtcgcaatacttcacccctacctgggcggctgagctgctggtgaggcgccacttcggcgccctcacctgccgggacacggtccttgagccagcatgtggggacggtcgattcctgatggtcatccctgcggaggtcgatgcctacggcgtggagctggacccggctcaagcgcaggccgcccggcagaactcgggccgggaggtgctggctggggacttcctaaccgttcgtctgcctcgccggccaacggcggtgatcggcaatccgccctaccaggcggacctgatcgacggtttcctggcccgctgctacgaactgctcgagtacggcggccgcatcggctttctgctaccggtctactacctgcagaccgccagcaaggtgatggacctgaaccgccgcttttccatcgcgcaggagctgctaccacggaacctgttcgagggcctgacgaagccgatcatgtgggcaacgttcaccaaggcgcgccgaaccgtgctgtccggcttcttcctgtacgcggagacgcacgccctagcggatgttcaccgcgatctgcgcgccctgctgttgggtaaccgctcccgcgccacctgctggcgtgacgtggttggggctgcgcttgaggcctgcggcggtcgggccactctccagcagctctatgcctgcatcgagggtaaccgtcccaccgcgaacccatggtggcgggagaaagtgcggcagatcgccggccagcacttccgccggatccgcccaggtgaattcgaaattatcaaggagcattccgcatga

SEQ ID NO: 346526 - DNA, 1140 bp, Pseudomonas aeruginosa
atgatcaagaatgattcacaggctccttcatgcacttgcccgagtggcgacggatccctcgtccatccgtgcccggcacatcctgcggtagagcaggtaggcggggatgagcgtgcttcgaagcccggcctgttctgccgagactgcggcagccgtctaatggtgcgaggcgtttgcagcatctactgcccgaattgcgtcaaggcgcaggtcaagcaggcagaggcggagcggccggaggtgttcgggcttgagcgataccgcgtagaaaaaactgggcaggggttctggccatactgcgtgcgtgcgggggatggaacgcgtgaactcttcgccggccacctgaagcagtgcaagcgggtagcggcccaattggctactgcgtttgaagatgggaagtttgtcgccggggcgctgcgggcggagaacgcgaagctgagcgaagccctggaccgctggccgctcatccgcgacagtctgaagctgagactcgccgacgccctggccagggtcgccgcgcttgagtccaagctggcggaactggagaagcaggagccggtggcatggggcgccttccatttcggcgggaagcgcgacggcaagctgtatacgcactgcgaaactgaggctcagatagaggcgtacatcctcgacatgcaccgaagcagcgactcattgacgctcagcaaaggtcccctctacgccgcaccggtcgaccaggctcagcacagcgtgcctgatggcgcagccgacctgtgccgcttcctggccaagctctattgcgagctcgacggcctgcgctactcgacagcgaaactgcctgctgaacagatcgccgatgccctaatcttcaagtggcctgtcctccaaggcgcgcggaaccaactgaacatcaagcgcatcagcgagcagccatacgacgagtcgaagctgcattctgccatcgctgccatgctcgccgccgcgcccggcaaggaagtgccgcaggcatggctcgacgtgcaggcagagcgacgccggcagatcaccgccgaggaatggacgccggagcacgacgacgggcacagtcacggccagatggccgaaatcgaacgtctcgaccgggcagcggcgactcagggagggccgcgcgatgcgtag

SEQ ID NO: 346527 - DNA, 237 bp, Pseudomonas aeruginosa
atggaacgcttgcttgagagtgtctatctcaatgcccggtcggcgatggagttgaggcttagcctcaccagctccggccgcaagagaatcgtaaagattgtggatgggaaagaggtcgaggtctgcctgctgaagtgcggagcatcctggaggcccaaaagaaggatgtcggaatcctggccgttttcctggcagaaagtctcttggagcgtctccagagtcgtcctgacgcgttag

SEQ ID NO: 346528 - DNA, 1407 bp, Pseudomonas aeruginosa
gtgaatttaatgaggttttttctatctgccgttttggtggtgtctttaggggcgcaagcaaatgataggggggactatgattggtggacatcaattgtccatttgatctcgccggcaagtccgaacaatagaataacagatgttcagattagtgagcctatgtacccacttacaaggtttcctaaaagtttctctcgttccgactttgatccgtacggatattacaagtggcaggtcgttgaaatgccgccttcaacaggcgccatgtgtatggatggaagtccttacaagatttttgtcaatcgtgttaacgactctagtaatctgcttatctacttccaggctggcggtgtatgtactgactatgcttcttgtacggggcaggccgagctctctgcaacaaatccgcatggtatttctgacgacttcatagctaaccctctatctgtcgcgaatagatatattagtccgctaatcgtgcgggttcatcctacctcgcgtataaaaacgcagggatggaacattatttatgccccctactgcagtggtgatctatatgctggtgatcgctcagtgattttcaagtcaaataaaggtcgaaatatattgatccagcaccgtgggctgaagaatgctcgtagtgttgtttcttgggcaaaagagaatttagaaagaccagttcagttaatggttgccggctctagtgcgggaggggctgcttcgcagttgaattatgctcacattcgacaggatatggagcctaactactcttttctcctcaatgactcagggccacttttcaaaattgatagtgaagagtcgccttccttctatacctttgatttcataaggaaaaattttggtttggatgaagggtactttaagtttatggcgcaaaggattgctggcgtagataaaaacaatccgttcagcgtatattccgcatattcggttgcttttcctaaggatcgtatggggatgacctatttctggcaagataaaacctatccagattttagctatcaattacatcctagggtgctgaatgctaaaagtcctgaagagcgtgcttgggttaactacgacctttcacatcaggatgttcaagctctttgggagggcctgagtaatctaagtaatgtaggtgctttctttcctcagtatagagacgttctgaatagtcatatgctggcagccctagactttcgacacagcgatatccaagaggaaaatcttgagttcaaggattttattgcggatttaatggatggcaaatcagctatgatgcactcttccgaaaaaagcgatttagaagacaaaaagcgaccgttcctatcttggactagtttgagtgattatatatattcttcagcaggcggtcggagttgctgtggatacaagttataa

SEQ ID NO: 346529 - DNA, 648 bp, Pseudomonas aeruginosa
atgaaagctaggtttttctatattttggcctttggtggtgtgtttttaagtttgggatttgtgcttgttgttgctccggaagaggaagatggacacgtagtttctagttatgcctctcctctcaagaggatggcttctgtgctagattttaactcagtacctgctgttgcgagttcttcatcaaattttaatggtcgcgaagagattgagaggaaaatatttgagacgcctcagtacaagcagtatagggccttccaagactttcgctctaatattcagtcgatctttgataataatcaaaatttaagtgcagacactgtgtctgaatactctaagattgtagagaaatacgcggaggagagaaggctgatgggcggggagtctttgatgctgcaatctcaattgattgcgctgagtagtgccacggaggcagaaaagcgaaacatgcttgatcgtctcataattaaggctagggagctggggagtgaaaaaaagcttgagcctgatgagaggtttagaaaatacaaggaggcagaagaagaaataataaaacgtatattgtctgatcgtggtcttagcgatgtggaaaagtccaggcaaatagataaggaggtaatgagggttcgagaggatatatattctcaataa

SEQ ID NO: 346530 - DNA, 402 bp, Pseudomonas aeruginosa
atggtgaagcgcgaacgcttgggcctgccgagcgcaccgaaccaagtctggtcgatggatttcgttttcgacgcgctcagcgcagggcgacggctcaaatgcctgacggtggtcgatgacttcaccaagaagtcggttggcatcctggtggagcacggtgtcagcggcaaggagcttgatcagcgggcctatcagcgtgatatcaagttgaagccgattcagcctggcaagcccacgcagaacgccttcaccgagtcattcaacggcaagttccggaacgaatgcctcaatgagcgctggttctgctcgctggccgaagcgagaatccgaatctcgcggcctggcggcgggattacaacgagcaccgaccgcgcagcgccattggcaatctcaccccagtag

SEQ ID NO: 346531 - DNA, 687 bp, Pseudomonas aeruginosa
atgaaaaattttttaatcgttaccgccctattgatggggctgcttccttcttattctttttctgaagtgcatatggtcggagctaaccgtttaatctttgagggagggcataggctcagagttgactttgttaatgcaggggagcgagagagtttgattaagctcaatattttggaaggagaatcaaatagcgaagatgttccactggcgttgtcggcacctctattgatcataccgccgttaggccaaaaatctgttgaaattttttatcaaggtgaagggctgccagaagatcgagagtcgtactttcttctggctgtgcttgatgttcctgctaaccctgggcgcgagaacaccgctcaaatagctcttcgccattattataaattattctataggccgaaagagctctcgcagtcagaggaaactctttctaaggcgtggcagtggcgaaaagataaacatggcgcggtggaggtgataaataactctccttactatatgacgctgactgatgtgcaattcagtgatgggaagagatgtcaaacaattctaaggcatgtcatggttgcaccatttttaaagagagaatttttagatacaggttgcacagaccaggctagagaagttgagtttggcttggtgaaagatagcggtcaggaagttagttttaaagttggattgtag

SEQ ID NO: 346532 - DNA, 603 bp, Pseudomonas aeruginosa
  misc_feature (581)..(590): n is a, c, g, or t
atgaaaatattaggctttgtatgtttttttgtttcttttttgttttctggtagtagttatgcgttgaattgtttgaaggatggagctatatcgaatgaagtaaccaatattggtaccactattgccgttcctactgacgcacagaaaggcagaattctctggcgctctccgaagatgacaataaaaattacttgtttccaagagggtaattggagcactggtgagggtgtctatatatatctgagtcctacagatcctaatatggtgcagcttggagacgatttgcaatttggagctggtataggggggcgggactatacgtgtggttcagtagcaggatgtcgtattaagttgggaagcaccgagccgtgtacgggcattggctctatgtgtataggctatcagagtaagttcactttttcctttgattttttcatcgcaaaaaagtctactgccgcggctagtgctggaaaggatggtccgttaacggggctttcatcatatgcggcttttcaaattgacggggagggaggaataaatgctgtagaaggaaagaattttaggatgacagtctctggatnnnnnnnnnngtccgatatatag

SEQ ID NO: 346533 - DNA, 1293 bp, Pseudomonas aeruginosa
atgaagcgtttcatccagggcgaatgtcgaggccaaaccacgctactgcccgagagcctggatgattacgtcacggacaccaacccggttcgagtagtcgatgtgttcgtcgatgagctcgacctcggcaggctgggcttcgatggtatcgtcccggcagaaaccggtcaccccgcttaccatcccagcgttctactgaagctctatatctacggccacctcgatcgcatccaatccagtcgccggcatgagcgtgaggctcagcgcaacatcgaattgatgtggctgattggacgtctgaggccggacttcaagaccatcgccaattttcgcaaggacaacggcaagaccatccacggcgtctgccgacagttcgtggggctgtgtcagcaactcggtttgttcgccgaagcgctggtggccatcgtcggcagcaagttcaaggcggtcaacaatcgcgaccgcaacttcaccagcgccaagctgcgccggcggatggaagagatcgagtccagcatcagccgctacctctctgcgctggacactgccgaccggcaagagcctgccgttgccctggtcaaagccgaacgcctccgcgacaagattgagaccttgaaagccaagatgcaggagctcaaggaagtcgaggttcagctcaacgaagcaccggataaacagctctccctgaccgatcccgatggccgctcaatgaagacccgtggcagcggaatggtcggctacaacgtgcaggcagcggtcgacgcgaagcaccacctgatcgtgactcacgaggtcgcgaacgacggtgttgatcgcgaccaactaggttcgatggccaagcaagcgcgagcagccatgggtgtcgaggtactctcggcggtcgcagacagagggtatttcaagggcgaagaaatcctggcgtgccaggaagctggaatcactgttttcgtacccaagacactgacttcgggggcgacagcagcgggccgctttggcaaaggtgatttcatctatgacgcagccaagaacgagtaccgatgccctgctgggcaaagtctgacttggcgcttctcaagcatcgagaaagggctgaagctgcaccgctactggagctcgcattgccaaggttgtgcgttgaaggagcgctgcacaccgagcccagagcgccgggtgagtcgctgggaacatgagacggtgctcgaggatatgcagccccgcttggatcaggcgccggagatgatgcgcatccgccgtcagacggtggagcatccatttggcacgctgaaggcctag

SEQ ID NO: 346534 - DNA, 138 bp, Pseudomonas aeruginosa
atgggcgccacccatttcctcacccgaacgctcgaccgggtaagcacggaaatgagactgcatgtgctcgcctacaacttcaaacgggtgctgaggctgctgggcagcagtgcgctgatggcagcgatgagggcctga

SEQ ID NO: 346535 - DNA, 945 bp, Pseudomonas aeruginosa
atgattttcatcgaagaggctttaacgtcctgggtgctggatgattatccttattcggttataaccaaagaaaagctagcaatccagatttataacttttatctagataaaagttataagggtcagcgtatacaacaaattcggaaggaatacgctgctccgaaggatttcgagaacaacatccataagcttcagcgatccggggtgcttagcccgctcgatacagattcccatccattttttagaagtcagctccacgaatcctatgtaattaagggcaagagagagtactccccgcaagagactctatgtgctttatatccgtatggttatatatcgcatctgagtgccatggagtggcatgggctgaccgacaaaataccggttgaaattcactttacgacttgctcctcggcaagttggcgccagcgcgcaattgaagatattgatattaagaattcgtctattgttgatctgaagaatttcacggctaagtatcccaagaatttaaatcttgatgggctgccagttgttgtaagtagcgagacgcactacgttgatccggtgaatgtcaatgattcaccgctgcgcgtttcgtctgtcggaaaaaccttcattgatatgctaagggatccgcagaagtgcggaggggaagagcatgttctggaggtgtttcaggagcatgggaaaaagtactcctcattaatattgtctgcgcttgataagtatggccggaagatagatcgggctcgtactggttttgtgttagacaaaatggtgggtgttaaaagtgcgaagcttgaagcgctccggttggagtcaagtagaactcgtggcagttccaaggtcttaagtcccaataagccgtttgcgtcagagtatgatgaagactggtccttgtcattaaatgtggatatggcaaaaaaatatggaaatgcaaattga

SEQ ID NO: 346536 - DNA, 861 bp, Pseudomonas aeruginosa
atggaaatgcaaattgagcagtgggttgcagaggctcctctgaatcaaaagcctattaggcaggcaactcatctaatattgaaggcaatatcgggaagtgatgaattaagtgcgaaaatggtaatgaagggcggtgccctgcttgggctgcgctatggaagcaaaagatatacaacggatatagatttttctacagaattgctcttggctgatgtaaacattgccgagtttgaggctggcttcaatgatgcccttgatgttgctgaggcagagttagcgtacgggatgaagtgcaagttgcaatcgcacaagattcagcctaacgcacagggcacctttccgactgtgaaattgcgaatcgcttattcctataagaatgacagtgcccaaatgaaaagacttgaggggcgtaacagtacgaatctaataagcattgattatagcttcaatgaaaaaacttataattgtgaaattatagaaatagacggcggcgagcttaaggcgtactcgattctagatcttcttgcagagaaatatagatcaatactgcagcaagaggtcagggggcgaaatcgtgagcaagacatctatgacattaactatttgctgacgacaattgcggatctgtcgggcgatgataaatataaaatacttgattcattgcttcgtaaaagcgagggaaaggaggtcgacgaatttctgaatgcagctggcatggatgatcctcgtatcaaagagagatcaggtatgcgttacgctgacttacggtcaacagtgacagaactcccggattttgaagagtcatatgcgagagtctcaggattttttagaggcttgccatgggagctgtttggaaaatga

SEQ ID NO: 346537 - DNA, 663 bp, Pseudomonas aeruginosa
atgggagctgtttggaaaatgataatttcgtctgtctgcggcaggggtggaagacttgaaaatttagatcacattatagagttgaagggcggaagcaattttcacgctgtgttagttgttgatgcatatggttgcaggcagcatgagatagagcgttttgcggccgaattggaaagagcttcgttcaatagcgtctcctcagccagcgacttgttggggcgtattgatgttgacttaaatattagaatgtcggcggtttgtattgcaaaaagcaatggaattgtatcgctaagtaatttgggtgactgcagagcttactcgcagggtggtgagcttttaactattgatcatactaatgcatgggatgatctggtggctcttggcttagaaccttcccgagtaggcgaattggttaagaagcaccctgggcgacgagtattgaagaaatttctgaagtttcccaagccagcacactcagcgcaaggaattagtttctctgggtatggtgaaagtaattatcttttgtgtacggatggcttctgggagcacctagatcagtcaaatcttaaagatttgacttctggagggtgttctattgaagagttttctagcggactatctggcgccgaagacaactacacggcttgtcttgttcgactttga

SEQ ID NO: 346538 - DNA, 1833 bp, Pseudomonas aeruginosa
atgcgtctcaagaccatcaagctcagtcattttcgcggttatcgcaccaccactgtcattccgatcgatgtggctatgaccggcatcgtgggccgaaacgattatggcaagtcgactgtcctcgaagccctggcaatcttcttcgacagcgtggatatcaagcccgacaagagcgatatgaactgcttcagtctggcggaggggcacgaccagttcgagattgcctgcgagtttgacgatcttccagatgccctggtgctggatgaaaatgctcagacctcactgtcgcaggagtacctgctcaatgctagtggcgccttagaagtggtgaaaactttcaaggccagctctggcaaacaggacggcacggccattcgctgtcagcatccctcagataaagcgctctcgggcttgttgagcctgaaaatggccgatctgaaaaagcttggcgagcaacttgggattgctgagcgggtggtggatcagcgagtggcttcccaatggcggcaagccattcgcgatgcgaccggagatatttcctgccaggagacgctgcttgatgtcggcaaagggctgtcgacagaaggcaagtctatttgggagaaaattgagtcgctgttgcctactttcgcgctcttcaaggcagaccgggaaagtagcgacggtgacgccgaggccaagaatcctctacagcaggcggttaaggaagcccaggccctacttcaggctcagatcagcgagctggagcggcaaatccaaagcagtgtgctggatgtcgccgaacgcacgctcgacaagcttcgggaaatggcgccagagctcgccaacgagttgaccccgcgcttcaaggaaaagcctaagtggagcttcaacttcactctggagggcgagaacggcattcccatcaacaaacgcggtagcggcgtgcgtcgcctaattttgctcaacttcttccgagctgaagcggaaaaaaatgccatggttggcagccctcgcaacgtgatctacgccatcgaagagccggagacctcacagcatcctaactaccagatgatgctgatgaaggcgctgctggatctctcaaaccagaccaatcggcagatcatcgtcaccacccacgttcctgcgctagcaggtctgatgcccattgaaggtattcgttacgttaccaaaaatgaaaacggcatccccatcgtcaagatgcccagccaagaagtactcaaggaggctgccgagagtctgggcgtactacccgagacagggatggagcgagcaaaagcagtagtgctggtggaaggcaagtccgacgtcaccttccttcgccacgcgtcgaacagccttaagactagtggccacctcccatcgagtctggaggatgccggcattgtcccgatcctgattggtggctgtggcagtgttaagcactgggtcaccctcaacctcgccgatgatcttgggctgccttggtgcgtatttctggactccgacatcggcgggagcccgcagcaggtcgccgcaatcttaaagcgtaagcaggaagtcgaaggacgaggtcgagctttctactcgacgcgcaagcgggaaatcgaaaactatctctgccccgacatgatcgatgctctaaccgggacaagggtgactttcaccgacacctgcgatgccaaaacaatcattggcaaggcggtgggcatcaaagcggacgatgtgatcgacagattctggccgcgtatgacggctgagcaaattctccaccgctccacgtatcgtgaaaatgatgaggatcgcgctgagctcaaagaactgttggagaatttgctgaagctggtcgcgtga

SEQ ID NO: 346539 - DNA, 213 bp, Pseudomonas aeruginosa
atgcaactgagcgacatcaagcaagtgatcgaggtctccggcgaaatcgaagcgcaagaacggctcaacgatggatgggttcttctcgccgcagccggcggaactaaccaggacaaagagggctacatcatctactccctgggttccacagaagagcccaagccgatcaaggccggagcggtattcagcccccgcatggaacctcaaaagtaa

SEQ ID NO: 346540 - DNA, 1305 bp, Pseudomonas aeruginosa
atgacctctcccctcccaacgcctacgtggcaggagcttcgccagttcatcgaatccttcatccaggagcgcctccagggcaagctggacaaactccatcccgacgaagacgacaagcgccagacattgctggccacccaccggcgggaggcctggctggcagatgccgcccggcgggttggccagttgcagttggtgacccacacgctcaagccgatccatcccgacgcccgcggcagcaacctgcacagcctgccgcaagcacccgggcaaccgggcctcgccggttcccatgagctaggtgacaggctggtcagcgatgtggtgggcaatgccgcggcgctggacgtattcaagtttcttagtctccagtatcagggtaaaaatcttctgaactggctgacagaagacagtgccgaggcagtacaggcgctgtccgataacgccgaacaggctcgcgaatggcggcaagcgttcatcggcatcacggccgtcaaaggcgctcccgcgtcccacagcctggccaagcagttgtactttcccctgcccggttccggctaccacctgctagcaccgctgtttcccaccagtctggtgcatcacgtccacgctctgctccgcgaagcgcgcttcggcgacgcggccaaggcggcacgcgaagcgcgcagccgccaggagtcatggccccacggattcagcgagtaccccaacctggcgatccagaagttcggcggtaccaagccgcagaacatcagtcagttgaacagcgagcgctatggggagaactggttgctaccttcgcttccgccacattggcaaagacaggaccagcgcgcaccgatacgccattcctcggtcttcgaacatgacttcgggagaagccctgaggtgtcccggctgacccggaccttgcagcgcctccttgccaagacccgccataacaatttcaccatccgcagatatcgcgcccaactggtcgggcaaatctgcgacgaagccctgcaatacgccgcccgtctgcgcgaactggagcccggctggagcgcaacccccgggtgccaactgcatgacgcggagcagctctggctcgatccgttgcgcgcacagaccgatgagacgttcttgcagcgccgactacgaggtgactggcctgccgaggtcggaaatcgcttcgccaactggctgaaccgggcggtcagcagcgacagtcagatactgggtagcccggaagccgcccaatggagcccggagctgagcaaggaactgacgatgttcaaggagatactcgaagatgagcgtgactga

SEQ ID NO: 346541 - DNA, 633 bp, Pseudomonas aeruginosa
atgagaaagtctcggccgggcgttgtgcgttttcacagcggcctaggtgtttcggcccgaaacactcagtcaggtcctgacctcggcgccgacggcgaactgggtgttgcggcccgcaacactctgccaaggaacgacctcggcgccggcggcgagctgggtgattcagcccgaatcacttcgccaggtcctgacctcagcgccggcggcgaactgggtgattcggcccgaatcacttcgcctggtcctgacctcggcgccggcggcgaactgggtgattcggcccgaatcacttcgcctggtcctgacctcggcgccggcggcgaactgggtgattcggcccgaatcacttcgccaggtcctgacctcggcgccggcggcgaactgggtgattcggcccgaatcacttcgccaggtcctgacctcggcgccggcggcgaactgggtgattcagcccgaatcacttcgccaggtcctgacctcagcgccggcggcgaactgggtaccttgctccgagtcgccaggggaaattccccagcgacgagccatgtatttcctactgcgcgcccctaccccgatcagcacgatgtggccgaaccccttccctatataggaacactgcaccatggctga

SEQ ID NO: 346542 - DNA, 1473 bp, Pseudomonas aeruginosa
gtgcctgttctggggctgatcttcctgcgatatgccgagaagatgtacgccgctgccgaagagaagcttgggccgattggctctggtggtcgccgcaaggtcagcaaagatgactatctggccgagggcgtgatcttcctgccagagaaggcccgcttctcctatctgcagaccctcaccgagggcgatgtcattgggctggcgatcaacgaagccatgaaggccgttgaggaagagaacgtcgacctcaaaggcgctctgcctcgcaactacgtccagcttggcaacaaggtactgctggagctgatcaagttgcttggcccggtggatctcagcggggacgctttcggtaaagtctacgagtacttcctgggcaacttcgcgctgaaggaaggccagaaaggcggggtcttctacacccccgagtccatcgtgaagctgatcgtcgagatcatcgagccgttccacgggcggatcttcgacccggcttgtggttccggcggcatgttcgcccagtcggctgacttcgttaagcgtcaccacaagacggcgatggaagaaatctccatcttcggcaccgagaaagagcaggtcacggtcaacctcaacaagatgaacctggctgtgcatggcctgtcgggtgatgtgcgcattgctaacacctactacgaagaccctcacgaggcagttactcgtgatggtgggcgctttgatttcgttatggccaatccgccgttcaacgtatcgggtgtcgacaaggagcgtcttgaaggcgacctgcggttcccctttggcgtaccgaagaccgacaacgccaactacctgtggatccagctcttttatgcatcgctgaatcagaacgggcgagctggtttcgttatggcgaactcggcaggtgatgcccgaggcagcgagcaggtcatccggcagaagctcatcgagagtggcgcggtcgatgtgatcgtgtcggttggctcgaacttcttctataccgtgaccctgccttgcaccctgtggttcttcgaccgagcgaaagagcgtgatgccgagcgcgcagacaaggttctgtttatcgacgcccgccacatctaccggcagatcgaccgggcacaccgtgactggctgcctgaacagatcgagtttctagccaacgtcgtgcggctataccgtggacaagcgcccgaactggagcagggtagcgctgagttgctagctgagagaggactgggcgatggctacgtggatgtgccggggttatgcaaggttgcttctcgcgagctgatcgagtctcagggttggtcgctgaaccctgggcgatacgtgggggctgctgctagagaggctgaggatgtcgatttcactgcacgactggaggagctcgctgaggagctggaggttcttaattcagaggctcgcgagctagaagatcaaattgcaaacaacatagctgtattgcttgagggttcggaatga

SEQ ID NO: 346543 - DNA, 1251 bp, Pseudomonas aeruginosa
atgagatccgagcgcgtatcttacaaactcgaccaactgggtttcgttggcaggggcaagtctaagcatcgaccgcgcaatgatccgtccttgtatggtggagattaccctttttttcagacgggtgatgtaaaaggcgctgaactctatctccggtgcttttcagcaacctataatgaaaaagggcttgcccaaagtaagttatggcaacctggcacgctgtgtataactatcgccgcaaacattgctgacacttctattttgtctattccaggctgttttccagatagtgttgttgggtttgttgctgatccgcagaggtctgatgtcttctttgtgaagtactacttagacactcttaaaaacgctatgcagagtatctctcatgggacgacgcaagataatctaagccttgagaagctcttgtcctttgatttttgggttccgcctgttgaagagcaacggaaaatagcgtctgtgcttctagcctacgacgacctcatcgaaaacaacacgcgtcgcatcgagatcctcgaagaaatggcgcggcggttgtacgaggagtggttcgttcagttccgctttccggggcatgagggggtggagttcaaggaaagtgagcttgggctgattcctaagagttggagtgttgttaagttagaagaaatctgcgacctgattactgatggagcacacaaaagccctccgactgcagagactggtatgcccatggcttcggtcaaagacatgcatgattggggggttgatgtctcgaagtgcagaaagatctctcgatcagattatgatgagcttgtaaggaataactgtaagccgatgattggcgatgtgttggttgctaaggatggaagctacctaaagcacatcttttcggtcgagaaagatcaggatttagttctgctctcatcaattgcaattcttcgcccaatcaataagtctgtatcggatctcttggtttgcttgctcaggcaccctgaaactatagcccgaatgaagggctgtgtttctggtgttgcaattcccagaataattctgaaggattttaggaagttccaaattgtgttcccgagccaagaccttcaagaagcatggttagctacagcaagcccattgatgcgtttatgccgtaagctagtagataagaacgcgaatctccgagcccagagagacctgcttcttcccaagctaatctccggtgagatcgacgtatccgatatccccatgccgacctaa

SEQ ID NO: 346544 - DNA, 3183 bp, Pseudomonas aeruginosa
atgagtccagcagcaccgcattcgcacgactattccgaggacacgctggtcgagcagccagctattgcgctgttcgagtctctcggctgggaaactgggaacctctacgcagagtggacgggtagttcctccagcgaaggtcgccagacccagcaggatgtggtgctggaggggcgtttacgggctgcactcagcaagctcaaccctgatctgcccaacgaggccatcaatctggtggtcgaggagttggcccgagatcgctccaagctgctgccggtcaacgccaatcaggaggtctaccggctgctgaaggatggggtgcccgtctcggtgaccgatgagcacggacacaacacgctcaaggtggccaaggtcatcgactggggcaatgtcgaggagaacgacttcttcctcgcctcccagttctgggtgaagggggactaccacacgcggcgcactgacctgctgggcttcgtgaacggtatcccgctgttgttcgttgaactgaaggcgacccacaagacgctcaaggccgcctacgacgacaacctcactgactaccgcacggtcatcccgcagctcttcacctacaacggcgcactgatgctgtcgaacggttcccagacggtggtgggtagcaccttctcgccgtgggagcatctgttcgagtggaagcggatcaacgatgaaggtgagaagggcgttgtctccctggagacggccatcaggggcatcggtgagccttccaggctgctggatatcgtcgagaacttcaccgtcttcgaggacgtagctggtggtgtgatcaagaagatcgccaagaatcaccagtacctgggggtcaataaggccatcgctgaggtctggcgcaccaaggatcgccccaaggatcaggctgggcggcttggcgtcttctggcacacccaaggttcaggcaagtcgttgtcgatggtcttcttcgctcagaagatcctgcgcaagatccccggcaactggacattcgtgatcgtcaccgaccgcaacgaactggacgagcagatctacaagactttcgccgctactggtgctgtaggcgaagtcgaggcccatgccaccagcggggctcacctcaagcagttgcttagcgaagaccaccgctacgtcttcacgctgatccagaagttcggcacgaagaaaggcgaggtctacccgcagctctctgaccgccaggacatcatcgtcatcaccgacgaagctcaccgctcccagtacgacaccctggccatgaacatgaggacggcacttcccaatgccgccttcctgggcttcaccgggacgcctctgatggctggcgaggagaagaccaaagaggtcttcggtgactacatctcggtctatgacttcggccagtccatcgctgacggtgccacggttccgctgtactacgagaaccgcattcccgagatgcagctcatcaatgacaacctcaacgaggacatggcggcgctactcgaagaggccgagctggacgaggagcaggagcgcaaagtcgagcaggtcttcgcccgtgagtaccacctgatcacccgagaggatcgactagaggctatcgccaaggatctggtgaaccacttcgttggtcgtggttaccagggcaaggccatgctggtgtgcatcgacaaggccaccgccgttcgcatgtacaacaaggttcaggatcactggaagacgcatctggctgacctgaaagctcagctcgcacaggctcccaaggagcagcaggaggagttgcagcacaagatccaggtgatgacatcgaccgacatggcggtggtcgtctcccaaggtcagaacgaggtgaaggagctagccgacaaagggttggacatcatcccgcaccgtaagcgcatgaatgaggagaacttgggcgagaagttcaaggactccaaggatccgctgcggttggtcttcgtgtgcgccatgtggatcaccggctttgacgtgccgtcttgctcgaccatctacctcgacaagccgatgaagaaccacaccctgatgcagaccattgctcgggccaaccggaagtatccgggcaaggaagcggggctgatcgtcgactatgtgggggtcttccgtaagctgcaggaagccttggcgatctacggtggagcttcttcaggtgaaggcagtgagggtgagccaatcaagaacaaggccgagctggtcgagtacttgaagcatctgcttgccagggggatctcgttcctttccgagcatggtgtgaatgcccaggccatcaaggatgctcaaggtttcgagaaggtggccaagctggatgatgctgttgagcaactcattgccaatgaggaaaccaagaacagcttcatgagtcaggcccggattgtgtctcgggtctacagagcgattcttcccgatcctgatgccaatgagcttgctcctgacgctgtgctgatctccgtgattgctcagaagatcaaggcacttgctccacccgtcgacatctccgaggtaatgcagcaggtcgaggagttactagatcgctccatcgctcctgtgccgtacatcatcaaagatgacgacgatcagccactgcatgacctcagccagatcgacttcgagaagctcaaggagaagttcgataagggacgcaagcgtaccgaggccgagaagctccgggctttgctgagcatgaaactggaaaccatgctgaccgagaaccccgctcgcaaggacttcatggagaagttccagaagctgatcgatgcctacaactccggcagcatgaacatcgaggtgttcttcaagaagctggtggatctcactgctgatctgcagatagaggatcaacgggccatccgcgagaacctctccgaagaagagttggctctgttcgacatcttgaccaagccagtgcctgagcttgcggagaaggaaaaggcgcaggtgaagaaggtctgcaaggagcttctggagacactgaaggccgagaagctggtgctcgactggcgcaagaaagacagggccagaagtgatgtgcggcgcactctggagatcgtcttcgaccggggcttgcctgagagctacgacgaggggatctacaacgagaagtgcgagctggccttccaccacatcttcacgagctactacggggctggtgagagcgtgtactcggccatgcggtaa

SEQ ID NO: 346545 - DNA, 585 bp, Pseudomonas aeruginosa
atgaccgccaccatcgcctacgtccgagtcagcacagacgaccaaaccaccgaggcccagcgccacgtcatcagccaacgcttcaatgtaaacgagtggttctccgatgaggcaaccagcggggccaccaaagcgctgcagcgggtgggcttcaaggctctccatgcctacgtcaggaagggagacaccgttgtcgtagctgccatcgaccggatgggcagagacaccatcgacgtactggaaacagtggaagccctgaaagccaaaggcgtgaccgtggtctcgatgcgcgagggcttcgacctatccagcccagtcggcaaagccatgctcactatgttggctgccgtagctgaactggagcgagccaacatcaaggcgcgacagatggccggaatcgagcgggccagagcgcaagggaagaagctgggggcgccgaaggtgatcgatgatcaggccgtggctatctggaggaaagaaaatggagccagcatcgcggatacggccaagcactgggggatctcgacggctgccgtgaagcgggcttgcagagtgctgcgagtgccagaaacggcagtcgtatag

SEQ ID NO: 346546 - DNA, 735 bp, Pseudomonas aeruginosa
atgcgtcgagagttgctgttatcagccgagtccttgctgaacttgatgatcggccatgcgacgggatcccccggagaggatgccgattacatacagttgcgaaagcagcttcttgacgctcctgcagcggggcatttggttcctcgaactgtgcagacatgccgttcgctcgggcagttttggggcgtgattaagcagaagttcggcacctaccaagaacgcagggactttctgtcggagtttcagccccttctggatcatcttgagtcggcctcgtcttctccggctgacgaactcattagcggctcagtcgggaagttggatggagcttatgtccatgcggcctgggcgaaggccctggagcgcaggaatagcgatcccgagggagccattacgatggcgagaagtctgcttgaggctgtctgcaagttgattcttgatggagctggagtcggctatggcgatgctcccgatatcaacaaactctatggcatggctgccgagcaactgaacctctcgccaagccaacacgccgataaagacttcaagcgcattcttggtggatgcacgtcagtggtcgaggggttaggtggtctcagaaacagactcggtgactctcacggaaagggggccacctgggtcaaaccagctcctcgccatgctgagttagctgtcaacctcgctggcgctatggctaccttcctgattgcaacttgggagttcaggcagggttag

SEQ ID NO: 346547 - DNA, 822 bp, Pseudomonas aeruginosa
atgaaccagcttcccgaggggcaatcgctggagcagatcatcgagactgctaccaccacgattagcctcaccacgttcaacaactacgtgaagaacctgacgacctttttctcctatgccatccgtgagggctactgcgagcgcaatccgttcgatgggcttcgagtcaggcagcgaggcaaggtcagcgaggagcgcagcgtcttcaccgaggacgatctgcgtcgtcttttctcaaagcaggtttacgcatcggccaactcggctcagccgcataagtactggctgccgttgctcggcctgtacaccggggcgagactcaatgagctatgccagctctatctggatgatgtagtcagcatcaacggcatcgactgcttacacatcagggcgactaagcccgatcagaagctgaaaaccgtcacttctgaaaggctcgtgccgatccactctaagttgaaatcgctagggttccttgagttcgtccaggcgcagcgggaggctggtcaccaacgtcttttcgcggagctgaccttgcacaaggcacatggttacgctgcggctccatccaagtggttcactcgggttcgtgatcagttgggcttccgtgatggggcagagcgcaaggacttccacagcttccggcacacgcttgctgatcacctgaagcagaagggcatagtcgaatcgctggttggcggcattcttggccaccagagcggtggaatcaccttcagtcggtatggaaaggatttcaggccagaggtgttggctccggtgattgaggcagtggattttgatgtcgtcgggtggcttttatag

SEQ ID NO: 346548 - DNA, 207 bp, Pseudomonas aeruginosa
atgcaaaagttgaaaaagatgttcgttcgtggcggcgtggtcctgggctcggtcggcctgctggctggccaggccatggctgaagttccggctgctgccactactgcgttgaccgatgcgcagaaagatggtgtcgccattggcggaaccgtcctgggcgtgatcatcgccattgcggcgttcaagtatatccgccgcgctctctaa

SEQ ID NO: 346549 - DNA, 1203 bp, Pseudomonas aeruginosa
atgatttatattcgcactggcaagccgggtcacggtaagacgcttaatactattcgtgagattgacgaaaaggcatttgctgaaagtagggtggtttactatcacaacatcccggaacttaagaccgacaaattaaaggcgtcctggttcgaatttgaggacccctataagtggtttgagttgcccaatgatgcgattatcgtcattgacgaagcacaaggttggtttggtgtgcgtgatccgcgccagaagccgccagagcatgtaagccgcttcgaaatgattcggcatcatggccatgaaatgcacctggttacgcaggacccgcgatttattgatgtgcatatccggcgcttggcgaatgggcatgttcacttctggcgggtgttcaagtctcagcagttgctaaggttcgagtccgacacggtcattgatgcggtcgagaagaaaaccagcttcaaggatgcggacaagaccacgatcaagctcgataagaaatacttcggcatgtaccggagtacgcagggcaagcaccatttcaaggttcagttgccgaagaagttcattgcggcatgcgtggttctggtcgtggcggcgttcctggtctaccgggcatatgagcgttaccaggaagaacagcagcaagcggccgcggcggaagttgcagattctggtgcaacatcttctggtgtggtcgactcggtgacagacaaggttggttcgatcttgaacccggtttcagcgggtggtggtggccagggcaaggtgctgacagaagcgcagtacttggagcttcgcaaaccgcgtgtgccggatgtgccggcgtcggcgccgatctacgacgagttgaccaagccggtggcgtaccccaagccgttctgcctgtcgtccagggatgaagagctggtgcggcgcaatgcgctgaaaatgtccctgggctatcgcgacggtcggctgtacggttgccgctgtaacagtcagcaaggcacgcggatgttgatcagtttcgaggcgtgcatgaactacgtggagaacggtgcgtttgatccggcgattcccgatcgctcgatcgaccagcgcatggtgcaatcgcaggctccggcatcacagcagttccaggtgcagtcggctcagccgcgaggagaggctgggcctcgcgtcactgtggtgcctgataacagccgcttacctcgcacgttgtga

SEQ ID NO: 346550 - DNA, 780 bp, Pseudomonas aeruginosa
atgggcggcggcaataacccggacccgaatccggatccgccggatcagcctgatccgccggacaagcctgacgagaatgggtgcatccctccggcccagtggtcgggaacgacctgcgttatgccgcctaaagagcctggggacggtgatggcggcgatggcggcagtgatggcggtaacgggggtggaaacaacaatggcggcggtgacggctccggaggtggcgacggtggcgggggtggtgatgggtcaggtaatggcgatggctccggcaatggtgatggctcgggtgatggtggcggcaccggtggcggcgataagccgggcgaggaggagggtaagtgcgacccggccaaggaccccagttgtaagcccagttcagtgactggcgaggcttgtgaaacctcgttgcaatgtgatggcgacgcgattcaatgcgcgattctgcggcaacagaaacaggcccgttgtgacgcccaggaaatgaatgatttcgagaagaacaaagagaagatttcgaagttattccagggtgaagagtttaaggcgcagcctgaccaggaagttgagattccatcgtttatctcgcagtctggccggtttttaccgtcgggttgcccgcctgataaacagttcagtctgtccactggtggcggccactcctttacattctcttataagccgctgtgtgcgtttgcttctgacctgggcgtgcttattgttgtggcggcaagtatttttgcgacgctctatgttggtcgcggttttgggggtgagtga

SEQ ID NO: 346551 - DNA, 2163 bp, Pseudomonas aeruginosa
gtgccggacagtattgccaatagctctccgttggatatttctggttttgtaaggggggcttcgattgatttttacgtaaatgatctttcgttgcgtttaagtattccgcaggcatatgtgcgaaaaaacacgcctggttatgttgatcctacgctatgggatgagggaatcaccgctttttttacaaactatcaagctaatttcactagaaatatcagctatggggaaagaaaagattaccggtacgtcggtttacggaatggtctaaatgtgctcggttggcggttacgtaatgactcgtcgtttaccacaggtactaatgcgaaaggtaagttcagcagtaatcgtacctacatggagcatgatgttcgttttttaaatagcaccttagccttaggggagctatacacgtctgctcagggagacgtatttgacagcgttcgtatgcgtggtctgcaattgcagacagatataggaatgctgcctgataatgaaatcagctatacacctgtcgttcgtggaattgcagagactaatgccacggtagaagtgagtcagaatggatttgttatttactctatgaatgtgcctccaggagcctttgaaattaaagacatctatccgagcggatcgaatggcgatttagatgtaaggatagttgagtctgatggccgggaacgtgtttacaaacagtcttattcgtatctgcctgtcatgactcggaaagggggaattagatatggcctggcaattggtgagtatagtaatgatggacagccttcagtaaatctgtttcaaggtaccgcagtgtatggtctctctgatggtataacgggatttggaggggtgctacgggctgaaagatatagtgccagtaatataggtttggggctgaatactccatatggtggattttccgctgacataagtcatagctattctgtgcctaaacgaggtagagagaggcgtggacagagtttgcgcttactttattcaaagacagttaactctacagggaccagtttcactgtgatcgggtatagatactctacggaagggtatcgaactcttagtcaacatgttgatgagttctcaggacaaaattatctaggaggttcgcgtctcagtcaccagaaaagcagttttgatattactgttaaccagtccttatttcaaggtggatcgctttatcttacggctggagaaaccaagtactggaggcgtaccggaagtagtcgtcggctccagctcggttttagtagtagcgttaagaacgcaagctatagtttagcggtctctcgtacgcaagaaactagtcagttcggaaggtcagatacacagtttacggcatcaataactattccattcggacaaggtggtcgttcacaacaagtttatgcaaatgcgattagctccggactgggcgactccagcttaaatacaggtgtgtctggttacttaaatgaggacaatacgcttacctatagcgcacaggcaaattatagtagtctgggagggagatcaggaagtttaggtataggtatggacacatcgaagatgaaactgtctgcaggctacagtcaaggggcaaatacaaagcaggctaacttgggcgctaatgggtcaattgtgctacatagtgatggcgtaactcttgggcagccggttggcgagacatttggtttaatagatgtctctaatgcttctggcgttggtcttgaggggtacaaggctattcacactgatgcggatggttatgcgatagttccttatatgcagccctatcgttataactggatcagtctagatagtaataccttgggctccgatatggaggtaagcgaagcctctcaagtagtggtgcccacccggggcgctttggttaaaaagagattcgtggccgaggcagggaggcgtattcaatttgatttaactatgaactccaacgaaacaattcctttcggggcgcaagcttacgataagtctggtaagataattggtatggttgacaatctttctcgcctgctggtgtttgggattgaggatgaaggggagatttcagttcgctggggggggcatgcatgtatgggagattacaaattgccgccccggaaccccaaaatgtcttatgagcgaatacagttaacttgtcgcaaaacttga

SEQ ID NO: 346552 - DNA, 1632 bp, Pseudomonas aeruginosa
atgggaaaaaacggcgcgcgagtatacagctatttgaggttttccgatccccggcaggcgaccgggagtagcgccgaccgtcagttagcgtatgcctcggcctgggcctccaagcatggtatggagctggatgccacgttgactctgcgtgacgaagggctttcggcgtaccacgaagcacacgtaaagcagggcgccttgggtgcattcctcagggccgtcgatgagggacgcatcccggcagggtctgtcttgatcgttgaggggctggaccgcctgagtcgagcggagccacttcttgcgcaggcgcagcttggtcagatcgtgaatgccggcattacggttgtcacggcgagcgacggccgcgaatacaacagggaagggctcaaggcggagccgatgaaccttgtgtattcgctcttggtaatgattcgggcgcatgaggagtccgataccaaaagcaagagggtaaaggccgcagtacggcggcagtgcgaagcatgggttgccggctcctttcgtggtcgcattgtgagtggcaaagatccgcagtggctggcctgggacggtgactcttggcagttcattcccgagcgagtcgaggcggtacgctttgctctagatgcatatcgatccggtattggggccgctcggctggttcgcctgatgcatgaaaaggggatggtgctgagcgactggggaattgcggcgcagcaggtatatcggttggtgcgtttgcctgcattgcgaggtgccaagcggatctccatcgatggcgaggacttcatgctggaggactactatccacggctgttgtccgatgaggagttctccgaactggagacattggtgggccagcgctatcggcgtcgaggaaaggacgagattgttggcatcgtgaccggtatcggcataactcgatgtggctactgtggtaccgcgctggtagcacagaatctcatgcagcgagtgaaggctgacggctcacttgaggatggccaccggcgtcttcactgcgttagctacagcaagaatggcgggtgcaatgggggtagctgtagctcggtaccgattgagcgcgccgtgctcgcttattgttctgaccagatgaaccttcagcgtctacttgaaccgtcgtcggccggcgaggatctgcggccgcgcctggtcgaggcgcaaaaaggcgttgccgagatcgagcgccagttggagcgcgtaaccgatgcgctgttggcggacgacagtggtgcggcgccgttggcgttcgtacgcaaggcgcgcgagctggaggaggatcttgaacggcgtcggtcagcagtccgggcattggagcaggagctggtaacgaagtccgcttcgacgcctgcggctggagcgtcgaagtgggcggagttggccgagcgggcgaaatcgatgaccgatgttgaggcgcgggagcaggcgcggcagttggtaatggataccttcgagcgaatcgttgtctacatgaggggagtggtgccggaggggcgaagatccaagtacattgatgtcttgttggtttctcgggcaggtcaatcacgttggcttcgggtcggtagacgaacgggcgcatggtcagcaggcggagattggaacggctcggcaccgtag

SEQ ID NO: 346553 - DNA, 759 bp, Pseudomonas aeruginosa
atgaaggtagggaaagatccggtgattgatgaaaacggcgaggtccgcgaactcaaaggcgccgacttcaagcacgctcgtaaagcctcggaagcccttcctaaaagtctccaggcgaagttgggcctgcgtgccaagaaagctgcggacaaggaggacgggtcaagctcaagtcctaggctgaaggagtccgcttcgcctgtgcgcgaggcaagggtggttcgaaataaaggcgagcacgtctgcatctacaacgttgggggtgagtctaggcgtcactctcctagtgacttgaaaatctcattcgaaactctgttctccgactacgtgtcgctccggaaggcggaatttccttgttctgagcgtcttcgggtaggacttttgctgacggagcgcgttgctccttatcacgtgaatttggacgtattcgagcatttggctcacaacgttgcctctaggtactccgttgataacgttcgtctactcctagaggagaacgagccgttagaccgatcccataagaaattggaggagatgagcaagagtgagatggtcatgcttgtacagatgcagtcggagctgctcgagcgcttgaaagtgctgtacgcggtggtaacgggggatgatctagtgactgcctcgatgcctgccggcatactttctgatgatgtacacagagcgatgcttgcaaaacgtttacgtgagatcgctgaggatgtagagatgtgcggttcaccggctcgtaaatctcaagcctga

SEQ ID NO: 346554 - DNA, 198 bp, Pseudomonas aeruginosa
atgaaagatagattgcatgatgcggcgatggccgagcacttccgcgccgatcctacctatgcagcggagctgctggccgaagtccgccgcgacggcaatccggccgagctggccattctgttgcggcagatggccacggcctcggcgggtgatgagaggtcggatgacaccgatacagagcgcggtctacctctctga

SEQ ID NO: 346555 - DNA, 435 bp, Pseudomonas aeruginosa
atgagcgagacgccggagcagcgcagccgcactatgcgggctgtgcgttcccgcgacaccgccccggaaatggtcgtgcggcgtttcctccacgccgccggtctgcgcttccggctccatgaccggcaccttcctggcgttcctgatctggtgtttccaagccgccgcgtggcgctgttcgtgcatgggtgtttctggcatcagcatcccggctgcaaggcggccgaccggcccaagtcgcggccggactattggaatcggaagctggatgggaacgtggcgcgtgacgcacgccacatggtcgagctggccgccgctggatggacggccttggtaatttgggagtgcgaaacacgcgacccgcagcgcctcgtcgcgctggcagccagcatcaaagatcagacaagccataagcggcggcacagagccgtctag

SEQ ID NO: 346556 - DNA, 228 bp, Pseudomonas aeruginosa
atgaaagacagatcgcatgacacggcgatggccgagcacttccgcttcgatccgacctatgcagcggagctgtttgccgaagtccgccgcgacggcaccccggccgagttggccattagtatttgcccagaaccgataattggtttttttattaatggccaatccacagccaactgggaggaggctagacggctctgtgccgccgcttatggcttgtctgatctttga

SEQ ID NO: 346557 - DNA, 1347 bp, Pseudomonas aeruginosa
  misc_feature (740)..(740): n is a, c, g, or t
gtgatccgttccctgcgcatccgtctgatgctcggcgccgccgccctggcggtgctgttcatgctggcgctgctgccggccctgcagcgggccttcggcatcgccctggagaacaccatcgagcagcgcctggccgccgacgtggcgaccctggtctcggcggcgcgggtggagaagggccgcctggtgatgcccgagcacctgccggtggaggagttcaacctgccggaggccaaggtcctcggctatatctacgaccagaatggcgatctgctctggcgctccacctcggcggccgacgagtcgatcaactacacgccgcgctacgacggccgcggcaacgaattccacaccacccgcgatgcgaagggcgaggagttcttcgtgttcgacgtcgagatcgacctgctgcgcggcaagcaggcggcctacagcatcgtcaccatgcaatcggtcagcgagttcgagagcctgctcaaggggttccgcgagcagctctacctgtggctcggcggcgccctgctggtcttgctcgggctgctttggctgggtctgacctggggcttccgggcgatgcgcgggttgagttccgagctggaccagatcgaatccggcgagcgcgagagcctgagcgaggagcatccgcgcgagctgctgcgcctgacccactcgctgaaccgcctgttgcgcagcgagcacaagcagcgcgagcgctaccgccactccctcggcgacctggngcacagcctgaagacgccgctggcggtcttgcagggggtcggcgaccagctcgccgaggagcccggcaaccgcgagcaggtgcgggtgctacagggccagatcgagcgcatgagccagcagataggctatcagttgcagcgcgccagcctgcgcaagagcggcctggtacgccatcgcgagcaactggcgccgctggtggagaccctgtgcgacgcgctggacaaggtctatcgcgacaagcgggtaagcctgcagcgggacttctcgccgtccttcagcgtgccggtggagcgcggcgcgctgctggaactgctcggcaacctgctggagaacgcctatcgcctgtgcctgggccgggtccgcgtgggcgcccggctggggccgggttactcggagctgtgggtcgaggacgacggtcccggagtgcctgccgaacagcgcgcacgaatcatccgccgcggcgagcgcgccgatacccagcacccggggcagggcatcggcctggccgtggcgctggacatcatcgagagctacgacggcgaactgagcctggacgattccgagctgggcggcgcctgcttccgcatacgtttcgctacagtctga

SEQ ID NO: 346558 - DNA, 672 bp, Pseudomonas aeruginosa
gtgatcccgccgggcgcgcaaacgccctgccccgccgggacaaggggcgacgaagccacgcagttgcggcgcttcgtcgccagcgtccccaaccggataagcatcggcgccgcccgtggcgcggcgccgctgtccgccctgctcggcctgctgctgctcggcggcgcctggaccttgcgcgaccaccccggtcccggccatgaggcggcggcgctgtgcctgctggcggcggccgccctcctcatgtgcctggcctgcctgcagcgcaacgccaggagcgcgccgttcctcgtcctcggccaggggcgcctgcgcgcccgcagcctgtcggcgccgctggacctgctggaggtcgccgacctgcgcctggaggacggggtctggttctccgcgatagtcctcgaactgcacggcaaggcgctaccggcgccatccacgcgcccgctcgatccgttcgccgcgcgtgccgtcagcgaatgccgggacggcccacgggttcgcctgctgtcccccggctggcgcctcaacggtcgcaacctgtcgctactggaagccgcggaggtcatcgacctctacctggacatcgcccgcgcccaggcccggctccgccaactgggcgagatcccgcccagtgcttcctcttcactcccaactccaaggatatttccatga

SEQ ID NO: 346559 - DNA, 195 bp, Pseudomonas aeruginosa
atggagcgcctgttccgcagtctgaagtcggagtgggtcccgtcaacgggttacctgacggcgcaggaggcccaacgggacatcagtcattacctgatgcaccgctacaactggatcagcccgcatcaattcaacgacgggttaccacctgcggtggccgaagaaaaactcaacccactgtccgggatgggttga

SEQ ID NO: 346560 - DNA, 834 bp, Pseudomonas aeruginosa
ttgggcaccactccgatctccgccatcaacgctcccaaggtcatcaacctgctccggccacttgaaaccaagggcagcctggaaaccgttaaacggctgacacagcgactcaacgagatcatgacctacggggtcaactcggggctgattcatgcgaacccgctcagcgggattcgctccgttttcaagaagccaaagaaaaagaacatggcggcgctcccccccgatgagctgaaagagctcatggtggcgatcgccaatgccagcatcaaaagaacaactcgttgcctgatcgaatggcagcttcacaccatgactcggccagccgaggcagcaactgctcgctgggcggacatcgacatcgagaagaagatctggacgattcccgctgaacgcatgaagaaacgccgtactcatatcgtcccgctcacggaacaggctctcgcgctcctggaagcgatcaagccctacagtggactccgggaatatgtgttccctgcagaccggaacccacgcacccactgcaatagccagaccgccaacatggcgctaaaacgcatgggcttcgaagggcgcctggtcagccacggcatgcgctcgatggcaagcaccatcctcaacgagcatggctgggatccagaattgattgaggtggcgcttgcccacgtagataaagacgaagtccgtagcgcctacaaccgggcggactacatcgagcgcagacgcccgatgatgacctggtggagtgaacacatccaggaagcggcgaccggcaacctttcggtgtccgctatcaaggaaaatcgggacagaaaaatcgtttcgatacgctga

SEQ ID NO: 346561 - DNA, 1059 bp, Pseudomonas aeruginosa
atggcaatttacgcactttggaacaacaaaggaggggtgggaaagagctatctcacgttccaaatcgcctccgagtacgcgattcagcaccccgacaagcgggtgctggtcatcgacgtgtgccctcaagcgaactcttcatcaatgatcctaggtgggattgaggatggagaaaatgcgctaaacaccatccactcggccagcccacgcaaaacgatctcgggctacatcgaagatcggattctaagcccctacgtcaatccaaataccggtgccaatttcgtaacacaggctagctccataaaccacgacgtcccagacaacctttatttagttgttggagatgaacagcttgaaatacaagcctcaagggtgatgtccgccacattcccaggtcctcaggatgcctggagaattgttcatacttggctcagcgacttgatcaacgacatcgcaaacagctggaatcaaactgattacacagtattcattgattgcaatccaagtttctcagtgtatacagagcttgcgatgtccgcagctgatagacttctgatccccttctcggccgatggctccagcaagcgggctgttcgagccgtgctctccctcgtttatggtattgcgcgccagcctggccagcaacaatccgaattcttcctcaacaccggaagatatcggatgagcttcccagacatatatatgtatattggcaataggctgactcagatgaatcaatcatctgctgccgcattcaaaactgtggtaaacgagattggtgacgaaatttacgatgtatggagagcgaatcctaaccttttctgcatccaccccaacggcacggcaatccccaacaccaaaaaacttttcaaagcaatgttccaatacgaagtcaatgatgctaattcagcttctgtagtatcaggtgcgataggaacccccatctcgacgctacgagcagggcaagccaacgttctgggcaaaagtgtgactgtcaatcagagccagctcgataagcaggttccaaacctagtggatcttgttaccgccatcgaatga

SEQ ID NO: 346562 - DNA, 1206 bp, Pseudomonas aeruginosa
atgggtagaggcgggagtggggtcagggcagtctcagactcgagcatcgagatcacgttcatgttccggggtgttaggtgccgcgagcgcgttgcgctcaagccctccgccactaatctgaagaaggcccagcagcacaaggcggcgatcgagcatgccatcgcccaggggacgttcgactattccgtcacgttccctggctctccccgggccgccaagttcgcaccggaaaccagccaggaaacggttggtggatacctgaccaggtggctggaggcaaagaagaagcatatctccagcagcaccttcgaaggctatcgaaaaatcgtcgagttgcggctcgttcctgccctgggccaccaccttgccctcgatcttaagcggaagacgatcaagggctggctggacaagctgcaggtcggtaacaagacgctgagcaatattcagagctgcctgcggtccgccctcaacgacgcggtcgacgaggagctcctggacacaaacccgcttgccggctggacatacgcccgaaaggaaactccgccgaaagatgacgacgtggacccgtttacgccagaagagcagcaggcgattctgaccgccctgaatggccaggccaggaacatggtgcagttcgcgctctggactggactccgcacaagtgagctggtcgcactggattgggccgacatcgactgggtacgaggagaagtgatgattagccgggccatgactcaggcggcaggtggagaggccgaggtaaccaagactgccgctggccggcggtcagtgaagctgctgcgacccgcccttgaagcgctgaccgcgcagaaggcgcatacattcttggctgatgaagaggtcttccagaatccgcgcacgcttgaacgctgggctggcgaccaaccgatccgcaagactatgtggcatcccgcgatgaagaaggccggggttcggtatcgtcggccgtaccagactaggcatacctacgcttccatgatgctctcagcgggagaacaccctatgtgggtagcgaaacagatggggcacagtgattggactatgattgcccgcgtctatgggagatggatgccatcggcggattctgatgcgggatcgagagcggagcatgtctggttagagagctatggcagggatggagagcactcaaacctcccacggcccacattttcactgaagatttaa

SEQ ID NO: 346563 - DNA, 2667 bp, Pseudomonas aeruginosa
atgcagagggagctcttacataatttccccagtcgcgttgccccattcgtgccccttcacccagccacatacacacccaacctattgatctataacgtgacttccgacatctccgcacacacgccgatgatgcagcagtacttcaaactgaagcatcagcaccccgaccaattgatgttctatcgcatgggcgacttctacgagctgttctacgaggacgcgaagaaggccgccaaactgctcgacatcaccctgaccgcacgcggccagtccggcggcaaggcgatcccgatggcaggcattcccttccattccgcggagggctacctggccaagctggtcaagctcggcgagtcggtggcgatctgcgagcagatcggcgatccggccaccagcaaggggccggtggagcgccaggtggtgcggatcatcactcccggtacggtgagcgacgaagcgctgctcgacgaacgccgcgacaacctgctggcggcgatcctcggcgacgagcgcctgttcggcctcgccgtgctggacatcaccagcggccgcttcagcgtccaggagataaaaggctgggaaaccctgctggccgaactggagcgcctcaacccggccgagctgctgattcccgacgactggccacagggcctgccggcggagaagcgccgcggcgtacgtcgccgcgcgccatgggacttcgatcgcgactcggcgcacaagagcctctgccagcaattcggcacccaggacctgaaaggcttcggctgccagaacctgaccctggccatcggcgccgccggctgcctgctcgcctacgccaaggaaacccagcgtaccgccctgccgcacctgcgcagcctgcgccacgaccgcctcgatgacacggtgatcctcgacggtgccagccgccgcaacctggagctggatatcaacctcagcggtggccgcgagaacaccctgcaatcggtggtcgaccgctgccagaccgccatggccagccgcctgatgagccgctggctgaaccgtccgctgcgtgaccgcgcggtactggaagcccgccaggagtccatcgcctgcctgctggaacgctaccgcttcgagaacctgcaaccgcagctcaaggaaatcggcgacctcgaacgcatcctcgcccgcatcggcctgcgcaacgcccgccctcgcgacctggcgcgcctgcgcgacgcgctggcggcgctgccggacctgcagaacgccatgaccgaactggaggcgccgcacctgcaggcgctggccaccaccatcggcacctatcccgaactcgccgaactgctggccaaggcgatcatcgacaacccgccggcggtgatccgcgacggtggcgtgatcaagaccggctatgacgccgagctggacgagctgcaggcgctgagcgaaaacgccgggcagttcctgatggacctggaagcgcgcgagaaggcccgcaccggcctgcccaacctgaaggtcggctacaaccgcatccatggctacttcatcgagctgccacgggtgcaggccgaacaggcgccggccgactacatccgccggcagaccctgaaaggcgccgagcgcttcatcacgccggaactgaaggccttcgaggacaaggcgctgtcggcccagagccgcgccctggcccgcgagaaggcgctctacgaagagctgctggaacgcctgatcggccacctcgctccgctccaggacagcgcctcggcgctggcggaactggacgtgctggcgaatctcgccgaacgcgcgctgaacctcgacctgaatcgcccacggttcgtcgaacacacctgcctgcacatcgagcagggccgccatccggtggtcgagcaggtgctggagacaccgttcgtggccaacgacctggcgctggatgccgacacccggatgctggtgatcaccggtccgaacatgggcggtaaatccacctacatgcggcaaaccgcgctgatcgtgctgcttgcgcacatcggcagcttcgttccggctgcacgctgcgagctgtccctggtggaccgcatcttcacccgcatcggctcgtccgacgaccttgccggcggccgctcgaccttcatggtggagatgagcgaaaccgccaacatcctgcacaacgccaccgacaagagcctggtgctgatggatgaggtcggccgcggcaccagcaccttcgacggcctgtcgctggcctgggcagcggccgaggacctggcccggactcgcgccttcaccctgttcgccacccactatttcgaactgaccgtactgccggaaagccagcccgcggtagccaacgtgcacctgaacgcgaccgagcacaatgaacgcatcgtgttcctgcaccatgtactgccgggaccggcgagccagagctacggcctcgcggtggcccagttggccggcgtgccggccccggtaatccagcgcgcccgcgaacacctcaagcgcctggaaaccaccagcctgccgcacgagatgccgagccagcagagcggcaagcccgcctcgccgatgcagagcgacctgttcgccagcctgccgcacccggtgatcgatgaattgtcgaggatcaatcccgacgatatcagcccgcggcaagctctcgatctgttatatgcatggaagatgcgggtctga

SEQ ID NO: 346564 - DNA, 1101 bp, Pseudomonas aeruginosa
atgaaaaagctgcacagcgagcgtaagcagtttgtgattagtgccggcagggctcgctggcgtaatgctttggctaggcgaaatattgtttacgatgcaaaccgattctataaagctgaaaagtacaagggacgaactcgtattgtcgctcctgaaaaactgtctgtgtacagctatgatgggacgaaatcagcttacgtagagactatgaagtttgtctcgaaaattgaacgaaactttcgaaaaacagattgctatgtagacttcaggaatactaagagcatttcagccgcggcaatggtcttggtatacgcggcggtggatcttgctgctaaaatttcggggcgtgatggtgaggctgaaatattatggtccaatgcctcggagcgcgttaatgcaatactgaaagggaataatctgcataagctcattagaggtaggcatgtttcttactctctggagggggtgagaactatgccgattatctcaagcgtaggtaagcagcatatggaggaggtcattgactttatccagcggcgtatttacaaagagcgaatgactccagatacagagcatgcttacggtgatgcggtttctgaaaccataaataacgtaaggcttcatgcttatcctaatcttgataatagtgagaagcgctggtggctagtttgtcacacaattgggaagatgttgtacctcgcaatttacgatcgtggggtaggcattcccaagacagtagttgagcgctcttggtttttaagttctcttaagtatactcagccggaagagtatgcaattttggaagcgcagtttccagaattgaccaaggggtgggacttgcatgtgtttaatagaatatcagatgaaaaactgatctacctgtcaatgcaaggtgatgttacaggtacgaaaagcgataaacacggtcaaggaagcaaaagtattttagcgctggtaaatgacacgccgggcgggcagttgtgggtatttagcaatgatgggctgtataagttcaggcagaccgatgaaaagcctgtgctattcgcattgccaaaaactttcccggggactttgattcagtggaatattgagttgccatga

SEQ ID NO: 346565 - DNA, 750 bp, Pseudomonas aeruginosa
atgagcgaaaaagaacccgatccgctgacgcacgaggagttcgacctcctcatcaccaaaggctgtctgcatccccaagacgttgctgcaaccacacttgcggtctacaccggtctgcgcccgggcgaactctgcgcgctggccgtggaggacatcgacctagaggcggggaaaattgaaatcaccagggcgatcaccgccaacggcacattcaagcgtcccaagactggcaaaccccgcacagtgctgctaatggagccagcgctagaagcctgccgcaccctgatagctatagtggccaaacacaccaagcgggacatacgcgtgtaccagaaccggcatgaatggcgtgatgagtctgttaccccgctcctatcgccatgcactcaggcaaggaagcgggtagtcaacgactggttcgtatcgaccgcttggaatacgaaatgggctggtatacagcgaagagcggggatccgcccgcgacgcccataccagacacgccacacttacgcgtgctggtgtttaaccgctcgaggcaaccttgcattcattgcgaagcaaatggggcacaaggacttcaccatgttggtgaatgtatacgcaaggtggatggacgacaaatctgaaaacgaaattcatcgaatatggtccgaactaaagcatcaccacctaaaatcagcaacaaacctcgcgaagtacatcaaaacaaccagagacactacagctaaaaggaacccagagaattcgtag

SEQ ID NO: 346566 - DNA, 705 bp, Pseudomonas aeruginosa
atgtgcgggaggtactcgatctacgagagcatggacgactacctgcggcagctggccctcgatctggtggtcatcaacggatatgaccatgagcggatcaaccggtacaacgtggcgccctctacccgtgtagagctgataaggcctgtgcctggagggttgagcgtcgatcgagtgaagtggggatggtcgccgttctgggcgaaggagaagcggcccgacccgattaatgcgcgggccgagacggtgatgacggggaagttcttcaaatcgctttggccgaatggccgagccttggcgccggcgaacggctggttcgagtgggtacccgatcctgcggaccccaagcgcaagcagccctactacatccaggcagcggaccaggccccgctgctcttcgcggcgctggcagaaatccactcgggcatcgaaccaaacgagcgcgacggtttcgtgatcatcaccgcagcagctgaccaaggcctcgttgatatacacgaccgcaaaccgcttgtgctcacgcccgaggttgcctgtgagtggatctcgccagacacctcgattgagcgcgcagaagagatagtgcgaaccggttgccgagccgccggtgatttcaagtggcatgcagttcgtaaggaggagggcaatgtccgtaaccaaggacctgaattgatactacctacggatttaaaaagccgcagctag

SEQ ID NO: 346567 - DNA, 429 bp, Pseudomonas aeruginosa
atgaccatcaccttcctgggcgcgccgacgggcggccctgcgctgctgccggtgtattcgttccgtgtgccggccggattcccttcgccagcggcagatcatctggagcggcatatctccctcgacgagctgttcgacctgcgtgccccgcacgtgtacctggtgcaggtggagggcgacagcatgcagggggccgggatcttctcgggcgatcttcttatcgtagaccgcagcaaggaggccgagcacggcgacatcgtgatcgccgcgatcaacactgagcccgtctgcaagcgcctgtaccggcgcgacggcgtgctgattctgcaatcggagaatcccgcctacccactgcggcatgtcatggaaggcgacgacctggtcatctggggtgtggttcgctacagcgtgcgcgatcatgcccagtga

SEQ ID NO: 346568 - DNA, 1278 bp, Pseudomonas aeruginosa
atgcccagtgaccaggtgttcgcgctgattgactgcaactcgttctacgcgagctgcgagcgggtgttccgtccggatctggccaagacgcccatcgtggtgctgagcaacaacgatggctgtgtgatcgccaggtcatacgacgccaagccctacgtgaagatgggcgagccctatttccaggccaaggagaagctgcggcgacatggcgtcgtggcgttctcgtccaactatgcgttgtatggcgacatgagcgagcgggtcatgtcgctgatcgagtcgatggtgcctgcggccgaggtctattcgatcgatgaatgcttcgcggatctcacgggcgtgcaggggaccctgacccagttcggccgggaggtgcgcgccaaggtgctgcgctgcaccggcatccccgtcggtgtgggtatcgctcgcaccaagaccctggcaaagctcgctaactacacggcgaagcgtctgcaggcgcatgcgggcggggtggtcgatatcaccgatgacttcaagcgtgattgggtgctgcgcaacactggggtgaaagaggtctggggcattggccggcggatgacggcacacctcgaggcgatgggcatccgcatggccatggatctggcgaaggcagacccgcggatgctgcgcgacaagttcagtgtgctggtggagaagactgcgcgcgagctcgccggcaccccttgcctcgagctggatgaggcggacccgccgaagcaggagatctgctgcagtcggatgtttggcaagcgcctcactgagttgacgccgatcaagcaggcggtggccacctacaccgggcgggcagccgagaagcttcgtgctcagggctcggtatgcaagcgcatgcgagtatcgatccgcaccggcatgttcaaccctaacgagttgcaccttgccaagggcgccctggtcgaactgccatatcccaccaacgacaccatactgctgaccagggcggcaacagatgctgtggagagggtctaccaagccggctaccggtacagcaaggccgaggtgttgctactggatttgcgacagcctggcgagttcaccgatgacctgtttgcgacttcacagccagttgcgtgcgatcgcttgatgtcggtaatggatgagatcaatgaccgatatggcagggggacggtgcgggctggaagcgtcccccgcacccccgaatgggggatgcgccgtgagatgataagtcgctcgtacacaacgcgacttgatcaactttggatggtatatgcccgctaa

SEQ ID NO: 346569 - DNA, 624 bp, Pseudomonas aeruginosa
atgagcagatttttattaagcagatggattcatttaattatatttttagttatgctctcgattgcaacttataccaagttcagctatcccagcctgactgactcccctatcaacacaataggatttattggattctggctaacattttttgggcttctagttgcaatcatcgaagtattgcgaactggatcaattactatcaagatggcaaaagtagctgagaaatcacacaagaatctcatgcaacaaatagagcttcaaaatataaaagagtgcatagaaattataaactcagcacttttaaacctaaatagcaacaaagccataccagtaatattcctatccaggataaaacaaggatacatggcatcattccctaaagattcctcgcctttacctgcgagatataacgagaacttaaacactcttaacacataccaacacacttcgccaactcggagacgcaacaaggccaacccttactattctgaggaccaacccagcgccaccgagccggccaagaacgagcacgagcacccatatcaagcgaccattgacactttaaagcgaatgcacgacgacctaactgagcattcggtcaacagaaaccaatataagggatga

SEQ ID NO: 346570 - DNA, 1311 bp, Pseudomonas aeruginosa
atgcaacaagaatttttgttgaagtttcttgaggttggagctatcgacctcaaaggagatgacaccaaactcgataagcttcgagccacggctaaagatctgtcagctactcttcgaaaggcaccctcaaacacggctcgcttcacgatggtggcagctgatcccaacatcgctgctacggaccccaccatagaggaggctatggcctccctacgcaagcaatgggagacggttgcaaacgcctttgccgcgcgtcctgtcaacatcttgcgagccatgctcctcgacgcgattgtgcaggcagctcgttcagacgacgcaattgcggttgccttcgtcaacactgcacgtaatgccctggcccactccgagacagccgacgaagctgagatttggcgcgaagctgttagcgaaattgaaacgaaggtcgatgctcgtgcagaagcggagtgggcaacgccggagatgattacggttgatccgttgcagtacatgccaccagccctagcagcaacggactatgaggctcccacaacagatcgaagtgcgctccaggcaaaaatccattccgctgcggggccttggggggggaccgatccgaaaaatccacatagcccccatagccaacctcaacaatgggctagtgaatttgcaaacaggatgagcgtagtcattgcagatgcattggatgaaatggctgaggagcttgcgccgcgtccagtcgatcttgctggtccgctgtccttactggccaaagcggtcagcgcacacgttgaaaaggcgttagccagtttcagcggtgcgacggcaggcctgcagcgccgcacaaatttgctttggtggaaggaagccctgtactccccgagtgctcatgctagctacctagacctaccgccgttcgaggcttctgctttgatggcactcgacttacatgaacaggtgccaacctactcaccggcgagcgtatcggcttttctgcgggaggctatccgctgcctaccgattgaaaataatggtgagcgtgatgtcgctggccttgtgcgcgactctaggacagctacatccatgcaacccttccgcgcgctagctgctcagtacgcgccggcgcccgttggtcgaggccaactgctgtcgttgattggacacccgcatgactcaagcgccgacgaagcaatgaccctacgtgccctcgctggcatggatgcctccctgaaaatgaccccatcagattggggaacgtacctattccgtgagcttcagagcgcgcgtgcaaccagcggtaacccagccaaacaggctaggaagaagtga

SEQ ID NO: 346571 - DNA, 951 bp, Pseudomonas aeruginosa
atggataggtgtccccaacaaaactgtttcgctgacgacaacaccacctgcacattggggcatattcgtctcgatatgtgccccgagtggcagcgtgtcagcaaaggcgaggtaactgcatcgcctggtgacgatcagatgctgctcccatggagcggcttggcgctgggagaggcggacctaaacttcgtcagcggtaaggtcaagcccatcactgtcggtatcgtcggcccagaaagcgcaggtaagacgacgatcttgggggcgctctacctgctgctgggtcgaggggaactaactactggctcaagttctttcagcaactcttatacgctggcaggttgggaagcagtggcgaccagtcttcgctggaagccggggcagcccccaagctttccacctcacacacccagcggagcagctcgagcacccggtatgcttcacctcggctttcgccgtgatgacgggtcgctgcgcgaccttctttttgccgatgcacccggcgagtggtttcagaagtgggcgatcaacgagcaggacgccgatgcagaaggggcccgttggattgctcggcatgcagacgtcacgctactgatcgctgaccgtgaggcacttgctggccctaagatgggctccgctcgaaacgactttcagttgcttgctctgcgtgcagtggccgaggcccgaggaaggcgccttgcacttgtctggacgaaaggggatgtagacgtggcgccagccatggaggcgcggatcagacaagcggtggcgtcgaactcatcaagcgtcccggagttcactgtcagtgtgtacccccgtggcgaggttgacgctgcagaaggcttccgcgagctgtttggctggatcctttccaccaagcgcgcaggagtggacttacccacgacagaagtgtctggtcacgacccgctttttcgattcgttaggagatag

SEQ ID NO: 346572 - DNA, 837 bp, Pseudomonas aeruginosa
gtggcagctcaacacaccatcttgttggttggcgagtcgaacgtcgggaagactcactatggggcccagttcttgaagcggctcatggtcaaggcttgtgcactcaagatgtctggtgctccaacaaatctggaggcgttcactacggctctcagttgcttgacagagggaaagtcgaccgatcacacaccggccagcacctatgtcgagagcgtctggcccattacggacgaagcaggccgctgcgctgaactggtttggccagactacggcggcgaacaggtccgcagccttgttacgcaccgccggattccggccgcctggcgtgaacgcgtactcggagccacagactgggtattgctcatcagactgcattcgcttcggtccgaagacgatctgttctcgcggccgttgcaatcattcgctgcaaatgagtcccagggagaggcagccgcttacgagctatcagaccaagcaaggacagtggagcttcttcaaatgctgctctacatagcgcagttccacttggaccgcccgcttcgcaaacctcgcttgacgatcctgctgagttgctgggatgagctcgaaacgacggaactaccgactggcctcctagcctctcgattgccaatgctatggtcgttcgtgcgaagcaattggacggcacctactgtcattggcctgtcggccctcgaacgcaccctcagcacgacggatgcggacgaagactacgcaatccgcggccccgaagagttcggctacgtggttctacccgacggtacgaagagccctgacattactctgccgatccaacgtttgatgatcgatgggaactga

SEQ ID NO: 346573 - DNA, 2484 bp, Pseudomonas aeruginosa
atgcgagtcgagcaggcactctatggcgaggtcgcaggtcgcggccacggactcagagcatcgagtacgaatgcgcctatagtcgcgaccatcgcgtcaaagctcgacctgccagatgcagtgcccccaggtgtccgagattggtcgccgttcgtacggggctttcccatcgacgaccactacattcttgctcgcacgttcctggattcgagcgcgtctcgcggcggcatggtgctgacacacgccctaatcatcaacttggatgatatgtgccaggctagaagtctgaccacattgtttgggcgactagcctcttcggttgcaggctgccccaactcggtggaaacgcttgagcttgatactaccgacagcgaccacgcgacggcagctgacttgatcggtacggccaatgcattggcggcccaagggctcgctcctgttgtccgcctgggtgtcgagcgattcgagcacctcgtcgattcactgtggaaaaacctctggccggcattgagacgaacgttcgcgttccggctgagcttcgatccaaaggacgtagtagagcagcctacgccgacgcttgtatgcacacccgagcagctccaagctcgctggacgaagcaccgcatcgtcaaaccagacgatccaatcccgaattctgcacccgctgggattctctgcggccagcgtgacgtgcggccaatactggctctcgccgaggacttgggccttgaagttcatacactcagggaattgatcaagcttgaacggctgcacaccctcgtatctggaggtgggagcttcgatgatttgctggctgccatacgcttggtagacggactctcaaatcagccgacgcttggtacaaatatcaaggacaagcttctcggtcagttcaagaccttgattccatgcgcgagctgcaaacaattgctgcttatgaagaatttggcgctgtctggctttgctaacacgcagccgctgtggtcggctgtagagctactcgtcagcactctcggattttcgccaaaggacgacagcgacataatggagatggtcgcggcctcggttgatgaggagctcgcgttgccagcgtggcgcactgcagtgacggcaggcttatcgactgctgctcatcgagaaagccccgccatttcccaagcaatttggagatgggctgagcgcagtcaccccgcgttcgccgcggctgtaggcaccctaccggctgacacgatagttgaacagcggctggcgggggaagtgcccagaaagctcaacgttacttcaccggccgctctgctctctccactgctgaagaagcgctggctgaccgcgtacggcgccgcactggctgcaacgctgccccctctcgatgctacaggtcagcagctcaaggtggacagggacccagaccacagcgccggtttgcggtcagcccttcgttacgcgagccctctccagacgttggaatgtgcgctcgtgcataaggactcgcgtttggttggattgtgtgcagagcaggcggctgtccatcctcaaatcctgactaacatccgctgcgatgacattaccgagcaaaaagtatggtgtgctgcgattggtaaggattcttccctgtggagcgcacccagtaatgccgtcggtgcgcgtgacactgttctagctcgactcgctgatggactacccgccgacaccggcttactccagacgttggcacagactcccttggccgatctcagcgctactaaggagcgggagcgtttatggtcgcttctgcccactgcgcagcgtgaccgctacctgcaagcgaccgcaaccggctggttggaagtcgctgcgaaaggcgagatggtgactttccctgaggccccacttgagcgcgcaatcatggcgagctcaagcttaggatccgtacttgagaggtcatcggtgaaggttgatgtacgtctagcaatcgtaagtgccctcccgtcgttccccgaagagttgttcatcacatggctgaacaacgtcttgagtgacactcgcatgctttctcatgctgattctgagcagctaggggcgcttgtagcgtcccgacattgggaacgtgcggcgaaacatctttcggagcggcttgccgaccatcgttcagatctcatgcctgggctacggctgtgcgctaatttgcttggattttatgcacgttggaaacttggagtctcaagaccaagcactgctgagaagtggaaagcattcgaagaagaggcccgtgaactctatccaagcggcccggatagcgacgaactctggtcacgcgccggaggaaaaaattccgacctgccaggagggtctcataacggggcaacacgttggcgcattgcactgaactctattcgttatggcggccgtccgactacgcgcgagctccttacagtgatgcgccaggattttccctggaacgaaaagctgcgtctgtttgccagcgacactgacattgttggataa

SEQ ID NO: 346574 - DNA, 1101 bp, Pseudomonas aeruginosa
atgaacccgactggctacccacaaggccacgcccttctagtaggcgtggcgaactatcagcaaatcgccagcctgcctgctgcgattctgaacgacgtaaacgatgtagcagcgacgctctcatcaccacagtactgtggctatgcccccgccaacgtggtcactctcctcgacgcagatgctactcgcggagctgtgttgaagggtttgactgaactagctgctcggacgggccctgacgacacagcttgtgtgttcttctcaggtcacgggggagttgtcggcagtcctggcaatgaatacagcgtactgtgtaccgtggagagcgacctcgctgacattgggaacacaaccgtgagctcgaatgagttcgccgcagccctagcgcagatcaaggtgaaacgactcctggttttcatcgacgcctgccatgctgggggtgccgcaatctcgaagaggttgactgacggaaaaggccacgaactcaagtctggctatgcccacgacaccttctcgaagctggcagtcgggagtgggcgggcgttaatggcatcctgtcgtgctgacgaagagtcgaatgtattgatcggtgcgaggaatagcgttttcacaactgcgctactcgcaggtttgcgaggggaagctgacaagaacggcagcggcttcatcaaggtttttgacctatttaaatacgtcgccgaagaagtgcctaagctgatcccagacggccagcacccaatttttaaggctgacaaccttgaaggggacttcgctgtagcgctgagccaaggcgggaagaagtcactgcaaaatttggaaggcacaccaacggtgcaagaggggtccccttggtcggtgcttgagaagctcctgatcgaactctacccattcggaccgcgagaccaagaggtgtggagccgctccggtggtgatttgtcccgtctccagtttcatcctaccggtcaggctgcgtggcatgcagcgcttcgcacgctgaaacagggaggcggaggcagaaatatcgacttcgacagcttgcttaatactgtgaaggaagactttccgaaccatccgatgctggcgatactaaagactccttaa

SEQ ID NO: 346575 - DNA, 243 bp, Pseudomonas aeruginosa
atgattaacccggtcaatcagacaagaaagaacgtacatgggctgtctgagtggctcggcactaaaccgtcgctgcgcctgaaaataggctacggattcatctttcctaactctgatttcggtgaaaatatttgttcgcctggcatgtacgacaccgccaccgacccgccccaaccgctgtatatcgattttcaagcatatccagacgttgcgcagaaaatcatagaactaatgaagtattag

SEQ ID NO: 346576 - DNA, 1698 bp, Pseudomonas aeruginosa
gtgttctctttcaatgctcgacttactgagtatattcgcgatcagcttgatggctatggatcttgcactgtgatgacttggcatgggttcttccgccttgccgccgacgttactaagcgcggagcagtcggtgaagattggtataaagttgattgtgtagaggatttgaaagctgctgttcaaagtaagctgatgaacgaatacgatgctctcgtggtcgacgaatctcaagccttggcttattcgtggtgtgaggcacttgttagttggtttgatgaaaaacctaaggctttcttctgtgacgaaacccaagtcttcaagtttgagcgaaacgtcgtatctctggaaggattgaaaggcattctgggcgttgagaccttcccgcttacaatcatcttgcgcatgccgaaggcggttaccgagattcttgcagaggtagttcctccaaagcttcagcattcctcgccaagagcagtggaaccagacacggcccttgaggtcattacgctctcgccttgcgaagaactgctccgtatcaaaagcacactggtcgaagggggcgtggacaatgatgatatcgtagtcttgacaggctcaatcatagacagatcgtacatcgattttttacgatctcagaagatatccactgagacgattgcaaaattccgtggactggaagcaccgatagtcatcgtcgtcggtgctgaggcgctggatacagctgagttgtttagtgcgtattcacgtgcgaccacgaaatttattgcgctatacaatgcccacaatcgtttttggaaaggccacttggactttcaatcacgcctacagaaaaaccccaatagcgctgcaattctgaggcaagaacaggtacctttgcgcatacagaatttgatcgccagcagcacgactagcaagtccttgggcttgaagagcttggatatcagatgggccgatgagtggaggtcttggcttgttgaaattcaatcacatgaaactccaacgcttctttggctggagtatctctgcgccagggtcgctcatccaatatttatatggtacggcgatactttgacaaagttttatcgcataaagcctgacttgagcgacgataatgaatcgtgcttccgcagcacgatgataatggaacattgtaaggcatgtgaccatcttaccccgcacaccgatgactcgaagagtgaatgcgccttgtgtgccactgcggatagcagatcactaactcctgatgaagacgttatagaggagatcaggctgtatgacgcagttatcacgtcgaaacttcccaaagctgacgcactgcaagtgcaggcccagcttccaattgaaatagccgcggtgggagcactgttacgagcaaacaagcataaagtgcgcagcaatgtgctacttgctccgctaccgtcaggacgccttttatatttggcagctttcgtatttgcccaatccaggatcgcaacctacccggcaaaggcgactatgccaattaatgaattagctgacgaaatttataatcgttttaaattactagagagaatttcctcaatagagtggcgtgcgatttttgccaatgcatttggtactttcaagcagaaaggttttgttgttagggttgggaaaggccagtatatccctgtagaggatagggatgctcctatacccaagcgtgcgtcgtatgtttga

SEQ ID NO: 346577 - DNA, 1728 bp, Pseudomonas aeruginosa
atgcagattaggcagctcaaagtctcgaacttccgagggatttctgcgctggactggacaccaggctcgcccttctgttgcctgatcggcgcgggcgactcgggcaagtcgacgctgctcgatgcagccgaagccgccctttcttcacggtggttctcgttcaccgagccggacttcctggattgtgacacctcgaaccccatcgtgatcgaggccacagtcggcgagctatccaaagccttgaaatctgatgagcgccttggcctctacatccgaggctggacgacagggggtgaactacgcgacgagccagagggcgatgatgagcctgtcttgaccgtccgcctcactgtcgacgccagcatggagccttcctgggaactggtgtgcgatcggatcgaagagccacgtacgctgtcgaaccgagaccgcgcgctatttggtctggtacggctcgcaggggaggacgctcgccacctcgcctggggccaaggttcggtgctcgctcgactgaccggcgacaacaaggaggctgcggcgcgattggccgaggcctaccgcgcggcgcgcgcgagtgccaatctgggcggcatcgaatctctggccgaagcggcggctttagccgaacgattcgcaaaaggacttggggcctatgtagagggcgcttatgagcctgggctggagttagggcgctccggcctgtcgtccggctcgattgcgctccatgacagcggtgttccgcttcggctcgctgggcttggcaccaagcgcctcgcgacgctcgcgattcagaagtccgcgatcgcagaaggcgcgatcgtgttgatcgacgaaatcgagcacggactcgagccgcaccgaatcatcggtgtgatcgcccagctcaaggcagaccaggccaaagcgttggaggctcgcaaacccaccggccagattctgatgacaacgcattcggatgtcgctttgggtgaagccggggctgagagcctacgggtggtccaaactgtccggccgggccgagcgacgaccgtctcctgcccgaggtcgcctgatccgatcaggccgctgatgcgcttcacgccccgcgcgatgttcgcccgccgaatcctcgtgtccgaaggcaataccgagctgggactactgctgggcctgcgcgagaactggccggcgcgccatgacagccgccccatcgagcaactgggagctgccatcgccgatggaaacggagagcaagcctgctccttagcgctggcattagccggactcggctacgagatagccgtctatcgtgactccgacacggtcctgacgccagccatagtcgccgcgttggcgctggcaaacgtccccgttttcgaatatggaggcggcctgaacaccgaacaggcgatcttctcggccgcaaacgatgaacttgtccaagcactgctcacctacgcgcgcgaggagcgtggagatgcagccgtagatgacaacatcaatatccgaattccggacttgggccttgccttgattcgcgacaacttcgcggactgggagatcttctccgcgctggacggcgcgcagctccgtgaggccatcgctgaggtcgcagcccggaaaaaatggttcaaggaccaacgcatcggccgaggcctcgcccccttggtctggcgtatcactacagaagacgccgcctctcctctggcgataactctgggccaagtcgaggcgtggctgtatgcctga

SEQ ID NO: 346578 - DNA, 1398 bp, Pseudomonas aeruginosa
atgcctgacgcagccgatctatttgcgcttggcaatgccgcggtcgtcgctccggccggccacggtaagacagagatcatcgcaaacgtggcagctatagggcgccgcgcattgatcctcacgcacacgcatgccggcgtgcatgcgattcgcgccaggttgaagcgcctgggaatacagcatgcccaggtggccgtagacaccatcgctgggtggtgcatgcgctacgcccacgcctttcccggtgtggcccagccacccgatggcttgccgcaaaccggagagcaatggaatcaactctaccgaggcgcgtcgtgggcccttggcgtacaagcagtccgtgaagtcatcgctgcctcctacgaccgcattctgatcgacgagtaccaggattgccacggcttacaacacaagctcgcgatcgcgctctcgggtattgtgcccaccttgatcttcggcgatccgatgcaaggcatctttgagttcgctggggctacgctgagctgggaccgcgagatccatccgggcttcccgctggccggaacacttgacacgccgcatcgctgggccggcaagaaccccgagcttgggcaatggatcgccgaaacgcgtgagaaactcatgcgaggtgaagccatcgacttagccgacccgcgcatcacctatcgcgaatccaacgacgtctttgacatgggaacgctgttcgaaggcatcgacgacaaggaaggcagtttcgccgccatccattgcaacaagaccatctgctacaggctggccaaagcggcgaatggcggataccaggccattgaggaagtggcagccaatcgcctacgggagttcgcgtcggcatgggatggggcggttgatagagggggcaggctgcaagcgttccttgacctaagcaatgactgcttccacaaaaggaaactagctgagggcgaacaacctgatccggatgacgtggcggtccagcaagccatgcgagatttggtcctcggtttagacgtaggtaacggtgcagaagcagccgcccagttattctccctagctcgcaagcgtcccctgtggaagctttatcgcaatgagctctggcgcgacgccgatcgagcggcgacagaggtaacggccggccgcgctgaaacaatgactgcggcaaccctcaacgtccgtcatcgcgtaagcaattctggccgaaagatgcctaaacgcaccgtttccaccccgctgctattgaaggggcttgagtttgatcacgtggtcattcccgacgctacacactttgccaacgagcgccacgctcaggcaaagctcttctatgtcgctatttccagagctacgcaaacactgacgatcgcgtcatcgcagcgcttcgtccaattcaacgcgccagaaatatga

SEQ ID NO: 346579 - DNA, 1008 bp, Pseudomonas aeruginosa
atgagcgaacagacgcccgaacaaccgagcaccgcgcccaacccggcgctccagcgccagcgcgccagccagctggcccaggccctgcgcagcgaactgcagaaagccctgatcggccagggcgcagtgatcgacgacgtgctcaccgcgttgctcgccggcggtcacgtgctggtggaaggcgtgccggggctcggcaagaccctgctggtacgcgccctggcgcgctgcttcgacggcggcttcgcgcgcatccagttcacccccgacctgatgcccagcgacgtcaccggccacgccgtatacgacctcgccagcgagcagttcaagctgcgcaaggggccggtgttcacccacctgctgctggcggacgagatcaaccgcgcgccggccaagacccaggccgccctcctggaagtgatgcaggagcgccaggtcaccctggaaggacgcgccctgccggtgccgcagccgttcatggtgctggcgacgcagaacccgatcgagcaggaaggcacctatccgctgccggaagccgaactcgaccgcttcatgctcaagctgcgcatcgattacccggccgaagccgaggaacagaccctggtgcgccaggtgacccgctccgcgcgcagcgacatgctcgacgtggccaacctgcggccgctgctgaaggacaaggacgttctcgccctgcagcggatcgccagcgacctgccgatcgacgaccaggtcctcgactatgccgtgcgcctggcccgcaccacccgcaactggccgggcctggccctcggcgccggacctcgcgcgtcgatcgccctggtccgttgcggccgggcgcgggcgctgctgcgcggcggcgagttcgtggtgccggacgacatcaagggctgtgccctggcggtcctgcgccatcgggtccggctgtctccggagctggacatcgaggggctgtcggtggaccaggtcctgcaacagttgctcgaccaggtaccggccccccgcgtatga

SEQ ID NO: 346580 - DNA, 696 bp, Pseudomonas aeruginosa
atgttatgcgacaccagtagtgtaaatattaaaccgcgtgtatcgctcacttatagttatgttaataccgccatggaacaattcatcaaagccaaactactgaaggccgatctgaaagagatagatcagcagctttcagaaagcggattcagaaacatgagcagcatgctgctgctaaaacaggcacttcttacagtatcgaatctcgttgatttcgaagcaaccattaggagtatctacaaagaagatcaacacctttctgaaaagttcaggctccatgaaagaaattacaagttcgcaaagtatatcagaaacaaattcatcggacacgtcaagcaagagctaattcagaaagccatagaatggaggcccgagctaagatatctgcttaaagactcagatgagggcaatacgatttttgcgttcaatttatttgtgctggagacagctataaatacatatgtcaatcctgatggcagccaccaactcttcgattcagaaacagacctcacctacccgctagacatgaatagatttctcacatacctttcagacacagtgagatcagcaataagttacctggatgatttaggaaaagccctcggtaaaaatgtcgaaatgcttgatccttccgaacaaaaaattgagtattggatggcagctggggaagccaaattcgagttcataaagaagtag

SEQ ID NO: 346581 - DNA, 1344 bp, Pseudomonas aeruginosa
atgggtcagaaaaagcttaaagtaatatctctattttctggaggtatggggcttgatttaggcttgaaagaaacaggtaggtacaagcttctagcctgcgtagagaaggtgcctgcatactgtgagactattcgcctgaatcgaagtgctgggcgccttccgaagagcttgaagatttatgaaggggatattagcaatattgatccatacgaagttatggccgctacaggtataaagcctggggatttagatgttctagttggtggacctccatgccaatcatttagtactgctggtaatagagggacggttcaagatccaaggggcacgctgctatggcaatttctaaaatttgtcgaggtgatgcaacctaagttcttcctcatggagaacgtccgagggctaatctctgccgcgcttcgacaccggccaattgctgaacgcccacctaaaggtccagagctttcacaggaagagttgcctggctctgtaataaagctgttttccgaggatcttcagcggttaaaggatgttaagtaccacctagatatatttgaggtgaactcagttaattatggggcgcctcaaatacgggagcgagtgctgttcatagggaaccggtttggggctcaaattgcttttcctgacccaactcacggtccatctgatgaaatttctgagacggatgatcttttctccatcaatagtaggctaaagggttggagaacgctcggcgatgtcattctagatcttcgtgaggaagatcctgaaataatggactttagtccaaggaaaaagagtttccttgagttggttcctgcaggagcaaactggcggagcctccctgaggataaacaaaaagaatctatgggaaaggcttggtacgcgaaaggtggacgctctggatggtggcgcaggttaactatggaactgccgtgccctacattagtcaccatgccaaatcacgctagtacgtcattatgtcatcctacttatactcgtgcgctttccgtcagagagtatgctcggatacaagaatttcccgatgaatgggagttttttggaaagacagttgataaatatgcacagattggtaatgcagtgcctgtaaggcttggaaaagtagctggccaggttatcgccaagtgctttgatgaacttgaagcaaatgattgggctcccgctgaaagagcccctgataattatagaattgtttatgttcaatcccatataagaactcggcgatggtttaaaaatggaaaaaccatcgtatggggtgaggaagataataactctggctatggaaaggcaaaaactaagaggctcattaagtccttggtttga

SEQ ID NO: 346582 - DNA, 975 bp, Pseudomonas aeruginosa
atggctaggcggcacccaggtttaccagtagcggaaagtgttattttttcaaaggcagatcttttacagcagctccaggctgtggacttagaccatgattcacgggcacgaactttgcgaatggaggagtactttcgtcagagaatagatttgcacgtagggtctttagtaagcaacgatgcttgctttgaaaaattttatacaagcccatttgttttgctgatgcatgcaaggaaaaataattatacccgcgttagtgaaattgagcatgacattcttcctgcaaaactcttttcgtccatggagacctcagcaggtagagctgttgaactggttgctcttcctgtttatgactggcatcccgttcttagtgagatgcactctgcaaactcggccctagatgggctgaaattagtagataacaccctgaaggttgctacattaaaaagtggtcctcgctgtctgaatgacgaaatgagcgaaaactttgctgatgctattattgcgaacctagaagcgtgggcgtctagccatagggtaaggcgggtggagtttacttatggggttctttatggaacccagaggaagtctaataagaaagactggcacatcttcaagaaccttgagcttaagcttggttctagtaggttttctatttctcctcagagacgttgggactgttctttttcctataaagatattgaggttcaagccgggatacgtataggaaaagactggtggcgttacttaggaggagatttaggtctcgtagagttggccgtggccattataagagcatgcatccctccagggaatgcagaccctgcaaatcaacattataccattcaggatttacatagcattgtgactttagagaatgtcccggaaggatttaatcctgctattttgcagcgaagccaaatttcctggtactttttctttatgcgtcatttctgcgactcaatggtggagtaa

SEQ ID NO: 346583 - DNA, 810 bp, Pseudomonas aeruginosa
atgcgtaaggccatgctcggattgttcctggtcgttcccctggcctgggctggcgccgcgttttcggccgaggcgccgacggcacgccagcagggtatcggcggaaccgtgaaggttcaggcgaactcggtgatgcgcctgcccaagcgggcccaggagctgcgcctgcgcagagtggagatcggcgaggatgccgccctgctgattccgctggaggtcagcgtcctgcgcatcgaggaactgcacatggcgaagaacgcccggatcggcgtggcgccgggcgaggagcgaatcagcatcgaagtcgtcagcggccacctggccgatggcagcatcatttccgcgcccggcgcgaccggcaccttccggcaaagcgccggtaacggccgcgacctgaccttgcgcctgcaggcggtggaggtggaaagcctgctgctggacgcccgcggtggcgtcggcgcgccaggctacgatggcctggacggggcttccggcaaggcctccggctgcctctggggcagcgcgctgaaaggtggcgacggccaatccggaagcgacggcggtccgggcggggcgggcggtcggattcgtctggaagtgccgggcgattttcctctggagcgcttgcaaacccgtctgcaaggcggcgtcggcggcgctggaggcaaggccggcaaaccgggtgcggcggataacgccaccggttgctggatctactcggtggatgccggtcgtgcggggcgcagcggagaggacggcgcgaacggcaccaacggcagcgacggcagcctggacgtcgtgcgcttctga

SEQ ID NO: 346584 - DNA, 1287 bp, Pseudomonas aeruginosa; identical to SEQ ID NO: 337962

SEQ ID NO: 346585 - DNA, 1770 bp, Pseudomonas aeruginosa
atggagtctttcgagacgctcgacagtgaatacaaagcctcgcaggggtgcagaggcgttgggcgccttctatggttaaaggcctttgaaggcgttaatgtgagtagcacatacaaagatgggggcgatgtttggaaggctcgcacctttacttttactgcttcacgtggggttgctgatatgagtctcagtaccccaacacttcacaagccaaaaacctgcgttcacctctcaggattccggagttcttaccgagagcgcgccccgaaaaacgccagaactattgctaatagtttatttgagcactgtctttggtattttgttcgtgacggcggcgcgccaagaattaccattgtggatgatggtgaaagactgggtcttgatactgtgtttgataagtatatgcactcttcatcccagagggatcaaattgagatcaaggggaagagttttgaggttactcatctaaagctcaaggcaagtagttcaaaatctccatttattgcttggtgtgcggcaagtcgagttgtagagcaggagtccatcgctggaaagatcagcggcttgcacggcaaaatcacggactcagatggtgacttcgtttacgcctgctatgtaacatcctcatttctcgatgagaatgttcggccagaacgtattggcttcgatatcgaagagatggctggcgaactgttcgcctctatatctgtgagtcttagcgacatacgtagcgctgttttggcttcatcaggctcctatctcgaaaaatatcttgaggaaaacaagagggccggaaaggaccgtgtggagaagtttgttgcgcaacgagcacctcgctacaggcctatcctgaggcacattgatgagtccaggctcacgattgatccagctatctctgataaagaactggacctgcttcttcatcggcagctcgcggagattgagagcagtatgctttccgaaggacatgatgtaatggcctttgacagcaatcagtctccgaaggactatcaggcccgtttgagtagctatcttgagaaggcagatgacatcaaaaagtctgacttggcaagttacgtgttccatcggaaagtcatactcgatatcttggggaaagcgatagagcgaggcgatgatggcaagtacgcgcgagaagatttaatacacgagcttattgcgccaatgagaaaaacctcagatgagatttctttcgatagtctaaatctttggctcattgatgaaagattggcttttcacgattttttggcttcggataagcctatctcatcgttcccgataacaggttgtggcgagcacaaagaacccgacatctgtatccttaatgttttcgacgagccgcttctggtttccgaaagtacgcgtagcgctcctgccaatctgacgatagtcgaaatcaagcgtccgatgcggaatgatgctgctcagggggaggaaaaggaccctatagagcagtcccttggctaccttcagagaatcagagatgggaaggttttgaccgcgaaaggtcgcccgattcccaactcagacagaattcctgggttctgctatgttctctgtgacttgactccttcgattgagatgcggtgcaggatacatggtctaacgcgagcggtagatgggcttggttacttcggatacaatacaaattttaacgcgtatatagaggtaatctcttttgatggagttgtgagctcggcaagggaaagaaatcgggcattctttgacaagcttggccttccaactaattaa

SEQ ID NO: 346586 - DNA, 1905 bp, Pseudomonas aeruginosa
atgaccctatcgcgactcagccttgccatcctttccgtcctcgccggtgccccggcattcgccgacgacagcggcgtcgacctcgaccagggctggaaccagacccagaagaccgcctggctggaagccggccagggctcgcggatgctgccgctggcctggctggtggcgctggagcagcgcgccagcgaagaaccgctgatgtccgatgcgctgatccgccagtacggctatgtcccgcacaccctcggcggttccagcgtgaaggtggtgcagggctacgcggtcgaccgcagcgacgacagcgacctgaccttcaccaagctgcgctggaaagccctgcagggctccagggaaccctgggtcggaccgacctgcagcatgtgccacacttcgcacatcagctaccagggcacccagctgaccgtctacggcgggcagaccatgggcgacctcgccggcttccagctggagatcctcggcgccctgcagagcacccgcgccgacaccgccaagttcgagcgcttcgcccgcaaggtgctcggcgccgacggcctggtcagcggctacaacgacgccaacaaggcgcgcctgcaggcagccctggacgccaccatcgtgcgcctgcgcgacggctcgcacttcaacctgccgcacgatcccgagttcggcccgggccgcctggacgccatcggttcgatcttcaactcggtgggctacgaactgcacgccgacgagcagatctacggcgccgaggacgcccccgtgagctatccgttcctgtggaacgtaccgcagctggaccgcgtgcagtggaccggcttcaacccgaaccacatcaacgtggtcgacatcgacaaccgcaagttcgacgtcggcgccctggcgcgcaacgccggcgaggcggtcggggtattcgccgacgtcaaggtgctcagcccgatccagtcggcgctgcacatcggctacccgtcgagcatcaacgtcgacaacctgatccgcatcgaagaccagctcggccaactgaagccgccggcctggccgaaccagctgttcggcgccccggagccgaccagggtcgccgagggccgcgagctgtaccggcaacattgctccagttgccacacgccgctggaccgcaacgacctgcggaccccggtgaagaccgtgctcacccacctgcaggcgcgcggcgaggtcgcgccgatcggcaccgacccgtggaccgcctgcaacagcatcgcccaactgaagaccggctacgtgcgcggcaagccctacctgtccttcgtcggcaccggccagcgcggtttctacggcaagcaggcctatgcggtggacgtgctccaggaagtggtggtccaggccctggccgcgcgcggcctgagcgtcgccctgggtgccttccagaccgccgccctgggcatcttcgacgggcagttgccgccgctgatcagtccggtgccggacagccccgacgccgacagcgccgaagcgaccgccgcggacgcgccaggcgccctgctcctggccgaaaacgtcgcggccgacagcgacaaggcccggcgcctggagcagtgcctggcgatgaccagcgacctgatggcctacaaggcgcgcccgctgaacggtatctgggccagcccgccctacctgcacaacggctcggtggcgaccctctacgacctgctgctgccgccggacctgcggccgcggaccttctataccggcagcgtcgagttcgacccggtcaacgtcggctacatcaccgatgccggcggcgccaaccgcttcctcttcgacagcggcaagccgggcaacgccaatggcggccacgactacggcaacgcgcagttcaacgagcagcagcgccgcgccctggtcgagtacatgaagaccctctga

SEQ ID NO: 346587 - DNA, 561 bp, Pseudomonas aeruginosa; identical to SEQ ID NO: 334497

SEQ ID NO: 346588 - DNA, 1167 bp, Pseudomonas aeruginosa
atggactacacattttattacgatgagtccaacaacatccgttctttgtacttggcgaacggccggttcaataccgactcacatcaaaatccatccccttgttttgtgctggctggtattgctcacaaaggtgaccaggccaaaagcaactgcgaagagcttatcacttcgctctgcttgcctcccactgcaaaggaactcaagttcaaacaagttgcaaagggaggctttcttgacaatctgaagtctgcgaaagtcacccagattctcaaatggctcgtcgattcagactactatctacactatatgaatctaaacatggagtactggtcactagtcgatattatcgatgattgctgcgatcatactgatcgtcatggcatgttgaattacgccccggcgggggggcggcgtgcctatgtggactaccaaaaagacgcgctgtactaccttatgcgcaaatacaagtcggattttttggcaactctttccaaatatcgttacccaaacgtcacgcaaaaaaatgccgcgtcattcatcaaacgactgaacgaaatcgtcaagaaaaaccggcaggtctctgctcgcgttggtggcaaggtgagcaaggaagacctgttgcgcaccatcagcctgtctaagcttttcgatatgtgcagaaacatcgagtccctcgacatggtgtataccaccgagccgtacaagctcatcgacggtctatcggtgttctatcgtcacagcatcggcctcttcgcctcctcacgccatattttcgacaacgaatatgaaatagaaaaaagcttcaaggagatcgagtctcgagatggcctactgggctcaagcaatttcaagtttgtagattctaagcaatacccggcagtccaggtttccgatgtgatcagtggcctgctcaaaaactacttcaccttcctcgcgcaaacgaacgttgccgacttggtcgacgccaaaggttcgttgactgataaacagctagagtgcctcacgcttctgcaaaagctcgttgaaaaatccgatgacgagcaacctgagttcctctactacgtaatgtcccagattgagcatcacaagcacggggttttcctattcgacaaggacggcaaggacgaatttgtgcgtgtggttggcagcgatgaacgcaacgcctga

SEQ ID NO: 346589 - DNA, 234 bp, Pseudomonas aeruginosa
atgatcaagcgcactctctaccacttccacttctgttgcggcctgggcggcggtgccgccggtttcaaccgggcgcgcccgctgctcagcaatacgccgatctgggggcgcccggttgcggtggcactggccgccatcgcactcgttgctgcactgcttggcctggccactgttgccgcgggcgccgcactccaaccgtttaaaacgctgttcatctgggaggtatgccggtga

SEQ ID NO: 346590 - DNA, 726 bp, Pseudomonas aeruginosa
atgattcactaccacggcacccccatcggtggcactcgccaggacgccgcgcgtttcctcgctgggcggcatgcgttggtcccgtttccgcgccaagacgacgtctcaatagtcgccgaggtctgccagagcttctgcttcgacaacggcgcgttctcggtctggaaaaggggcggaacgctcgacatcgagggctacctccggtgggtcgacgactggcgtcgacacccaggattcgactgggcgctgatccctgacgtgattgacggagacgaagccgacaacgaccggttgctcgagcagtggcctggccaactgccgggcgtcccggtctggcatctgcacgaatccctggagcgcctgcagcgcctggcccgcgtgtggcggacggtcgccctcggcagttccggccaatgggctacgcccggcacggcgccctggtggaagcgcatcagcgcagccatgaactccatctgcgatgcccacgggcggccgacctgcaggctccacggcctgcggatgctcgacccgaagattttcggccgcctgccgttcgcgagcgcggacagcacgaacgctgcagtcaacggcggcagtgtcagcaggttcggcatctatcccccgccgactgctggccaacgcgccgtagtaattgccgaccgcatcgaaacccacaactcagcaccggtctggacgcacagcggccaggccgaactctcgctttga

SEQ ID NO: 346591 - DNA, 246 bp, Pseudomonas aeruginosa
atgaatacctaccgccacaccttcgtcgctgagtgcccagcggacggtgagcagatcatttacaggctggagatccgctcgcacacgatgatccgcgtcgagcaggtccttaccgcaaccgcgctgatcaaacgcggcttccaagaagagatcgcggatcgactacatgcccaactcggtggtgagcagcgcatcgtcggtgttcaccagggcgtcgaggtcgaaaccgtgaggttgccgacgtga

SEQ ID NO: 346592 - DNA, 1002 bp, Pseudomonas aeruginosa
atgagcgcccgcatgccggagcacaacctcaccagcctgtccggaggaaaggacagcctggcaaccgccttgctcatgaaagaacgagaagtcgataacggcatgctggtgttcgcagacaccggcaacgagcacgacctcacctatgaatatctcgattatctggagcaggtcctgcccttcccgctccggcgagttcgcgctgactttaccgaagcgatcgccgctcgccgccagatgatgctgaacgtgatagctggcacccacaaggagagggccaacgcggcatatcactggacgccagagactgcggaacgggccctgtccgtattgcaccccaccggcatcccctttctcgacatgtgccttgtccatggccggttcccctcaaccaaagtcaagttctgcaccatcgaactcaagattcagccaatggagcaacaggtgcaaaacccgctgctggccgaaggccacgacattgtttcgtggcaaggagttagggctgacgagtctccggcgcgcgcgaatctggtggaacaggaatggatgctcacccatccggacagtggcgccgagctgtggcactaccgccccatccacaaatggaccgcagagcaagtgttcgccattgcaaagcgccatgggatcaagccaaaccccctctacctcatgggcatgggacgagtcgggtgcatgccgtgcatcaacgccggtaaggacgaaatcctagagatcagccgacgctttccgcaggtgatcgaccagaaggaagcatgggaggccaacgtttcaatggccagcaaaacctgtgcagccacgtttttcccagcacgcgaccttggcgcagggaatgcctctgcgattgatccagcaaagcacggcattcgcggtcggatcgagtggtcgatgacctcccgcggcgggcggcagtacgacatcacccgcgtggtgcctacggagccggccaccgcctgttcatccgtttacggcctctgcgaatag

SEQ ID NO: 346593 - DNA, 243 bp, Pseudomonas aeruginosa
atgatccccgacttcttccccggggacaaagtcgtggttgacccagatcaggagtggaatcacaacgacttcgttctcgccaagcgaaccatcgatcaacacgtaaccttgaaacgcctccaaattgagggcaacgaagcgtacctgctcgcaaccaaccccgcctggcccgaccgaatcatgcgcatggacgaggagtggacaatctgcggaaggatacgaaggaaaatcgtcgacttctga

SEQ ID NO: 346594 - DNA, 2460 bp, Pseudomonas aeruginosa
atgaggattatggaagagtttggtgtcggcgagcaagaggcggaagctgtagttaaagctgttgcgggtcgggcttttagtttgttgctaggggcaggggctagttatggttctgaaggtggagataaagaaattctccggggtggggaggctctagctaaagaaattaatgagcgcttttccttggggttggttgatagtgatgcgaggaatttgccacttgtttatgatgatgcttgttctcttaataggggtgggttgaatagttttctaattaataggtttacgaggtgcaagcctacttggcaagggaggctttttgattttgaatggaaaagaatatggactctaaatattgatgatgttcttgaattggcggcaagtagaaagggggttcggatatataagtatgtgtgggatgaggagttttcccctagacggcttgatgctagtgagcttcagatagtttttcttcatggttatgcaggttatttaaataataagcctgatcatcttattttttcattaaaagagtatgctgggcgggctgagtttagcccaggctggcatgcgcagtttcgatctgagttttgtcagaagccatttattatttgtggggcaagacttcaggatgaatatgatttagctactgttcttgattttggtaatcgttcaagagataggggaggtgctccttcaataatagtcttgcgagaatttagtccggggcaggctgagaggtttacacgacgtggtttgatagctattgaggccgaaggtcagaaattctttgaggctctgtatgatgatgttaaggcctggaaagattcaaatttgcaaattgataagagtattcagaattctatagttgaggttctttcctcttttaggcttcttaaggttgactctgtagagtcgagcggtaggcggcgattggactattatgcttcggtcgaggcgcaatggtctcatatcgtggagggaatggatgctcttacaaaaagtgcaagtgacataattgcgtgggctggccgtgatgacattaagtccgttaactttttattgataagtggcggccccgtttccgggaaaaccactgctgcgtatcgtgctgcttatgagttgtctatgagggggattgatgtcctgctgtttaggggggaacagtattttgatgagtctaagctgatagaatatttaaagtataagcccaatactatccttctatttgacgactgtgcggatcattcgggagggttcagaacgatttgtgagatgctagagggacaatcgctttataaagtgagagttgttgcaacgtgtgaatcaaaccgccgtcgcgcagttttggctgatatgcttaaaggggaagtcaaagagctaagtttagatcctctttcgaaaactgatttcagagctatatacaaaaagcggagtgagaaggggcgtttgggtagatgtagtggctttcccgtaaatgatgcctataaagagtttagatcatcatatgggtctaagttgctagagtggctagaaagcttggagaattcgcttcaatatcgggaggccattgaaagtgcgttcaagggttcgtctaatgggaaccacatggttaggaatattttgtgtttagtctcggcggttcatcgttttggatattctttgccgttctttattgttgatccatatttgaagaatggcttccttgaagggttgctgtcagaagacgggccattgagcttagttgctcacacagatggaaatggtcttcgtttgcgcagtaaggtattttctgagtacgtttggaataggttaagtgaagacgaacgttatagatggctgctggctctagctaatgaattggcaccattggttgtgcctgcaactattagcaagagaacacttccctatttgatcttgaaaaacattatgcattgggagtctttgaaaagagatctgggtgcaaagagagccgacggatggtatagccagatcgaaaagactttttcttggaatgctcggttttgggagcagcgtgctttactggctagtgatatggatcttgagtcaaaagcatactcttatgctaagcaagcgatatcgttgcacggtagtgatgcctttccccatactaccttagggaagatctgtttaaaaattggggttactagaaaagactctgtaggggttgagcggttttgggaaggagttgagtcgctattgcgttcaagagaaattgcattgagttctggaattgagtgggagcatccttatgtcacattctttacatacgctctccgtgcgaagagtttagatagtttcgatggtgaggactaccggcttaatcaaacgtggtcagagtggatgcgggcagcggtaaaaagtagtgttttcaagtttgagccagatgagctgaaacgctatcaaagaagctggttgctttcgtctttgaggggctga

SEQ ID NO: 346595 - DNA, 771 bp, Pseudomonas aeruginosa
atgctttgctggctgctgagcaggccgccgttgccattgaacagttcggcgccattcaggcgcagcccatcacgactggcgagtaccccgccgtcctggttgagtacccgtggcgcggcgaggcgaagtccgctatcgccgatggccttgccgcctcggttgtccaactgctcggcgacgtccagtgtcacctggcccgggctggcgatttcgcccgcacggttgtcgatcctccgggcggaaacggtcaggttgccatcagcactgaccagaccgccgctgcggttgtcgaggctatcggcctcgagcatcagcgcaccctcgctgctcaattcgccacccgcctggttaaaggctgtcacgctggcgtgcaggtcacccctggccgcgatccgtcccctgacactgttcgctcgctcggcagtcagtttcagacgaccttcgctaagcaggtcgccgtcatcgttttccaaacgggacacgtcgatatcgacggcgcccttgctgccgatggagccactgcggttgtccagggcaagcgcccggatatccaggcctccggtgccggagagaacaccttcgaggctgttgtccagagcctgggcgatgcgcaacgtcagtacaccgccgctgcgcaggcggccaccctggttggtcagcgcggaggtggtgagtgtgaaggctcggtcgctggaaatttccccgccgctgttgtccaccatgccgagttggcgcaggagcaaggttccaggcgtggcgatcaggccctga

SEQ ID NO: 346596 - DNA, 174 bp, Pseudomonas aeruginosa; identical to SEQ ID NO: 330002

SEQ ID NO: 346597 - DNA, 633 bp, Pseudomonas aeruginosa
atggatgcgaaaaatcttgcagttctgatgcaactgaagagggcgatggagcaagtcagtgcgaccacagaggctgctcctgcggcgcatgttccagggcagggatttagcgaggagtcagaagcgttctttagggacttggcccggaggaaactgggaatagacccgtcgccccctgagaacgtaatcgccgatccggtaatggctgagttgttgaaagaactgcgcctcgcgctacgaactccctcccctaggaagcctgtgaggatgaagcgtgtagctgccccgtaccgagagctagagctaacgcccgagcagttgcaaaagcgagccgccaaggcggctcgtaaggctgagcgtcttgccaaacgaaaagcggagcgagcaactgcagcacggcgagccatgtcaatcgacaaggttcaaagaaaacttcttccagatatcaagtgcccagattgcggatcagtaattcctcgcgtagagggccaggtaacgctgccaggtctatgcaggcgttgtcgtgagaagtttgctgatgctgagaatggctttcggtctaagtcgcgcaccgaatacgttgagatctcattagttcctggcggtgcacctggttcagggaaaagaaaatga

SEQ ID NO: 346598 - DNA, 390 bp, Pseudomonas aeruginosa
atgcgcaaacctgctttcggcgtatcggcgctgctgatcgccctgaccctcggtgcctgctccatggcgccgacctacgaacgtcccgccgcgccggtggccgacagctggagcggcgccgccgcccagcgccagggcgcggcgatcgacacgctggattggaagagtttcatcgtcgatgccgaactacgccgcctggtgggcgtggccctggataacaaccgctcgctgcgtcagaccctcctggatatcgaggcggcccgcgcgcagtaccgaatccagcgcgccgaccgggttccgggcctgaatgccgctgccaccggcaaccgccagcggcagccggccgacctgtccgccggcaatcgctcggaagtggccagcagctactag

SEQ ID NO: 346599 - DNA, 621 bp, Pseudomonas aeruginosa
atgccgcgcatcgacctaacggtacccttcgcagagaagaatgaggctaagcgacttggcgcacggtgggacgctgagcgcaaactctggtatgtgccagacggtttggatgcaggcgtgttcaagcgttggttgccgagcgaaccggacatcagcgtgcgctctagcagctatttcatcgcccagaccaccaagccgtgctggaagtgcaacgaacacacaagcgtgttcggcttcatcctgcctgccgggcatgaaacgctggaacccgacgaagaggattatgagcgagatgcgtggtatcggcatgacgagccaaccattgttcactacgtcaccgatcttctccccgccgtcgcgacacgcatcaaagcattctcgcggcactaccgcgtcgatttcagcaagaccacgcaaagctcgtactggatgaatcactgcgaacactgcggcatgaagcaaggggacttcgagatgtactgcgagccgcagggggcgttctttccgatggatgagcgtgccgcttccctgatcgtcctgcacgaatttgccgaaccgtttggctgcaatggcagcacggcttatggcgatcacctctttgaatacatgcggcgggcctaa

SEQ ID NO: 346600 - DNA, 438 bp, Pseudomonas aeruginosa
atgaacattaatacaacagaagcaatgactgcattgcagcgcaaagtgcgcatgaccattccgcagattggcgaacaggcagcacaggcatacgagagcatgcgggcagaggctcaagcgcgtcagcttgtcgtaaatgggccgtcgatttttgttgcacgttcaatgccccaggacgctcatacagaatttgaactgaccttttgtttacctgtgaaaggcaatgatttgccgatactgccggctttttgctgcgcgtgcttcatgttcgaaggtcctctggatagattgtttacccacgggtaccagacgttgcttcgcagcattgaggatgcgggcctcacgccaagcaatgaaagtcgcgaggtttatcatgaatggtacggacctgaatccgacaagaatcgcattgaaatccagattggtgtgattgaatga

SEQ ID NO: 346601 - DNA, 738 bp, Pseudomonas aeruginosa
atgccaacccttgccaacgaacaattgccaggctttgccgccgccttgatacgactgcgcggggaaacgctggggcggatcgctgaaaccaccggtatccgcactgccaacctctcggtctggctacgtggcaaggagcaggtgatctccgccaaacgactagtcggcctgttgcaccacctcggtgtggaaggcgggcgcctgcgtaccgacgtgttgcaccagtggcaggatcgcggggcactggatgacagcaggctcgtgctaagcctgctgcaagccaacaaccagcccgtgtggttgtttcaggatgagcagccggggcttatcaagacgcgctttctgttggcaggcgatgtgctgatccgcatggaggtcgagccgggcgtcgatcaggccctggatttggcaacagtcgtcagggtcgatcatgtcatcaccacgcctgcggcattggccggggtgccaatcgactcgctggcatcagcacgcagcagcctcttggcgctggcggagcagaccgcatcggacgtgggtgacgaagaactgctggaagggctgatttatcgcctagccgaaacagtgggcagtaatgtctcttcagtgcagggctggcaacaactggagcaagcgctgcgctttgcattcaacgcaggagcccagcctgctgacatcgcccgcgtggttgacgcccatttccgcagcggcgtcaatgcggacatgccgccaactgagtag

SEQ ID NO: 346602 - DNA, 195 bp, Pseudomonas aeruginosa
atggagcgcttgctcgagagcatctatatcaatgcccggccggcgatggagttcaagctcagcctcaccagctccggccgcaagaagattgtaaagatcgtggacggggatgaggttgagatgctgccaggtgacgtgcagagcattctggggtcatgccgagataaggggaaaattcattcatttggaatgtaa

SEQ ID NO: 346603 - DNA, 846 bp, Pseudomonas aeruginosa
atgagtcttaccatggggccgaacaccggcctactgatcaacggcgcacccggtgaggggcactacaacgaactgatccgcatgttgcgctgggatgacttcctgcgccaaccggtcgtcaaggggcgcgtcgccacgctgcccacaaccggccaggccgagggggacacgtacattttcaccggctcgggtgccagccagaaccgccttgccagatggtgggcgacgggcgccaccacggcaatttgggagtacatgccgccacggctgggctggcgtgtccaggtcgcaaacgagacaacgccgagtggccaggtcaagacctacgagtattccggcacggcgtgggtcgagctggtgggcggtatgtcggacgcgccgagcgacgggaagcgctacgccaggctgaacaacgcgtgggcaggcttgggggctgctgccgtcgccgatattctcgggacggtctctcaggccggcggtgtgccaactggtgcaatctacgagggcggcagtaacgcgaacgggagttacgtcagactcgcagacggaacgcaaatttgctccagcagccttttaacgtttactgcggaagcgagttctgttggtgccaggtggacgttcccggccaactttgtgtcgccgtcaatgatgtttggctcagttgtcgcatcgggggccggagcggattacgaccctggcatcgctgccaggaaccaggggactgtctatttcaattcctcaaccaactatgcaaacctggggtttctttgcatctcgtctgcatcgttcacccctggcgcccaaactcgaaacaaccgtgctatcgccattgggaggtggttctga

SEQ ID NO: 346604 - DNA, 234 bp, Pseudomonas aeruginosa; identical to SEQ ID NO: 334916

SEQ ID NO: 346605 - DNA, 318 bp, Pseudomonas aeruginosa
atgaacgaatctgtaaaacgcctacccaatattgctcccgccgccaacttcaccgccttgggtgatgacagtcagcattctcacaccgaggataacgctgtcctgttcattcgtgaggacctgcctgctgatgtgctttttgatgcggcagagcggcgccaatgggcagtgcgtagcatgctcaaggcgttggcatggaacgtaatgtccgacggtgtggatggtgagcacctgacggggctggcgcaggcggcaatgcttctcgtgagtgacgccgaaagtctttaccttgctgctcgtcgctcggcgagtaagtaa

SEQ ID NO: 346606 - DNA, 1563 bp, Pseudomonas aeruginosa
atgaacgccgtaacccaaaccgaagcccgcgccatcgaaaacgccgcaccgctggaaatggccgacccttccaagaacctgatcttggttgccctttcgcagttgctgccgcgccgctccaagcgcaacgcccgcaagatgccgcgcctgtccatccccgaactggccgcgagcatcgcccgcatcggcctgctgcaaaacctgatcgtgatcgcatccgccgatggcgagcattacgaggtggtggccggtgatcgccgcttgaccgccttgaagctgctggcgaagaagcgccgcatccccgccgactacgaggtaccttgcctgcttgtggccgatggcagtgcccgcaccgtcagcctcgccgaaaacctgatgcgcgagcagatgcaccccgccgaccagttcgaggcgttcgccgcgctggtcaaggaaggccggcccgtcgaggacattgccgccgacttcggcgtgtccccgctggtggtgcagcgccgcttgaagctggcccacatcgcgccgcgcctgatggccgactaccgcgccggagccgtcacgctggaacagttgatggccctgaccatcaccgacgaccacgccgcacaggaagccgcgttctatggtgcgccggaatggcagcgcagcccgtccgcgctgcgcgcacgcctgaccgagcgggaaatcgacgccacgcacgcgctggtgcgcttcgtcgggctggacacctaccggcaggcaggcggtggcatccgccgcgacctgttcgccgaaggcgatgccggaacctacctcaccgacgccggggtgctggaaactctggtgcgcgagaagctggcaacgctggccgaggacgtgcgcgccgagggttgggcatgggtggaggccgtgccgcatctggcctacgaggaacggcaggcgttccagaacgcaccgcgccaccgccgcgagccgaccgcccgcgaggcccgccgcatcgcctcgctggaaaaccgccttgaaaagatcgacgcagaactggaagaagcctgcgacgccgaggacgaggccaaggccgagaagctggaacagcggcgcgatcaggtgatcggggaactgcaagacgcggaggacgccttacaaggctatgcgcccgaggtgcgcgaggtggccggtgccatcgtcaccatcgaccgcaacggcgaggccgtcatccatcgcggcctgctgcgcgaggccgaggccaaggcgctgcgcacgctggaaaagctgcggcgcggtttcggcaacgccgaaggcgaagccgacaacgacgaaggccacgacgccgacgacgcgcccaaggccgcgatggatgacggcctcgccgttggcgctgcaaatcgaagtggcacggcatccgcaagtggcgctggccgcactggtgcatggcatggtgcagaaggtcttgcaggacagctactacggcaacgaccaaccgctgggcgtgcgcgtgacgctgcaagaccggctggaaggaatggccccggactggccggaatcgcccgccgccgtggcgctgcgcgaactgcaacaggtggccggtga

SEQ ID NO: 346607 - DNA, 813 bp, Pseudomonas aeruginosa
atgaacgccagggccgcccagggcgtggacttcaagggctggaaggtgatcatcggcgggagcgcgctgaaccgctcgctctacgaggcggccaaggcgcgcggcatccagctgaccgccgcctacggcatgtcggagacctgtccgctgatttcctgcgcctacctcaacgacgaactgctggccggaagcgaggacgagcgcaccacctaccggatcaaggccggcgtgccggtgccgctggtggatgcggcgatcatggacgaacagggccgcttcctcccggccgacggcgagtcccagggcgagctggtgttgcgctcgccatggctgacccaggggtatttccgcgaacccgagcgcggcgaggagttgtggcgcggcggctggatgcacaccggcgacgtggcgaccctggacggcatgggcttcatcgagatccgcgaccgcatcaaggacgtgatcaagaccggcggcgagtggctgtcctccctggagctggaagacctgatcagccgccatccggcggtacgcgaagtggcggtggtcggggtgcccgatccgcaatggggcgagcgcccgttcgccctgctggtggtgcgcgagggccagcaactggacgcccggggcctgaaggagcacctcaagcctttcgtcgagcagggcaacatcaacaagtgggcgatcccctcgcagatcgcggttgttaccgatattcccaagaccagcgtcggcaagctggacaagaagcgcatccgtatcgagatcgcccagtggcaggaagctggcagcgccttcctgtcgaccgtctga

SEQ ID NO: 346608 - DNA, 3306 bp, Pseudomonas aeruginosa; identical to SEQ ID NO: 326037

SEQ ID NO: 346609 - DNA, 576 bp, Pseudomonas aeruginosa
atgctcaagtacgggctgctggaagaaagccacaaacccaacctatatcgctcagcgctcaccaatatcgaggtggtggacagaatcctggagccgctcgaccttgccatgggggtcgacgaggttcgggggctggtgtttgttaccgttcgccagggcgaggtggctgagcaggatgactggtcgcaccccctcgtgcgtcggcaaagactgaatctggagcagtccctgctgatagccattctgcgacagcatttcatcgcgtacgaacaggaaagcggtacgggcgctagtcaggcgctggtggcggttgatgagctgattccccaattgcaggtttacctgggcgaactgggcagtgaggcgaaggagcgcaatcgcatcatcacgctgctggatcagctcaaggggcatggtttggtgtcggctctggacgcacatgatcgtgtcatcatccgtcccatcattacccacttggctaacccggagaacctgcaggcactcgtagtatggctgcgagagcaggtggagggtgcggttacgccggctgccggtggtgaggaggacgaggcgtga

SEQ ID NO: 346610 - DNA, 204 bp, Pseudomonas aeruginosa
atgctggaccagctcgccgagctaaatggcatgagcatcagccaaactgtcgaaaaactgatcagacgcgagggcaaccggcgcttaaagacaggcgagctgaccagggatgtgaccaacctcactacaagccaaatcgtagaacaagtttccaaaaactttcgcaagatcttcgatacccctcaaaacagcaaagctcgctaa

SEQ ID NO: 346611 - DNA, 726 bp, Pseudomonas aeruginosa
atgctcaacgatgccgataccatccagcgctacccacgccgtcatcccgccaataccaatctccatctgtactacgaagacacctttgaaggcttcccgttgatgcgtggcaaagggcctttcatccgtgagtacctgtccgaactcaggcacaccatcgaactggccttggctgagtatccgagggtgctggcgttcagggtggatctcaggctaccccgaggtatcgagctgccagactgcgcctatacgaaccaggtcatcagccggtttttcgagtccttcacgaggaagatccagtaccaccaggggagggtgggtgagcgtggttacgctcgtggctgcaaggtgcggtacgtctggtcgagggagaccggtcaggaaggcaagcagcattaccacctgctgatcctgttgaaccgggatgcttactacacggtaggtcggttgggggcggagagggtgaacatgattgatcgtttgcaggaggcttgggccagtgcgttggggttatcggtctggctggtcgaagggctagtgcatattcccgataaagcgacgtatcgggtggatcgaaagccccgtgagcgaaaggtcgcaggaagtgagcgcaaggttcttgtgaatgaactgccagcgctgttctaccgagccagctatctgtgcaaggtggcgacgaagtcttacggggatcgtcaacgaggattcggcaccagtcgagggtag

SEQ ID NO: 346612 - DNA, 900 bp, Pseudomonas aeruginosa
atgcagatagacctcggcgagttgaacgccttcgtggcagtggcgcgcgcgaaaggatttcgcgaagcagccagaatcagcgatggtagcccctccggattgagcgaggcggtgcgccggttggaagcacgccttggtgtgaggcttttgaatcgcaccacgcgcagcgtagttcctacagaggcaggtcagcgtctacttgagcgcctggctccagccctaggcgaagtggaagctgcggtcgatgtggtcaacggatttcgcgaacgcccgatgggaaccttgcggcttaacgtaccagtgagcgcggcacggctcgtgttaccgtccatcctgccgcgctttctcatcgagtatcctgacattcgcgtagaggtcatcactgaggagagcttcgtcgatgtcctagcagcgggctgcgatgccggcatacgctacgaagaacgactggagcaggacatgatcgcggtgccaattggcccacgcatacagcgtatggcaaccgcagcggcgcccgcttatctggatcgtcatggtagaccgaaacatcctcgcgacttgcttggccacacatgcatccgcagtcgattccgcagcggaacaattccttcgtgggagttcgagcgcaacgggaaagtactgaagatcgaccctgacgggtcgctgctggtgtccattggcagtattgacctcgcaatcgaagcggccatcgctggaactggcatcgtccatctctttgaagaatggcttagaccccaccttgcagagggttcgcttgaacccgtattggaggcgtggtggcagcaattcagtgggccattcctgtattactccggacgacgcctggtacccacaccgctcaaggtcttcatcgacttcatcaaatctccatccatctga

SEQ ID NO: 346613 - DNA, 876 bp, Pseudomonas aeruginosa
atgtcaatcaagaatgaacactccaccttccacctcggagatcgcactgtgaaacgcatgggctacggcgccatgcagcttgccggccctggggtattcggtccgcccaaggaccgccatgcagctctagccttgctgcgcgaagccgttgagcttggcgtgaaccacatcgataccagcgacttttacggcccgcatgttaccaaccagataattcgcgaggcattgcatccatatcgtgatgaccttgtgatcgctaccaagatcggtgcgcgtcgcagcgctgatggagcatggttgacggcgatgtcacggcaagagttggtagaagcggtgcacgacaacttgcgcaacctgggcctggaggcgcttgatgtcgtcaacctgcgcatcatgttcgatgcacatggtccggctgatggttcgatcgaagaaccactcacagctctggctgagctccagcaccgtggtttggttaaaaacattgggctgagcaacgtcacgccgctccaggtgtccgaaggacgccgcatctgcacaattgtcgaagtgcagaatcagtacaacttggcgcatagaaccgatgatgaactgctcgacgaacttgcttgtgatggcattgcctacgtgccctttttccctctcggtggattctcaccgctgcagtcgtctgcgctaaccaatgtagccgaagagctcggggcgactccgatgcaggttgctctcgcctggttgttgcggcgctcgccgaatatcctgttgattcctggaacttcgtcagtgaagcatctgcatgaaaatcttgcagcagcggatctggccttaccggatgaggctgttgctacgctgaatggcattgctactaataaattttag

SEQ ID NO: 346614 - DNA, 396 bp, Pseudomonas aeruginosa
atgactgctcgcccgcaactgcccaaccccatcgactctgttgcactggcatcgctgaacacagcggatggctggcttgcctatccgttgggggacgatgtgatcgaaggcaatcctgatacccagatgaagctactgagaactgtgggcgtgaagaccccatacaaagccgtggcgttttttacctctcaaccagggaagttccattggcgcttcgataacgacgaggccttcgtgctgatcgaggggcatatcgtgatcaccatggataccggtgagcggttcgaaatgagggccggcgatggggtatcgcttccagcaggacacacgggagtctgcgaggttcttgagttcagtcggaagttcactgtagtgaccagtgggaccgcgaactaa

SEQ ID NO: 346615 - DNA, 549 bp, Pseudomonas aeruginosa
atgaccgcgaccagcatgcgcgaggtggtgcgctactcgaacacgccacgcggttcgatcgctcaccactttccaggcggcaagcggcagctgctcgaagcggcggtcgaccacgctggccgcgaagtcagcgagccgctggcgcaactgctgagcaaacacggtccagtgaaaggcatgcagctgtttgttgctctgtggagaagcaccttggaggagacagccttccaagccggctgtgcagtgctggctgtggcggtcgagcagtacgcgtccgaccagcggggtgatggggaggctgagttggaagcgcagatccagttgcagctgctggaccaggccaatagcatctttgcgcaatggcaggaaatcatcgggcactcgctgcagctggccggggtagcggatatgcgtgcgcgcagcctggctgtgctggcgattgccgccatcgagggatcggtcgcgctatgtagggcggcccgcagtgccgagccgcttgatctgatctggcaggagctcaaacacagtttcgaacaggcgctggcctaa

SEQ ID NO: 346616 - DNA, 573 bp, Pseudomonas aeruginosa
gtgcgcccactaaagatgtcccgcgatgaactgctgcagcgttgcgccaacacgttcaaacgccttggctatcatggcaccaccatggatgcgctatcgtcggcctgcgggctgaccaaggcgtcgttctaccatcactacccgaataaggaatcgctcctacgggatgtgctggactggacgcatgagcgcttgaagcagtcgctgttcgccatcgccttcgatgacagcctggctgcgcaggaacgattaatgaggatggggcgcaaggccaaaaagctctttcaggacgactcgatcggctgcctgatgggggtcgtagcaatcgacgccacctacggcaaggtggagttgatggagcccatccgacgcttccttgatgactgggccgcggcgttcacgaatctgtatgtcggagcgcatgaccaggagagcgcgcagcgtctagcgaagcagctggtggccgacttcgaaggcgcgattctgctggcgcgcatttacaacgacccgagctacatcgatgcggtgatcgagcgcggcgtgcagcaactgccagcgggcgtcgccgcttag

SEQ ID NO: 346617 - DNA, 798 bp, Pseudomonas aeruginosa
atgagcgaagcaaacagcggtccgggtcgtgtcacccgtgagcagcgtggtcacctgttcttgatcggcctcgatcgcgccggaaaacgtaatgccttcgatagccatatgctgactgacctggccctggctttcggcgagtacgagcgtaatgacgaggcgcgctgcgcggttctgttcgctcacggcgagcacttcaccgccggtctcgacctaatggagctgacgccaaaactcgcttccggtggtttccagtacccagccgatggcatcgacccatggggcgtgtcgaaaccacgccgcaccaagccggtcgtgcttgccgtgcagggcacctgctggaccgcaggcatcgagcttgtgctcaacgcggatatcgcgattgccgccagcaacacacgctatgcccatctcgaagtgctgcgaggcatcccgccgtccggtggctcaaccgtgcgcttcacccaggcagcagggtggaccaatgccatgcgttacatgctgaccggcgaggagttcggtgcagctgaagcactgagcatgcgcttgctgaccgaagtggttgagcctggccaagagttggctcgcgctatcgaatatgcggaacgcatcgccaaggccgcgccgctagccataaaggcaactctgcagtctgccttccaggcccgcgacgaaggcgatgacgctgctctgtcgaagcttaacgagttgctgttctcgctcatcaagagtgacgacgtgcgagaaggcgtaatggccatgatgcagaagcgcgagccggtattcaaaggtcgctaa

SEQ ID NO: 346618 - DNA, 1689 bp, Pseudomonas aeruginosa
atgaatcgtcagaacaagaaagagaatgtaaggctgaggatggtgagtacccaggacagtaacgagcttcccgacttcggagtggcaaccgttgatgagctgctgcatggtagtgccgccagaagccccaaagcagcggcgctatctgccatgggcgcggacatcagttacgaagccctgcaagcccatagcgcttccatcgcaacttggctgattgatcaggggctgcaaccgggtgcccgtgtagcagtggcgttgccgaacgtacttgctcatccaattgcttgcctcgggataatccgcgcgggactcactgcggtttgtgtcaatccgctctacacggagcaggagctggctcagattttcaaggacagcgatgttcgcgcggtcttctactttgagcccatgagtcgctcggtacagcacgccatgcaggaggccggcatcggcatttccgtccgagtgactcctggggacatgctgggctggaagcgtccggtagtgaactgggtggccaagcggcgcctgggtggccaagtagcctccatccccaatgccgcttgttggcagaaagtaatcgcgacccctgccaactacctcaagaggcaagctgccccgcaggcccagcacactgctttcatgatctacagcggtgggacgacgggccagcccaaaggggtaccgatcactcatagcgccttgctgtacaacgtggcgcagcagtattcggctttgcggttccacttggccggtaaagccgagcacgagtacgtgctgctactggccgttccgctctaccacatcctggggctgggaaatctggtgttcacgctggccagaggcggtaaagcggtgctggtcatgaaccgtcgtgataccgcggcgttcgttaaggaatggtcccgccatccgatcagtagtttccccggggtgaacacgctctataacgctctcctcgagaacgacagcttcaagcaattggacttccagacgctggatatctgcttgggagccggcatgcctgtcagtgaggccacggctaatcgctggaaggaggtaaccggttgccacattaccgaagcttacggaatgacagagactgggctgatctcttgcaaccccgcaggccgctcgcggccgggctcagtcggcctgccagtagcaggtatcgagatatcactacgagatgacgacggcgcggaggtcaccatcggcgacggtgagatctgtgttcgcagcccagcaatcatgaccggctactggcagcgcgaggaggaaaactctactgctttcaccagtgatgggttcttccgcacgggagacatcggactctttgacaccgatggctacctgcgcatcgtcgatcggaagaaggagatgatcatctcctcaggcttcaaggtcttcccctccgaaatcgagcgcatcctcaacgcacatcccgggatcagcgagtcggctgtcgttccggctccggacgagaaagcaggggaagtccccgtcgcctacgtggttcggcgacaagcctacctggacgagcaacacgtcatgtcccactgcgagaagcacctggtcagctacaagcgcccaaggcgcattgtctttagagacgaactgcccaagagcaacgtagggaaaatcctccgcaaagccctgatagaacgagacgtacaggagcagaatcaatga

SEQ ID NO: 346619 - DNA, 915 bp, Pseudomonas aeruginosa
atgagtcgccagcccgtgaacctcagctgcgttgagcagatcactctgcatgcgagtgatggctatcgcctggctgccacccgctatagcgccacgggtagtctcaagggcaacctcatcatggctggcgcgacgggtgtgcagcaacgtttctacaggcgcttcgcggagcatgccagtgcgcagggatttaatgtgctgaccatcgactaccggggtgtaggacagtccaagccacaaacgctgaaaggtttcgagatgtcctatctggattggggctttcaggatctcgcagctgcagttgagttcatggccgatgagctacccctgtattgggtcggccactccttcggtggtcatgccctgggtctactgcccaaccatcacaagatcaccgcagcctactgctacggcactggtgcaggctgggctgggtggatgcctcggcttgagggactgaaggtccgcttgttgtggtcgtccatcctgcctctgattgtttcctggaagggatacatggcttggagcctcctagggatgggggatgatctgccactgggggtctacaaggattggaagcgctggtgtgctcatcctcactacttcttcgacgatccatccatggcgtcgacgacccagctatacgccaatgtgcgtatgccctgtgtgttctccaatgcaaccgatgatccttgggcaccacccgcatcgcgcgacgccttcatcaagggctatcgcaatgccgccctccttacacgcgatcttcaccctaaatcgaagagcgagccgatcgggcacatgggctacttccgtccctcggctacaccgatatgggatgagatgctgcagtggttccgcgtcgtcaatccggataccgcctcccgcctacgctccggaacgggaggtgtgcgatga

SEQ ID NO: 346620 - DNA, 735 bp, Pseudomonas aeruginosa
atgagccaggaagccaccaagtgcagcgcaactgattcggccgcaacctttcggtcgctgatggaagatcggcgtgcaatacgccgcttcaccagtgagccagtgcccgagcatgtgattcagcagtgtttagaaacagcagccttggctcccagctcatgcaacctgcagccctggtcgtttcacgttgttcgctcgaccgaactgctgcagcagttgcaaccggtttgcctgaatcagaacgctgcgaaggcgccactgatcattgcagtactggcacggcccgacacctggaagtcggcctgcaccaacgtgttgaagtactggcccgaaaaggatgttcccagagccatcgcgaacttctacaccggaatcgcaccgtttcaatacaaccaagggcgttggggctcgctgggcctgttcaagcgcctgttgatctggtggaccgggatcaaacgccccgtcatgcgcgggccaaacagtgtggccgagatgaagctgtgggcggttaagtcgagctcattggcggctcagagtctgatgctcgcctttcagagtcatggttacggaacctgcccgatggaggggttcgacgagaagcgtttgagaaagctcctacccatcccggccaaatccatccccatcatgctgctagcggttggggttcctggagaacgagccgtgcataaccccaggctgcgtttccccattgggcagtgcgtcacctggcactaa

SEQ ID NO: 346621 - DNA, 840 bp, Pseudomonas aeruginosa
atggttttttccgaggtcgagtacgaagtccatgggccgattcgagtcatccgcctgaatcgcccggagaagcgcaattgcatcggacctgtcacgcactgggagctgatcgaggcatggacccgctttcgcgacgatgaaggcgcgttggtggccatcctcaccggagctggtgataaagcattttgcgcggggggggatcttgaagcgggtttcgacctagtcccctcaacacccgaagaaattgccgcccatgatcgaggcgagcgccccgggattttggggcccagccgctggactgatatctacaaacctgtgatcgccgcggtcaacggtgtcgcctatgcgggaggattggagtgggcctgcttcgctgacatgcgcattgttgaagagcatgcctcgttcggtgtgacctgccgccgttggaacatcggtctcgctgatggaggtagtcagcgcctcccgcggatcgttggtatgggcagggccatggagctcatcctcactgggaaagtcatctcagccagcgaagcccttgctatagggctggcgaacgaagtcgtacccaaggggaaatcactggaccgagccctggaactggcagcgtttctttgcacgctcccacaaccagcaatgcgctctgacaaagaggctgcagtacgaggcttcggacaaccgcttgctgaggggctgcgcatcgaggccgagtgcttcaatcgctccattcatcacgaggagacccgcgagggtttacgtcgattccttgagcgggatcacccagatcgccaagccagcgggccggcaaaaacaccaggcttggttagggacgaggagtga

SEQ ID NO: 346622 - DNA, 438 bp, Pseudomonas aeruginosa
atgaactatgcgcttctgctacagctgcacctctttgcagtcgcattctggttgggcgtggtcgcggtggagtacttgcttgagcagagccgttcacagagccgaggtcaggggttcacagtggcgaggcttcatcgaaagatcgatctgtacttcgagatgccggcattctccgtggtgcttgtgaccggcatcttgctgttcgagcctggccgtttcgatggcatctatgccttgaaggtcgtcgctggagcggcagcagtaataggtaatgtgctttgcctgattcctgttctgagacgtcgagcctctgccgagcaggaggatcttgccgacgtcatccaccaatcaaagctgattgatcgtatttccctgttagcaataccggctggattagtagcgcttgcctgcggtgcgtacctgatgatgctgcgctga

SEQ ID NO: 346623 - DNA, 582 bp, Pseudomonas aeruginosa
atgagcttcacctctgaatccatccttaaaaccttcaaagacacggaggttgcggatgctcctaagctcaaacacacgcagtacctgcattaccttgcccgacgcttgggctatcttgattacgcccacttcaaacgctgtgtgcaaacggcaccgtctgaccgtattggcgacttctatacagggttgatgcagaaaatctgtgccatacgcatacccaacgaagatattgagcacgtgcggctaagccacttcgacgggaagtcggttggctacgactcctacttcatcgggtgggataagcatggccatgaggtgcgagagccagacactgggcatggcaagctggcgatcatggattttcgcgaggtcttcgaggagccgctttatgtcatcgagactgaagctgagttcctttcgtggcaatggaaatggggctccttcgctgcagtgcctgtttccatggccaaggcccatttcccctcgctatttaataagcgcaagcaggtggtagagaatccgccgctggacaaaatcaagcgccggatccatcgcgagcttcaagggaaaggcctcatataa

SEQ ID NO: 346624 - DNA, 789 bp, Pseudomonas aeruginosa
atgaaacggattctcagcatcctgctgctcgcgttctgcgcccatgccaatgccgtcattgaccattacgcctggaataacatcgccttcccggacgagacgtccaccaacggactccccgaagcgatcccttgcatcaaaaagaaagccttcgatggtcagccgctgatcaagtgcacctggctggagacctcccgcgaagtgctcatctgggatactcagcgccagcaggatctacgctatgtcaaccaggtaagcggtacgtgcctgcgcggcagatgccggacgaacaccaccatcgtgggtgaatggaaacaggatgtgttcttctccctatcgatctggtatcgcatcggagtcagcaccgacggcaagccagtggcctaccgtgtcgatacgtcgcgtcaggtgtcgtatgccgaggcgggatccctcctgtaccagttctacctggacattggggtcccagataatcaacttgtacctacgttcgacgggcgttacgaaggcggttatgcagcgtggcaagcccagaagggcagtgccccagcatcaaccctgcagtcacccacgtcggcccaatccgaatggccggacgtgaaaagtgcctggtgtaatccgcgcatggatgacgactgctatatcaacaaccagaaggttccggtggctgaactgggaaaatggctgccttcagtcagtgagtccaacgtcgaccagttgggcgggtactgcgagactatcctctgcttcgatagcaaggatcagccgttgggctacctgctgcaataa

SEQ ID NO: 346625 - DNA, 348 bp, Pseudomonas aeruginosa
atgtcaaaaagcgattcgaagcagctggcggaagtcgtgggccaggcgattgctcgtcagcggacgcgctgcaagttgagccaggagcaggttgcggagcggcttgggattggtagcgaggccgtatcccgtatcgaacgtgggattgtcatgcccaacgtcgagcgtctggttgagctggcaactatcttcaactgcgaaacagccgacctgctgaccgagggaagctcccgcccggcggaccaggcacgccggctccatgacttgctgtcccggttggaggcaccagaccgtgatctcgtcatggacgtggtggagcgcctggtcgcccggctcggccaggactga

SEQ ID NO: 346626 - DNA, 321 bp, Pseudomonas aeruginosa
atgatcagatgcttgatctgcgagtccaaggccattctgactcgggacgttgccaagggcatcgcccggctggtcagcctggccgacggtgcattgcagagggctcaggatgcgaacacaggcacacccattctggggagccactcgcttatcaatgggctggccgccctcgcacacgctcatccccaggcattatgcgtggctgaggatgtcgccaaatatcacttcggagagttcaggtatttgtgcctgcgctgtggatcgctgttcgatgaaccgggcacagaggaggcgtccgagcccgccaggcagccgccgtaa

SEQ ID NO: 346627 - DNA, 330 bp, Pseudomonas aeruginosa
atgtcattgcagtgcccccgctgtcattcccccaaagtcgcttccttccatcacgccatgaaagtcggcgcggccatcggcaccgtgggcggtgttgcgcgcggcgtcagcgctgccctggcaggcggtcaggctggcgcagctatcggcgcattcgccggccctatcggcatcaccctcggctccgtgtcgggcgccatcctcggcggcctggccggtggggtcggtggttgtgcgctcggcgcgcagctcggtgaatcgctcgatcgccacgttttggcccacaacctctgcctgctctgcggtcaccgcttcaacctgccggcctga

SEQ ID NO: 346628 - DNA, 1056 bp, Pseudomonas aeruginosa
atgtttttgaacgatcaggaaacggcgaccgatctgctgtactacgaagcgatcgccaagacggtggtgaagctaatcgggaaaaccccggaaactccgatcaccatcggcgtacacggggattggggggcgggaaaatccagtgtgctgaaaatgctggaggcctcgttcgagggcaacgaccggacgttgtgtctgtggttcaacggctggaccttcgaagggttcgaggacgccaagaccgttgtcatcgagacgattgtcgatgagctgcgccgtgccaggcccacatccaagaaggtggccgatgcggcgaagaaggtccttaagcgcgtcgactggctcaagcttgcccgaaaaaccggagggttcgcgctcacggcctttaccgggatccccaccttggatcagctcaagggcgcctatgaatttgcgtccgggttcctggccaagccgcaggagagtgtctcggccgaggacatcaagtctttcgccgaaaaagcgggcgcttttctcaaggacgcagacgactccgccgaccaccttcccgagcatattcacgccttccgtgcggagttcaaggcactgctcgacgcagcggacgtggataagctggtggtcatcgtcgatgacttggaccgctgtctgccgaagacggcgattgccactctggaggccatccggctgttcctatttgtcgagcggacggcgtttgtcatcggcgccgacgagatgatgatcgagtatgccgtgcgagagcacttccccgatctgccccagagcgtcgggccggtgtcatacgcccgcaactatcttgaaaaactgatccaggtcccgttccgcattcctgcactgggcgtggccgaaacccgcgtgtacgtgaccctgctactcgccgagaacgccttggggtcgactgatgaacgcttcgagaacctgctggccgaagcgcgtaaagatatgcagcgaccctggaagagtcgcggtctggaccggaggacggttgaggagaccatggggggacggtaccgccggaggtcgaccaggcgctggtga

SEQ ID NO: 346629 - DNA, 894 bp, Pseudomonas aeruginosa
gtgatcagcgcgcatgtgaccaagattctcagcgaaggcacgcgcggcaatccgcggcagatcaagcgctttctcaactccctgatgcttcgccatgccatcgcggacgagcgaggctttggggctgacatccagcgccccattctggcgaagatcatgctggccgaacgtttttatcctgacttctacgagcagatcgcccgcttggccgcgggacatccacatggcaagcccgaggcgatccgccagttcgaggcgcagattcgcgccgaggccaaggtagagcaggcagacgacgaagaggccacggccaagaagacgcgcaaggtcatgcaggcgatagctccagaggtcaccgagtgggagaaacatcaatgggcgagcgactgggctgccattgagcccgcgctcgctggcgtcgatctgcgtccgtatgtcttcgtgacccgtgacaagcgcagttccctggggggatcggtggccgtcagccacctggaagagctcgtcgaaaagctgatgggtcccctgattatggtgcgcgcagcgagcggtgaactgggcaagctcaccggtgcggaaccagaggaggtcttcgaggctatccgtagccgaatcctccaggaggacagttttaccaggaagccgaagggtatcgatggcctggttcgtctggtcgaagcacacccgcagctccagcgcaggctgctggactttgtgcgtgagttgcccaccaacaagatccgggcctgggcggcatcgagctggactacctgtttcaaggacgcattcgacacagaattccagggcgtattgagggactgggcggagcagaccgaaaacacaaccctgcaaacagcggcgcagggcattctcaggctacaggggcagggttga

SEQ ID NO: 346630 - DNA, 600 bp, Pseudomonas aeruginosa
atggcgagctatgtacgcagcggtacgggcggtgcccggcgcgctagccgccggatggggtcgtcccaagtggcggccagggggatactcggcatcgtccgcgatatccagcagttggggcccgagcagacgctacgccaactcaacctcggcaatctggctggacagccggccgcggatgttttcgtggcgctgatggagttcatctgtccgccgggtggcgcagtcgacgaaggtatcgcccgccaggccatggttgaaacgatcgcagacatggccgatgccggtgtcggcagcttcgatacgctgacccgtgagcaactgaacgacgtgttcctggatttcattgtccattcgatcgaggggcgggtcatggctgacatgggggggcgtggaattacgctgcccgacgatgtggccgcggtggagcatatgcaggaccagttgcatgacttcgtatcgggcgcgacgcgggggcagctcgcggggcgcctggatggggttgcgaacttgtcggatcgcgacatcgaagtgaaggtcaaccagatctatgagacggccttcgacctgattgctgttgccggggaggaagccgagtga

SEQ ID NO: 346631 - DNA, 1371 bp, Pseudomonas aeruginosa
gtgaaacatcactccatcattgccaggctcggagccacggatacaaacctggtcaccacgagccgtctcgatacgcaaccgaccacgatcaacttcttggatggacatggccaccttaacttcggcctatggcaggcactgaaggccctcaacgagttgggcctgactccctcggagaaatccgtggatctggctctgttggcggctgcggtgaccgccgccgacacccgtatttcacgcgacgaagatgctcaggattcctggacccgggaaattgacgtccatctcccggttgctgacccgcaactctggagcagccttgcgccgctgatcgtgaagcttctgaacttccttaccggggatcgctggggtgtccatttccgtccacgcccaacccttggaggcgaactcgcaccggagcagacgcagttgcgcatggtccatcccacctcggtgtgtctgttttctggagggctggacagtttcatcggggccatcgacttgctctcggacgggcaggcgcctttgctggtcagccactattgggatgggctcaccagctcgtaccagtccagttgtgcggagctcctgaccacacacttcggcagcccccttgaacatgtccgcgctcgggttggtttcccgaacgacatggtcgatgacaacggcggcgaagatacactccgcggccgatcctttctcttcttctcccttgccgcaatggcggcagatgccgtgggcggggacatggtcatccacgtgccggaaaatggcctgatctcgcttaacgtgccgttggaccccctgcgcgttggctcgttgagcacccggacgacacacccctattacatggcgcgcttcgacgatctccttcgcggactcggcatccgggcccggctggagaacccgtacgccttcatgacgaagggagaaatggccagccaatgccgagaccaggtctttctcgagcagaccgccggcagtacgatgtcctgctcgtctccgttgagtcgacgctatgacccagacccggccgagcgttcgcccaagcactgcggtcgctgtgtgccgtgcctgattcgtcgggccgccttgcacgaggcctttagtagcgacaacacgccgtaccgcattgccgacctgcatgcgcaggtgctggataccaacaaggcggaaggggagcacgtgcgttcgttccagctcgccctggcgcggctcgcgcgtagacctggccgtgcgcggttcgacattcaccagccgggcccgctgatcgattttcccggcaggctgtctgactacgaggccgtatacgtgcgggggctgagcgaggtcgggcgactgctgcagggtgtgcaagcgcgccctctttga

SEQ ID NO: 346632 - DNA, 768 bp, Pseudomonas aeruginosa
atgaccgtaccgatgcaaaaatcttcaccactgtgggtcgacttccattgccatgtcgacctctacaacgaccacgaggcgctcatcgccgaatgtgaccgcgagcgtgtggcgacgctcgccgtcaccaccacaccgaaggcgtggccgcgcaatcgtgagctaacccagcgttcgccctacgttcgcgtcgggctggggctacacccgcagcttgtcgctgagcgggcgggtgagctgcccctgttcgagcgctacttgcccgatgcccggtatgtcggggaaatcgggctggatgcggggcctcgcttttacagcagcttcgaggctcaggaacgtgttttcgagcgcatcctgcgcgcatgcgcggagcaaggcgacaagatcctgagcatccatagcgtgcggacagctgggaaggtgctggggcatctcgaacgggcgctgccgcccgaacgggggagggtgatcctgcactggttcaccggctcggccgcagaagcgcgccgtgcggtggagatgggctgctacttctcggtcaacgaggagatgctgcgttcgcccaagcatcggaagcttgtcgccagtttgccactggaccgcttgttgaccgaaacggatggtccgttcgtacaccgcgatggcagcccaatccgcccatcgcaggtggccctggcggtcggtgagatcgccgtggtacatggtctgacggcggaacagacggccaaagcgatcctacagaaccttaagcgcttggtgacggcctga

SEQ ID NO: 346633 - DNA, 1362 bp, Pseudomonas aeruginosa
atggacttcccggccctgaggaagatgcttcgcccggtagtgggtgacctgaaggaccattgcacaaacacgagcatgcctgagttttgtcggcagctcggactacccgtgcccgacgacgccgggtcaaaacgtgaccgtatgcacacggccttcgacgcgctggaagatgaggaaatttccggactcgtccaggcgctgctggctcagcgtttgctcgcccccgcagtgcgcaaccaggttcaggacctgctgtgggctgccgagcccgtaatcgtggtccccaagcggcatcgccgggaactggccagagccctgcagacccacaacctgtttcgccactgggggcactttgcgcagttgctcagggacatattcgtcattcccgacgatctggaagcgctgatattgggtactgagacaggagcccttgcggagatccatcgacatttcgtgcgcaacccagaggatgccgacgtcgaatggctgttcgagcggctgccggtattcgatctctccgaacagcggtttcgccgatggctggaggggctgacttcggccgacgtgcagacggatgtcgatgcccagctcgccattgttgaggccatgaacgcggtgctacgcacctgcggcgccgaattgcggcaaatatctgaggcgggaggctatcctgtctttgggctggtggccctgcgcgcggcccgcggccggcccaagaacatcatcttcgcgtcccgcgccaagcccgatatccgactgagtgattcgctggagaacgacatcgagattctctcgaatccggacgaggtgctggtgtacgacaggccgctgggcgcggacgggctgcgctggcgggaactgcagcactggtgggcagagatgaccggtgagccggacgccacctgcgccaaaaattcgctgtaccgccgcttgctccagagtctgccgagtacatctccgccgcagcggctgctgttcgatgccttcttccgtggcttcggccaggccgtacatgagctgccggcgctgctccccgaggtttggctgcactgggatccgaagaccgtggccgaacggggtgccaaggcgctactcaatcatcggatggatttcctcatgctgatgcccgccggcgggcgggtggtcatcgaggtagacggcatccagcactattcagacaattcgcagcgtgcgaacacccgcaagtatgcacaactggtggctggcgaccgcgagctaaaactggcggggtacgacgtctatcgctttgcaggcgttgagctccaaggcgatgaagctcctgccagaataaaggccttcttcgtagcgctgctgctgcgccatggggtgagggcggcataa

SEQ ID NO: 346634 - DNA, 672 bp, Pseudomonas aeruginosa
atgtactgctctggccgcggcgcctggaacgccagttggcgaaccagggcaaggcggcctgggaggccggcttgcaggcggccgcggcggagctgcgcggtgccgacgaacgcggcgagctgctcgcggcgctggggcggatcgccgcggcggacgcccagcgcgaccacgcctggttcgagggcgcactcggccgcgcccgttcccaggccttgcgcgtgcttggcctcgacctgctcggcctgctgcgcgcggcgcgcaaggtggctcgcgagcggaggctgctcgatccggccagcgcgcacgccttgcagccctggctggaagaactcgaggtactgttgcgcgagggccgccaggccgagttcgaggcctgccggcagcgcttgcgcctggcgctggacgcggcgcacggacagttgcacctgtgcctggtctgcctcgaacgcctgctcggcgaggcgagggcggccgggcgcagcgtcgaggcgctggtctatggcgcgcccacccgccaggcgccgggcgccatcgcctggcaccgggacatcgagcgcggcgtgctgttcggcctgcgcagcgccctggcgttcctctgcgtggccgcgttctggctggccagcgcctggccgagcgggttgggcgcggtgtcgatcaccggcgtggtgctga

SEQ ID NO: 346635 - DNA, 591 bp, Pseudomonas aeruginosa
atgctgtcgttgcatgtattcgtacgctccagtgaactgcgcttcgcccgttggaacgagttcgacctcaagcgcggaatctgggaaatccccgacactcgcccagccctcgacggcgtgcctttttccacaaggggtacaaagatggccggggatattcacgttgtacccttatcgccacaggcagtggccttgcttgagcagattcacgcgatcaccggcaagttcgacctggtgttcgcgggggatgccaaaccgtggaaaccgatgtccgaaaacacggtgaatgccgcgctcaggacgatgggctacgacaccaaggtcgatatctgcggccacgggttccgagccatggcgtgcagtgcgctggtggagtctggactatggtcggagacggctatcgaacgacagatgagccacaaggaacgtaacaacgtgcgtgccgcctatacctacaaggccgagttccttgaagagcgccggatgatcatgacctggtggagccggtttctggacgccaaccgcgaggaccatgtgacgccacatgagtttgccaagcagactggcgaaaacgtcacgcgccttcgctga

SEQ ID NO: 346636 - DNA, 957 bp, Pseudomonas aeruginosa
atgaccaatcgcaagacctacacccacctttcccagtccgatatcgccctccagatcgagtcactcgtccaggccatcgaacgtcacgacacccctgcattccagtccacacaagcacggtctggatatgaacgagtcaaggtgaccaggctttcccggtatttcgaccacatccagcagatggtcgacctgttcgatgatcgtgttgagtacagctatagcgagcacctgcaaacgttctgggcggcttgccaggacatcgggctggagcgtcaccgtgatggccctgtctgcctgaatgaaaggggtacggcctacctggatcatcaccacagcatgaacgtcctcactgcacggatccgtcaactaaccctgcagcagtggtatcagcgtagggctaaggatcgtcatgatttagccaagcagcaggagatccgagtctgcgactacgccgaagccttatgtgagctttactctcgcatcaccatcgtcagagtcgacttccactatcgtcctgaggcacaagtcaggctgcgtgttgagcacgtgttcgatgacctggatcatctgattgccgagcataggcgcaacccgatcttcgaccacctcatcggccacatctatgcggtggagcaaggggatcgggatgatggcaggggctatcacatccacgctgcctacttcttcaatggcaacgaggtgcatggcgatgtctataaggccatccaactcggtgagctgtgggaggaccttacacgtggccagggctgcatacacagttgcaaccacgataaggaacaatacggtagcgagtgtggtatcggcctcatcctgaggagcgatcaagcgattcggcgacatgtgcacaaggcggtgaagtatctcgtcaaagatgctcagcacctacgcttgaggcccgagggggctagatgcctgaggatggggatgctccgatag

SEQ ID NO: 346637 - DNA, 3180 bp, Pseudomonas aeruginosa
atgccttggagtccagggcaactcgtccgccacatagacgacccggcgaagaccggcacggtcaccgatcagactcggtcgcgtgcctccggctcccagtaccgggtgaactggaatggccgtctggactggcattatgaggaggagctcgtcgcggctgagtcgggtgacgatgacgtctatgagctcctccaggaagggcactacgggcgagtggacgacctgcggaggctgctcacgcatgtccatctcgcgggacggctgacgaacgtcgtctacgccatgggcttaacccaaacagacttctatccgcaccagtacaagccgctactgaccctgctggattcaccggtcaacggtctgctgatcgcggacgaggtgggcctgggcaagacgatcgaagccggcttgatctggaccgagcttcgtgcccgttacgacatgcgccggctgctcgtggtttgtcccgcgatgctgagggagaagtggcggctcgagctgtcgtcgcggttcggtctcgacgcgcgtgtcgtcgatgcgcccgagctcctgcaggagctcgagtccagcgagcatcgagaacgggcatggatcattagctaccagggaattcgtgcgccaggaagttgggatcccacggagagcgacgcgcctcggcgatcggcccgagccaggctcgccgatcttctctatcgccatgccgaccgggagcctctgctcgatctggttaccttcgacgaagcgcactacatgcgcaacgaagggaccggcgcctggcgaacaggtagcctgctgcgcgacgtcagtacgcatcaggtgatgctgtcggcgacgccgatcaacctcggctcggacgacctgttcaacgtgctacgcctacttgacccagaccacttcgaattcccggacgacttcaggaatgtcgtcttggccaacaggccggtcatcgcggccagcgatgtcgtgcgcaacccattgagcggcgctccgcacatcgtggaggcgattcgcaagatcaagtcgtcgcgttacttcgagcgatccgagcgcgtcgatcgtctgatcgaagaagccgaggcggtcgatgaatggacgaacgaaagacgtgttgagttcgcggccaagatcgagcggctcaacctgatcgcacacatcgtttcccgaacgcgaaagcgcgaggtgcagatcgagcgggtcttgcgcgacgtcactgtgtttgaggcggagatgtcgctcattgaagtcgagctctatcagtcgatcacggaaggtacgcgggagtacgccctgatgaacggcatcgaacacggtttcctcctcagtacaccacagcggatggttgcctctagccctgccgcacttctacgcacttggcgcgaggatatggcggacgcggacgcaatggctatcgcatcggacgaggcggacgaggacgaagaccggatacgggacgcgtcgtcggggctcaagcggtatctggccggtcgagtgctccgcgagttcgatgcgggcgaactcactcgccaggattcgaagttcgcggagttgaaggatgctttgagaaggttcctggccgagggtcgtgaggacaaggcgctagtgttcacgaccttccgtggcacggcccgctatctcgtcaatcgactttccgctgagaacattgaggcaggtttgctgatggggggagaggagttcgacaaggaagccgtggtcggcgcgtttcgggaacatcgcacctgccgtgtgctcgtttgtaccgacgtggcggcagagggggtcgatctgcagttctgcaggctagtggtcaactacgatctgccgtggaacccgatgcgcatcgagcagcgtatcggccgcatagatcgtatcgggcaacggtcgaaccgtatcctagtctggaacttcgtacacaaggaaaccatcgacgccctgatcctcacgcgtttggccaaacgaatcggggtcttcgagagtgcactaggtgaaacggaagagatccttggcaaggtccggtgtctcgaggatgtgctgttgtccaagcacctgacggccgatgaagaagcgcgtctgatcgaggaagtggcactcgcgatcgagaactccaaacgcaaacaagaggagctggagcgtgaggcgatccaactggtcgcccatggccagcaattgctggcacagatcgaggcggcgcgtggcgagggaaaggcagtcacccggcacgacttgattcgctatgtggacggttacctcaggactgttcctggctgccgtgtcgtcgctgcacgtggtgagccagataccttcgatataggcctgagcccgagcttggctgcggagttggacgagttcgtcagaaaggagaatctggtcggaaagaccggactgggatcgggacagacaaggcgttgccgctttaccgacagaatcaccgagaagccgaaaaccggtgaagagatcgtccatcgcttccatccgatcgtccgcttcctgtcacacaaggccgagaactgcgaggctcgctttccgctctatgcgtcccaagtcactgccaatggcatcactgcggggcggtacgccgtgatgacccgattcgcaagcttttcgggcgtgaaggaggaagagcatctcctcgtcgccgcgataccgctggatcgggactcccccctggatgttcggacagcggaagctctactcgatacggtcaggaaatcgggcgtcgactggccggctgtggcgttagatgtatcttcggaatccgggatggccgccgtagagcgatgcgaggaaatgctcagagatcgctacaaggcactcaagggcgagaaacagcgtgaaaaccgtgatcgtgccgacgtgctatcgcagctgttggaggaccacgtccgtaagaagcgtgacggattcgagaagcgcatcgcgggtcacgagacattcgcttcgctgtacgggaacagcccggatggcaaacgacgcaaaggtctggcgaacgcggaacgcaagaaaatggaggatttcctggcgaggatcgagacgcgccgggcgacgctgatcaggaagagccaggccttttcggcggaaacgcgcgaggtctgcgtcttgctcgtggatgtagtgcgggaggggacaggtcatgaagagctggaaggaacaactacgggacgtcaaacgaaccctgcaggctga

SEQ ID NO: 346638 - DNA, 1752 bp, Pseudomonas aeruginosa
atgaagagctggaaggaacaactacgggacgtcaaacgaaccctgcaggctgatcaatcgaatgagccgctggaagaaaagccggcggtcgtcgacttcgttccccctgcgtcttggttggaggcctccgacaacagcaaggacgacactccatctcctgggcctaagtcatcggttatccatgggcgtcgagatccctgcaagatggagcggcccccagccgcagggatagcttccgttaccactggggcgagttccgagcgaggagggcccggtgcgaacaaccaaaaggaagatgccgccaggagtttgccgggtgatccccagataccagagggcgcgcgatcacccacgcagaaccatacggcgtcgacgccggtctttcgtccgcatgtcgatgcggggcgttctttggccatgcctggctgggccgacgccggtagctcgttgcagcatcccgagcagcagggcgggagaacggcacccatggtggtcagagtcggggtggatttcggaaccgccttcacgaaagtagcgattcgggcgggtggcgatctggtccgcgtcgactggtctgcggtcaccggtgacgagtcgccagccgggcgatatgtgatacccggcttcgttcaccgcgcaccggatggtgaatatttctggcggcgactcgccgagaccgatatccagggtaacctcaagctcccgctcatcgatatggcaggttccgacgagtgcccaatggccaccctggcttatctcgcactggtcattcgctacgccagggcgtttctttatcgacaccctcaggtcgggcggaaactggcggtccgttcgcttcgttgggagctgaacgtcggatgccccaccgagccgcacaagccacaggaggtcgacgcgcttttccggcgcatcgcccggaccgcctggcagctggcgggagcgaatcatcttcaggattctaatatcgttgccgcctggatgagtggcgaggcggacgtcggcctcgagacggagccgggcgtcgtgccggagtttgtggcgcaaatcgccggttacctcggttcgccccaggtgagcgaaggactgcacgcgctgatcgatattggcgcggctactctcgatgtggcgacgttcaacgtcgttttgccgaatgatctcgactcctcgccgcgaattccaatcttcttctccgccgtccgtccactcggaacgcactatctgtaccacaaccgtcattccaggctcgaccttgattttgcatgggacgatgccgcgccggtcgagccttccgatggtttcgcgaagcgatacggcaagcgtccggatgatgtcgatgcagtcgactcggagttcatagataaagtcgcgagatgcatcgccgcggtgaccgatggcacccgtactaactctcggggagacccgcgaagctctgcctggagtgaagggctgccgatattcgtcaccggcggcggatccagttgcgaactctatcgacgggcagtcgacgctggagagctcgatctgaaacaaaggatgaacgacttgctgagccgattccggttcatcgaacgggatccactcggcgcgaagttcccacatttcagtatcgaaattgcaggtaggctcagcgttgcgatcggtttgaccgaggatgcggaaagcatcgctcgtgtcgttccacatcgcgaaatcggcccgattatgcggactgtgacggagcgtatcgaccatatggaactctatggcgactga

SEQ ID NO: 346639 - DNA, 663 bp, Pseudomonas aeruginosa
atggcattgatcaactgtgacgaatgcgaccgcatggccagcgaccaggcagcagcctgtccgcactgtggggcgcctatcgctaaacagccggcacatgttcaagcccaacccagggttcaggttatccgcagcgttggcttctggctcggcgtgggcattcttctgtttccggtcatcttcgtctggttcctgctgcgtcagggtcacagcaccactagccggatgatcggatttacctggctggctctggtgctggttggcatggccaccagcgagcgcagccccagccaatccgtcagcagcagccagaggcagccggccaagatggtggcgccggccgagccgctgcgcgaaatcagcgcccagcaactggcccaagcctacgaccgcaacacggtagcggcggatcagcagttcaaggacaagcgcttcacggtcaccggcgtggtcgactcgatcaataccgatctgttcggtaagccatacgtcaccttgcgtggtggggtgaaccagttcatggagccgcagttcaagctcgacagcgatcatcgcaactatgctgccgggctccagcaaggcatgcgtatcagcctgatctgcaaagggcgcggcgatgtagccaaaacgccgatgtccgacgagtgcgcgcctgtaaactga

SEQ ID NO: 346640 - DNA, 4155 bp, Pseudomonas aeruginosa
atgaaacccctcgatatccacgatgaatggttgtcgctgatcgaggtctccggtccttttctcgccacgcccgtactcaaacgggtcttctccaccggcctgccggcggtagaactgtgtattcgacagtatctgcggcaggcctatgacgagtggtgcgaggctcgtgacaacgacgattccaggttcgccgagctgcatagcgcctggattcacgaggtgctcgcccgcggcctggagtacgacgaaaccgatagcggtgagcttctactgcgaggtgagcgcattccttcggagctgcgcgtcacgctgccggaacacggtgtcaccttggagcctgactatgcgttggtctcgggcggcaaaagccggctgctcgtgcaaatctattcggcgggcacggatctccaagctgcactgaagttggatggctgggtcgctagtccagccgaacgtatggagcggttctgccgggccagcggctgtcgccttggtttggccaccgatggcgagcgctggatgctggtcgatgctcccattggtgctgtatcgaccttcgccagttggtatgcacgtctctgggggcaggagcggctgacgctgcaagccttccttaccttattaggtatccggcgtttctttggtccggaagatgagactttgccctcgatgctggacgagtccctccagcatcaggaagaagtcaccgatgccttgggtgagcaggttcgccgggcggtcgaggtgttgatccaggcactgggcaaggaagaccgcgagcggtcggggacgctactgcaaggtgtcgagccgactgagctctacgaagcgggcctgaccatcatgatgcgtctggtgtttctgctgtcggccgaggagcgggggctcttgctgatgggggaggaagcgtacgagagcaattacgccatctccactttgcgaatgcagttgcgtcaggaaaccgaggaggtgctggagcggcgcaacgatgcctggtcacggttgctagcgacatttcgcgcggtgtacggcggtatcgagcatgaagcgctgcgtcttcccgctctaggtggttcgctgttcgacccggatcgtttccctttcctcgaggggcgcgcccagggctccgactggaaggtcgatccgtcccacccgctgccgatcgataaccgtaccgtcttgctgctattggaggcgatccagcagtacgaggggcgtacgctgtcctaccgggcgttggacgtggagcagattggttacgtctacgaaggcttgctggagcggacggttgcgcgaaccgaacgggtgacagtggagctggccggcggcaagggagcgaagaagaccctttatgctctggaagagctcgaagctctgcgccagagagggggcgaggtgttggccgaggtgctgtccggtggagatgcgatcaagcgtggcggaggagcgatccgcaaggacctcgaacgctcggtcgatgctgcccaggccaaccgtctgctcaccgcctgcgctggagacgaaggcctgcgtgatcgtgctttgccgttccttaatcttctacgcaccgatccttggggctacccgctgatttaccctgagggagctttcatcgtcaccacgggcagcgatcggcgcgagacgggaacgcactacacgccgaaatcgctcaccgaagccattgtctacgggacgctgacgccgatcgtctacatggggccggcagagggagctccgcgtgaacaatgggtgctgaagtcgcccaacgaactgctggaactgaagatctgcgatccggccatgggctcgggagcgttcctggtgcaagtctgtcgctggctggccgatcgcctggtcgaggcctggtcgaaggttgaaggtggcggaaagacagtgagcgtggacggcgaaatcctggatgcgccggatgccaaggagcctttgcccggggataccgaaacccgcaccgtgatcgctcgccgccttatcgccgagcgctgtctctacggcgtggacctaaatcccctggcggtggagctcgccaagctctctatctggctggttacgatggccaagggcaggccgttcggcttcctcgaccacaacctgcgctgcggtgacagtctgctcggtatccatcggctggatcaactcaccgagctctcgatggtaccgactgggagaggtcagcaacgcttgttcggacagaccattgagcgggcggttcacgaggcgatcgagttacggcagcaactgcgagaaatgccgatccgcgatatccgtgacgttgaagccatggcatatctggatgccgatgcgcgtcgcaagctccaagtaccggaaagcatcgccgatgcgttcatcggcgaagtgtttgcctcgggtggtaataggtcggggctggagaatatgttggcgtcgttgaccatccaagccggacaggccatcgaaggtgatctcaatgtgctcgccttgatgcgccgtaggtcggccaccgcgctttcgaccgatctatccgtcgacaaacccgagcgccgaccattccattggccgttggagtttccggaggtgttcggacgcgaacatggggggttcgacggtattgtcggtaatccaccctttctgggcgggaagcgcatcaccggtgttgtgggcactgcctttcgcgattggttgatcgcgcatatcgccgaggggcgaggtggatcggcagatcttgttgcctatttcttcctgcgggcatggagcctgctgcgggagggaggtggttttgggctgctcgcagtaaacacaattgcagaaggcgaaacgcgacaggtcgggctggaagctatggtcggtgtgggtgctgttatccatgccgcctacccgaatgaaccttggtccggaaaagcggcggttatcactagtcgtgtgcacattcacaaaggtaaatggctgggagagcgcttgctcctaggacgatcggttcccttcatatcggccttcttatccgaccgtgaagaatggagtctgaagcatctgaaagcaaacgaggggaaagcatttgtcggctcatacgtcctcggcatgggattcgtgctctcacctgatgaggcacaatggatgcttagtgcggatccgaagaacgctgaggtaatctttccctatatcaacggcgaagacctcaattcagacccagaacagcgacctagtcgctgggtgatcaacttttgggactggtcggaggagcgcgcgcaggagtacgaagtaccctggcaatggattgaagaacgagttaaaccagagcgtcagcgtcgaaacgatcgcggcgattttgttctccgaaatccgcttcctgagcgctggtggcactatgctgacaaacgtccagcgctatatcacgccatcggtcgaggccaccatttcgagcgccacccggcagactggtcacccagtgggagacagccctcgcgagtgctggcgcttacgcgcgtgagcaaaacgctggcgttctcatttgtcgattccaacatcgttttctccgatgcaacggtcgcattctcgctcggtcttggacgagatttcgctctgttgcagtcgaaccttcacgccatattcgcatggcagtacgcatcacgcctcaagagcgatttgcgatatagccagacggatgcgctcggaccgttcgctttccctgagggatttagtggtgcgcagaacggcttgctcgatgacttaggcgatcaattccaccaagcgcgtgtcgaggtcatgcgggccgatcgcattggcctcaccaaactctacaatcgcttccatgccgacaccgaacacgatcctcgtatcgaagggctgcgcgctctgcagtgcgaaatggacgccgccgttgcatgctcctacggctgggacgaccttgacctcggacacggcttccacgaagtgccgtacttgccggagagcgaccgagcccgcttcaccatctcggaggcagcgcgtgtcgaagtgctgcgacgactgtctgagttgaatcgccagcgctatcaagaagaggtagagcgagggtggcatcccgacagtaatctacgagcctcgtcacctgcgaagcgtggacgccggcctaaagtcgcttcagatcagcccatggctgatctgtttgccggagacgacgcatga

SEQ ID NO: 346641 - DNA, 363 bp, Pseudomonas aeruginosa
atgtactggattgagatctgccctgacggcagctacgtgattggcggtcaggagtacccccttcttgccgaaggcatcgaagagcatgagagctacgacggagaacgctctggcaacgactgggcaaagatcaccgtccctttcgagatcgaaaccgagcatggtgttttcgcctgggaagtggagctcattgagtatttggagcgaaaggtcaccagcctcttggactaccgaatcaccgagtacccggatcacatcctcctgaaagacgaagtcatgttccgcatccaggatggatgggcttacccgaaagaaccgacactcgacttgaagccccgagtgactaaaatgcgtctcgtttga

SEQ ID NO: 346642 - DNA, 615 bp, Pseudomonas aeruginosa
atgttgttgccgagagaggagttccggggcgtctgtccggatatcagtcgtctagaggctgcgagggcggtattggcacgggctgtcgatgcggaacgctcggagcggtggtgcttgactctgtgggggcgctttatccggatgcgggatggctatcgatgcgtgcattgcgagtcttcgcaaggtatccaggcgcatcatatctttcgccgtaccactcttccagaagggaagtacgagttgggtaacggaatcactctttgtcgagaatgccataagtctctgcacgcccagttcaatgggcgacctgtcgatggggagtcactcaacgagcgtggtggtgatgaccaggatgaaatggcttatctctacggtcgtcttgatgtcgacgccgacgatcgagggcttgataaagagcgcttctatttcatcagcgaccggatgttggagtacttcgtggcgatgcagggatacgagccgtttcttgaggctacgcaggcaggggcgacgagtcgcatacattttgcgcactccatatggtggagcatgcctgagcagttttatcaggcggtatatggccagatcgtcagcgctgcattcgctactgagcattga

SEQ ID NO: 346643 - DNA, 1272 bp, Pseudomonas aeruginosa
atgagcgaggctctgctatccacttataagcagatacgatgggtcgtctccatcccggaatgccgtcctgtgaagctcatctctaccaacacagccctgaagtccaatctactgcggcttataaggaagtacgaccacatcagctttggcacagcatgggcatctgccggaactgacgtcttcactgagctgataaaggcaaaggccaagatcaacctcggcgtcatcggcacacacttctatcagacccaccccgacgtgcttgacgagtttgtatgttccagacaggtcagattcactctccagcctgaaggtgtcttccaccccaaagtgttcgccttctggacggccacaagttgggaagttctcattggcagcgccaacctcacggcaggagctatcaaggccaacacggagttatctaccctcatcacccacgaggacggcacgcctgagctactgagcgaagttctggacatcatcagtggctacgaaggcaggagtattagccaagttgacgctgacaactaccgcaggatctggggcatcaaggctcgcctcagggaaaagcttgaaggcacttatggcggcacaccaacttccaagcctgaagtggaatcgcctgtgatgaccatggactggccaaccttctacgccgagatccagaaggacaagactcacggctttgcagaccgcctaggcatgctggagcagattgccagccaattcgccaatgtgaagcacttcaatgatatccccctgcaggaacgccttggaattgcgggcctcaggagcaaggccatcaaaaactctgaatggtttggatcaatgaccggtgctggcatgttctacaagcacatgaacgccagcacaccagccttctccaaagcactggacgctatcccgcccaaagggcctgtgaccaaggaccagtacgacgccttcatcaaggcgtttgttaaaggatttcctaacggcaggcatggactcggtactgctactcgcttgctttcgatgaagcggcctgacgttttcctttgtgtggatggacaaaataagaaaaagctggctcaagatgtcggcatggtgagagctgacaagctggactacgaccgctactggacagaggtagtggaacgccttcaggaggccccttggtggaaatcccccccgcccagtggtggcaacgaagccaaggcttggcatgcacgagcagccatgctggatgccatcttctacgaggaaaagaaaaaaaggagcaagaatgcttga

SEQ ID NO: 346644 - DNA, 1443 bp, Pseudomonas aeruginosa
atggatgcagaaccaaaacctacggtaatcggctgtgacctcaatccaaatgataaatgctacgtatgccggaaggtttatgacgagaaggagactcggagacacgaggaacacatcattcaaaacgcaattggcggaaagttaacctctcatcgcattttatgtgagaaatgcgggggagtacttgccgaactaattgataccccattttctaatgagctggcgctgttcaacatcttacatggcactaatcgagacagagagtccagcaaaagcggtgcaaaaatcgaagtactgactaaggtcaagcctgaatgcctctcggaatccacgacttaccgattatgtgaaaattatcgcgtcctaccaaatcgtccaatatttttccgtgacgaaataaagagaactataacgattgttgcatctactccaaaacaagcaacggaattttccaagagcaggccaatacagcagctagccaaggctggatacaccataaggcaagaagctgatgtggggaattatgcggaaaaattcatatttaagtttgattctaattcgacaactactattcgtggcgcatcaaagatcgcgttagaatttgctcttcattctggtgttgaaattcggtttctcgatgatttcattgtttctttcctagatacctctagcactgaaaaaattcatcagctagtcacgcaatactatcccgttacggatgaagaaaaaatatatgaaacaaataaatacaagcacgaagattggcatcctaatcatcagatcacattgttctcgaatagaagcgatctttactgctatgttgagctttttgggtcaattcaaaaatacatccatctctcaagtaagtatggtggaaaaagaatcctagtgcgtttcactcagcgtgttaggagttgggatttcaatgcggccgactggactggtggccccaaagaacttcatatgtttgcgggccaatttggtgttcatttctatggtcggagtttgatggatgtcgagaaggatatcattcatcaggctcgtattagagcctataccttagatcctgaaatccagataaataaggtaaaggccatcatgcaggcgctcatccattacacaatttcgaacattaaagagattccagttgcagacgaaatacttgaaaaaagtgtgagtgccgaccaaacattcggcctctcgatactcagaaaattgaaagataaccccatagacgctttgacaatgatccgaaggagctattggcattttagagccaaggcaaatatggattgctgtccgaccctagccaagaaaattgccccggaggtcttgggtcagtatgccaggtttaagctttacgaaagtctttgcagtgttgcaaaagagcaagagttcactatctacgagccgcataccagcatagatggttacgtaaagtag

SEQ ID NO: 346645 - DNA, 615 bp, Pseudomonas aeruginosa
atggccgtaacaacaaatattgttgtactaagcaagacctcaatgaccggaggtgtatgcgtaggtgcttgggatgaatctaaccgcaaaatgctacgcctactagatgacaaagctcagaggctggcttcagacgctccttaccagattggccagtgctaccaaattacgtacgcaccacactacaacattcgtccaccgcacacagaagacgccgctgtttatgagtcagcatatattggcgacttgaatgacgaggagttcgatactttgatatcctcactctgcgacgaggacttgagccttgacgatatatttgacggcaagcttatatgggatggcagcgcccatatggaacccagcaacacaacaaactatagtgtccaaatcgccacgttagattgcgcacttgttaagaacggcgactatttcgaacatttttcatggagagcctcgacaaagaggataaagtacgtaggagtacggcctctcgccgacctgccttctacaatagctgccggcactcggatcaggttctcactagccagattctgggacagagaaaaagacggagtccttcgagcataccttcaactctcaggcatctacgattag

SEQ ID NO: 346646 - DNA, 378 bp, Pseudomonas aeruginosa
atggcagtttacaaggttgagaaagacgaactgttgaaggttggcgatacgctggagggcatggttcgttctgactgggccgaatgggaagactttgaggatggttttctgggggcgctgctgaagttccgcttgtacgatgatgctgatgacgtttaccggctctatcggcgtgaggaggcagagcggccagatggcgagttgccccgagtgaagtacatctttgatgtgaatatagatggatcgaactttgactacattctggtcgaggattcgttgccacagttcctggcagtgatgcgcatgcttgagccgctggctactcgaaaagtgcgtttagacgctgagtttgaaaaacagcagagccgtcgctcctga

SEQ ID NO: 346647 - DNA, 657 bp, Pseudomonas aeruginosa
atgattccggaaacttggcgcgactacaaaatagagtttcggcctctagtgattctggcttggttgttggtttcgcccgcggtagtgctgccattgctgtggctgtggagcgtagagtggggctggcttgaggccttccagtggaacgagaataccgcctcgggctgggttcaggcattcggtagcgtcggcgcgattgtggcggctatatggatcagtaatgctcaggggcagcgagaacggctgacccgccggcgccgggaataccactacatgttcaaggccttcaacaccgcaacctttgcggggggctcgatgaacgcaattgcaggcgctatggcggctgagccgactgatacctctacgttgcatatctacttggggcagctgcagcagtcctgcgttgagcttgatcagttttcctacgcggagttcgtggatttgaatttcgctgatgcatggacgttgcaccggcgaggcgttcaactgctcgctagtgagatggaaaagcacctgagcggagcagacaccaacctcatcgtgggggcgactgttcttgctactgagagccgtcgtcaaataggtgagatgaggggggcgttggaggcgtacagcgctcgtgtgggcaatggcgtctggagtgaccatcatccttga

SEQ ID NO: 346648 - DNA, 2157 bp, Pseudomonas aeruginosa
atgatggatgttaattcgcttaggataagcataaaagagggtgggctggaacatgagcctttcaaggttctggccgcaatctcgaaagtctgctctgaaagtgttgaattagggcgtgatctggttattcgtgcattggactccaaggaaagactggggtggcagtatagagatatactcgaagagctggtgatgcaggtcggtctttatccatatgtgaataatttacccgaactttctctgcgtagcgcgatgttacatgctgcgcaccgagcagacggggaaatggaagattttgtaattcatcaggctcaagctcgtgttctacgaaagctcatgctaggagagtcggttattcttagtgctccaacatcatttggtaagagcctattaattgaccttctaatatctgcaaaggatttcgctaacgtcgtgttagtagttccaaccttggccctggtcgaggaaacgcggcggagaatgtcgaaattttctgatcgctatgcggttataacgtcaagcggtcaggcattagctgaaagaaatatattcgtttttactcaagagcggttactcagctttgaaggcgtgcttcctgatccggatttctttgtaattgatgagttttataagttatcaatatctggtgagggtgatagggcaacgttgcttaatcaagcatttttaatgttgtccaaaaccggcgcgcaattctacctgctggggccgtcgattaagtcgattccagcagaagtgcataataaggtgaagtgcacttttatggttgaggactttcagacagttgcaattgagttgcatcatctgggtaagaagccaaataaagatatagtactggcagagcttctggaaggcctggatgggcagacaatgatttattgccagtcgcctaacagtgcgcgttctgtcttgaaggaatacataaataaccgagctctcaaggaaacagaagatcaagaactgctggaagctgccgagtggaccgcagcgaactataaccgggagtggcttgtttcggttggacttaaatatgggataggtattcaccacggaaggctcccacggtcacttggccggtttatggtcagggcgtttgaagagggtaagcttaaggttctgctttgtacttcgactttgattgaaggagtaaatactgcggcgaagaatgttgtgatttacgacaataagctcaacaggaagccgttggacttctttacatttaataacattcgtggccgctccggtcgaatgtttagacatttcgttggcaatgtatatgtcttcgatgcacctcctgttgaagagcttccttttgtcgatattccggttttaaatccaagtctcagcacgccaagcagtctcttaattaggattccgccatttgaccttccggtggagttgcgtgaaaaggtttcaatattggtggggcagaaatatttgccattcaatatattgactgcacattcgggtgtcgagccggagtgtcttatcgaggcggcaaagtatttgtgggagcttgactatgactcgcttcagttggcttcatggaccgctaaccctagatacgaagaattaaaattttcgtcaaatataatatgggcccagcttggcggtagcggtgcagctaaaaaggctgcgatgagaacggctagcatgatgacaaaatgggtgtgggatctgcattgggtaaaaaatgtccctcgttttagacgcgataagatcgaaaatcaaatagacttcggagtttctcccgatgacgctgttgagaatgttctagcctttattcgaggttgggcttccttcagctacccgaagtatctatctgcgctgaacagcattgcaaatcacgtcctttctgctcgcggttacaaagggtgtaattaccttccatttgctgcatcaattgaacacctgtttcagccggatacatattcgtctttagaggagtatgggctgccgaccgaaatcacggaacggcttgttagagggaatgtgtttggcaaggaagagtcgctcgatgtagtgataaataaactaaagtctgcaacgatgaaaggcttcgctggtggagtgtttgagcagaggatcattgaggatttccagcaaggcttaggtgtgcaagccggaaagctgagttaa

SEQ ID NO: 346649 - DNA, 1170 bp, Pseudomonas aeruginosa
atgattccagacatcgattcccgtctcagccggaacatattgaaatccatctcgtatggcctccccctcgccgaagtggtccccgaccatacctatgcgcaactggaaacgcgcctcggcgaactgaaacgcaggtatctggagctgcgcatctcccacggcgcgcgcgagctgccgttcagcaactacctgttctacctgatcctccagtcgcgccaccaggaattcgacttcaagctgcgccagggcaactcggtggtcaccaacatccaccgattcaagagcaagggacgcatcccgtccctgaccaccctgctcctggccgatgcggtcaacgccaagagcgagctggagctcaagcatccggacatcccgcagctcgaccgccacgctcgcgacatcgagcgctggctggccgccggcaacgtcatgccgcccagcgagcgggccctgcgcggcctggttgaggcgctggagcgcgccgctggcgaaggccgtccgttgcacctggtgagcgcggtatgcccggactactcgcactccagcgatgccgagggcaagccgcgctacaccttcgagcgagtcggcgaccagcccggcctggccggcgccaagctggtcagcgccggccaggcggtggcggagctggccagggcgcgccaggtggaaatccgccacgcgatcctcggcggcgagttcgagtacctatcgttcaaccgcaaccccgccaccggcgagacccgcgagggtttcctcggcaaggtcgagcgccagctcgagcggatcgccggggccctgccctgcccggccgcgacctgctcgttcttcgagatgtgcgacggcgaggacggctggcaccgggcccacggcgagatcgtccagcgcctggaacagggcgactacggccagaccgggctggactacccggccctggaatcgatcttcctgtcgcgcctgccgctctacgagaaatggttcgccagccagtcgcgcgagcagatctgggccagcttcgtctcccaggccgccgagtacgcattgatgggaaaactcttcggcgagcgcttcgacaacttcgtcgtgctggccgtcgatcactaccggatggagccgttctactcgttcttcgcgaccgtcccgacgctctacatccgaaccgactacctgtaa

SEQ ID NO: 346650 - DNA, 2430 bp, Pseudomonas aeruginosa
atgtcgaagaacgcacgttacgcctggcgcctgtccctcggcggcctgctgctggggctactggcctgcgcggtctacctgctggccgtcccgctgggcttcaagtacggcgagatccaggtcggccatggcctggaacacgaggggcggatcgcctgggacgccgccggcgtcccgcatatccgcgcgcagagcctgaaggacggctatttcctgctcggctacagccacgccagggatcgcctgtggcagatggagttcgcccgccgctatgccggcgggacgctctccgaagtgttcggcgccaagaccctgccgatggacaggttcgcccgcaccctgggcttccggcgcaccgccgagggcatctacgccaacctggacgcgcccacgcgcgtcctgctgcaacgctacagcgacgggatcaacgcctatctggagctggccccggcggcgctgccgctggaattcagcctggtgcgccacgagcggccggggccctgggggccggtggacagcctgtccctgcacctgctctattcctggaccctgagcgccaacctgggcatgcagttgcagcgcctggcgctggccgagcacctggacctggcgcggatcaacgaggtgttcgccccctatccgggcgagcggccgccggccacccgcgactacgccagcctgtaccgctccctgcacggcacgccggacgccggcaagctgctggggcaactgcccggttccaacgtcgagggcatcggttcgaacaactgggtggtctccgccagccgcagcgccaccggcaagccgctgctggccaacgatccgcacctgcgcctgaccaacccggcggccttctacctggccagcctgaagatccccggcctgagcctcaccggcgccaacttcgccggcgccccgctgttcgtcatcggccataaccagcgcatcgcctggggctacaccaataccggctcgcacatccaggacgcctacctggagcgcgtcgatccccaggacccgcggcgctacctgaccccggacggctaccggcccttcgagacgcgcctggaacgcatcgccgtgcgcgacggcgagacggtctcgctggaggtccgcagcacccgccacggcccggtgatcagcgacatctacgaaccggcgcggctgccgcaggcgcagcgcgaccggctggtgatcgccctcgcctggaccggcctcgaccgtcacgacaagaccttcccgagcctgctggcgatcaaccgggccgaaggctgggaacagttcctcgacgccgccgacgacttcggcgtaccgccgcagaacatggtctatgccgacgtcgagggcaacatcggctacgtctccgccggtcgcgtaccgctccgcggcgccgacgacgacctccatggcctggccccctcgcccggctgggagagccgctacgactgggtcggctacgttccggaaagcgccaagccacgcagcctcaacccccgcgaagggttcatcgccacggcgaaccagcgcatcgtgccgcccgacaatgccttcgacttcggccacgactgggtcctgccctaccgctatgaccgcatccgcgagtggctcggcggccccggccagcgcaccctggaagacagcctagagttgcagaacgacgagttctccagcgtgatggcgagcctgttgccgaagatgctggagcaggtcagcgaccccgaactgcgcgccagcgaggccttcgccctgctccagggctggaaccaccaggccgccgccgacctggccgcgccactgatcgccggctactgggtacgcgccttcacccgcgagctgctgcaaccgaggatcggcacgcagttgctggccagcggctggaaccagcgcaactacgacggattcctccggctgatcctcgacggccaggccgatctgcgcttctggtgcggccaggaacaaggctgcgacctcaagctgaaccagtcgctgcgccgcgccctcgacgaactgcgggccgcccacggaagcgcgccgagcggctggaagtggggcgaggcgcacgccgccctcgccgagcacgtgcccttccacaagaccccgttgcgcgcgctgttcgacctgaagaacaacaagggcggcgacaacttcagcgtcaacgtcgggcgcttcgactacagcgacccggccaacccgttcaacacacggatcgccgcgaccctgcggatggtcatcgacctggcggacttcgacaactcgcgctacgcgctgtccacccgcaattccggcctgccgttcgacggcgccaccgatctcaacgaactctgggcccgcggcgcgtacatccgtatcgccgacgacgcccccgacgcgacggaccgccagttggtcctgcgcccttcagcctcttcctccggcgagccacgaccatga

SEQ ID NO: 346651 - DNA, 738 bp, Pseudomonas aeruginosa
atgaccagcgatccgcagaaaaacgccttcgacctcgactactccagccgcgaacggcagttccccgagggcttcaagcgcaagatagtcgccgacctgcaagagggaatgccgcagttcgacgtgctgcaatacttcggcaaccagccggatatcttcgagacctacgaccacctggtactggcgaccgacccggagggcgaacggatcatcggcatcctgggcgcgaaggacttcgtccgcggcgcgacgcgcttcctctacctgtggacggcgatggtggtcgaccgctaccaccgcaccagcctgttcaagcggatcaaccagttcttcctgcgccaagtcagcgagcgcaacggcgggctgccgccactgatcgtggcgaagacctacaacccggtggtctacaacatgttccgcgccctcagcgcgcggatcccgggagcgacgctgtacccggacctggaagcgccgcgccagagcccggacatggtcgacctggcccgcgatgtggtcggcacgctgtccgccaacctgcgcctggatgcggaaaccggcctgatacccggcgggcaacgcagcgtcgccccggatttcttcccgcgcatggcgatgtccagccacgccaggaccaacgaccacttcgtcgcccacgtcggcagcagcgaccagatcctctgcatggtccgcctcgcgcccggtgccgaaccctacgtgcagcagaggatcatccggtga

SEQ ID NO: 346652 - DNA, 387 bp, Pseudomonas aeruginosa
gtgagcggactcgcgcagcgctccgacgacccgtggctggcggcgctgccggccgcggtgctctacggcgcctgggcggcctatgccaaccaggacggcggcctggccgggatgggcgtcgccgccctgctccagggcgccgcgagtctcctggcgacgcgcttcggcctgtacctgttgcaatgtctcggccgccgccacggccttgcgcaacgccaggcgcccctgctggtggtgctcctgctgaccgcgccgatggccgcgctgcactggctctcgggcacgccgcatccattggcgagcgtggcgccatcgttcgtcatcggctggctctacttcgccctctgggcgcgccgcccgggccgccggcaagccagcggcgcctag

SEQ ID NO: 346653 - DNA, 624 bp, Pseudomonas aeruginosa
atgctggagattctcggaaaggcctcttcgatcaacgtgcgcaaggtgctctggacctgcgccgaactggacctgccctaccgccgcgaagactggggcagcggcttccgcgacacccacgcggcggaattcctcgccctcaacccgaacgccatggtgccggtgctgcgcgacggcgaactggtgctctgggaatccaacagcatcatccgctacctggccaaccgctatgccggcgaacgcctctatccgcagcaggcggcgccgcgcgcgcgggtcgaccagtggctggactggcaggcctccgacctcaaccgctcgtggagctatgccttcatgagtctggtccggcagtcgccggcgcaccgcgacgcggcccaggtggaggcttcgttgcgcggctggacgggcttcatggaaatcctcgagggacaactgctacgcaccggcgcctatgtcgccggcgagaccttcagcctggccgacatcgccatcggcctgtcggtcaaccgctggtacgagacgccgttcgagcatccgtcgctgccagcggtgcgcgcctattacgagcgcctcggcgcccgtcccggcttcctcgcccacggccgcaacggcgtaccctga

SEQ ID NO: 346654 - DNA, 384 bp, Pseudomonas aeruginosa
atgaagctacccgtgctcgctgtattgggcgccgcgctgctgttgagcgcctgcgcgaagaaggaggccgaggcctgtgcctcgccggacgtgaaagaccaactgatgcgaatcttcctccagggcgcgatcaccgagcgctcgccggagttcaaggacagcgcgctgcgcgacgtggcgatcctcgagaaggatcccgacagcggcgtgctgtcctgcgtcggcaccctcagcgtgccggccggccagcaggtggtcgagggcgtcctgcaataccgcatcgccccggtggccaagtccgactacgactacctgctgctggataccgccggcgccaacaccaccgccctggcgcagcgcctgaacaaggcgctcggccagtga

SEQ ID NO: 346655 - DNA, 288 bp, Pseudomonas aeruginosa; identical to SEQ ID NO: 323286

SEQ ID NO: 346656 - DNA, 876 bp, Pseudomonas aeruginosa
atgtcatcgttccaaggtatctgggtcccgctggtcacgccgttccgccatggcgagatcgacttcgccgcgctgccgcgcctgctcgaccacctgctgaatgccggtgtcgccggggtcgtggtctgcggtaccaccggcgaagccgcggcgctcgaacacggcgaacagctgcaattgctcgacgccgtgctcgaacgggtggcgccggagcgcgtggcgatggggctggccggcaacaaccaggcgcaactgctggccttccagcgcgaagtgctagagcgtccgctcgccggcctgctggtgccggcgccctactacatccgcccctcccaggaggcgctggtgcgcttcttccatggggtcgccgacgcgtccagcgtgccgctgatcgtctacgacattccctatcgcaccggtgtgcgcatggaactggaaaccctgcgacggatcgtcggccacccgcgcatcgccgcgatcaaggactgcggcggcagcctggaaaacaccctggcattgctggcagacggccaggtggcggtgctcgccggcgaagacctgcaaatgttcaacgccttctgcctgggcgccagcggtgccatcgccgcctccgcgcacctgcacccacagcgcttcgtcgcgcttcaccggcaggtcgtcgagggccggctggaagcggcccgggccaacttcttcgcgctgttgccgttgatccgtgcggccttcgccgaacccaacccggcgccggtcaaggccggcctggcgcgccagggactgatcggcgacgagctgcgcccgcccttgctgggctgcggcgcggcactggcggaacggctcgggagcttgctcgcggagattccggcgcggctcgcctag

SEQ ID NO: 346657 - DNA, 2367 bp, Pseudomonas aeruginosa
atggtggagttactgcaagggttcgtcctgacccggcactggcgcgatacgccggccggcacggaagtcgcgttctggctggcgaccgagcagggcccgcggcaggtgcggctgccgccgcagccgtcggtggcgttcgtcctcgccgagcagcgcgggcgcgtcgagtccctgctcgccggggagactggcgccgagctgcggccgctggcgctgcgcgacttccagcagcggccggtgctcggcctgtactgccagcagcatcgccaactgatgaatctggagaaacgcttgcgccaggccggcgtcgaggtgttcgaggccgatatccggccgccggagcgctacctgatggagcgcttcatcaccgcgccggtcagcctggaggcgagtgtcgaggccgacggcagcctgctcgcccggcgcctgaagccggctccggactatcgcccgcgcctgcgcctggtgtcgctggacatcgagaccaacgcccgcggcgatctctactccatcgccctggaaggctgcggccagcgccaggtatacatgctcggcccggccaacggcgatgccgcggccgtggatttccgcctcgactattgcgacagccgtgccgggctgctggaacgtctcaaccagtggctggccgagcacgatcccgatgccatcatcggctggaacctggtgcagttcgacctgcgtgtcctgcatgagcatgcccagcgcctgaaggtgccgctgcgcctggggcgtggcggcgacgaaatgggctggcgcgagcacggcagccgcaacaaccactttttcgccgcggcggccggccgcctgatcatcgatggcatcgaggcgctgcgctcggcgacctggagcttcccctcgttcagcctggagaacgtcgcccggaccctgctcggcgaaggcaaggcgatcgacaatccgtaccagcggatggacgagatcgatcgcatgttcgccgaggacaagccggccctcgcgcactacaacctgaaggactgcgaattggtgacgcggatcttcgcccgtaccgaactgctcgacttcctcctcgaacgggccaccgtcaccggcctgccggcggaccgcagcggcggctcggtggcggccttcacccacctgtacatgccgttgatgcaccgcgccggcttcgtcgccccgaacctcggcgagaagcgtccggaagccagtcccggcggcttcgtcatggactcgcggccgggcctctacgaatcggtgctggtgctcgactacaagagcctgtatccgtcgatcatccgtaccttcctgatcgatccggtcggcctggtggaaggcctgcgccagccggacgacgagcactcggtggaaggctttcgcggcgcccgcttctcgcgtacccggcattgcctgccggccatcgtcgcacgggtctgggagggccgcgaggcggccaagcgcgaacgcaaccagccgctctcgcaggcgttgaagatcatcatgaacgccttctacggggtgctgggttccagcggctgccgcttcttcgacccgcgcctggcctcgtccatcaccctgcgcgggcatcggatcatgcgccgtacccgcgagctgatcgaggccgagggctatacggtgatctatggcgataccgactccaccttcgtctggctcggcagcccccgcgccgaggaggaggccgcggccatcggccgggcgctggtggcgcgggtcaacgactggtggcgcgagcacctgaaagaagaattcggcctcgacagcgccctcgagctgcaattcgagacccattaccggcgttttctcatgcccaccgtgcgcggcgccgaggagggcagcaagaaacgctacgccggcctggtgcgccgcgccgacggtggcgaggagatggtcttcaagggcctggagaccgtgcgcaccgactggtcgccgctggcccagcgcttccagcaggaactctacctgcgcatcttcaatcgccagccctaccaggactacgtgcgcgattacgtacgacggaccctggccggcgagctggacgacctgctggtctaccgcaagcgcctgcgccggcgcctcgacgattaccagcgcaacgtgccgccgcatgtgcgcgcggcgcgcatcgccgacgactacaacctcgagcgcgggcgcccgcggcagtaccagagcggcggctggatcagctacgtgatcagcgtcgccggtcccgagccgctcgaggcgcggcgttcggccatcgactacgagcactacgtgggcaagcagttgcagccggtggccgacgccatcctgccgttcgtcggcgacgatttcgccactttggtcgaccggcagatggcgctgttctga

SEQ ID NO: 346658 - DNA, 534 bp, Pseudomonas aeruginosa
atgaccgaaccgacgattcgccgcctggctggcgaggagatcctggcgtgcctggacgaactggccgaggtactgctggactgcgtggaaggcggggcttcggtcagcttcatgtggccgttgccgcgggagcgggcgctggccttctggcgcggcgtcggcgagagcgtggcgggcgacgaacgcctgctgctggtggcggaagcggaggggcggatcgtcggtaccgtgcaactgctcctcgaccaaccgccgaaccagccgcaccgcgccgacgtggcgaagatgctggtgcaccggcgtgcgcgtcggcgcggcatcggcgaggcgctgatgggcgagctggaccggctcgcccgggcctgcggcaagtccctgctggtgctggatacggtcagcggcagcgccgccgaacggctgtacctgaagaccggctggacacgggtcggggaaatcccggactacgccctgatgccggacggcacgccctgtcccaccacctatttctacaagcgcctggctgctgccggctga

SEQ ID NO: 346659 - DNA, 552 bp, Pseudomonas aeruginosa
atggatatcgacgaactgattgctcgacgcctagccgccctgcgcaaggagcgcgagctgaccctcgcccaactggccgaacgctgcgcggtgagcaaggcgatgatctcgcgcatcgagcgcaaccaaagcagccccaccgccagcgtcctcggccgtctcgccggcggcctgggggtcgccctctccgagctgctcggcgacgcgcaggcgccggccgaaccgctctgccggcgcgcgcagcaggaagtgtgggaagacccggccagcggctaccgccgccgccaggtcggcgctcgcgatccgcgcagcggctgcgagatggtggaagtggagatcccggcgaacgcccgcctcgactatccccgctggggcggccggccctaccggcagcgcctgtggctggtcgagggtgcgctgcgggtggattacggcgagcagtcgttccacctgcagcgcggcgaccgcctggacttcggcgtcgaccgcgcggtgaccttcgccaccgccgggcaagcctgccgctacctgctggtgatcctccacgactag

SEQ ID NO: 346660 - DNA, 399 bp, Pseudomonas aeruginosa
atgtacgcatccttcgctcccgcgacctgggccttgctcgcctacctcttcggcgcgctcgccctttgcctgctcatgctggggttgggccgggtgctgggcggccgatcgcatggccgggcgaagaacctgccgttcgagtcgggggtggattccaccggctcgtcgcgcttgcgcttctcggtcaagtacgcgttggtcgccatgctgttcgtgatcttcggcatcgagatgccgttcctctacctctgggcggtgtcgctgcgggagaatggctgggcgggtttcgtcgaggcgacgctgttcgtctccctgctgctggtcggactgttctacctgcaccgggtcggcgccctcgactggtcgccggagcgccggcggaaaaagccgcacgactag

SEQ ID NO: 346661 - DNA, 324 bp, Pseudomonas aeruginosa
atggcgtggatctatctcttgctcgccggtgtcttcgaaatcgtctgggccacggccatgaaggagtcggccggcttcacccgcctgtggccaagcctggtcaccctgctgttcatgatcctcagcttcggcctgctggccgtttccatgaaaaccctgcccctcggcacggcctacaccatctgggtcggcatcggtgcggtcggcgccttcgccctgggcatcctgctcttcggcgaaagcccgagcccgttgcggctgctggcggtggggctgatcgtggccggcatcgtcattctcaagctggcgacccggcagggctga

SEQ ID NO: 346662 - DNA, 462 bp, Pseudomonas aeruginosa
atgcccacctcgctcgtcctgaacggcaagaacgtcaccctcgacgtcgatcccaacatgcccctgctctgggccatccgggaaagcgccggcctgcacggcaccaagttcggctgcggcatggcccagtgcggcgcctgcaccgtgcagctggacggcaccgcggtacgttcctgcgtgctgccggtctccgcggtcgccggcaagcgcgtcaccaccatcgagggtatccagagcaagcccggcaaggccgtgcaggacgcctgggtcaagctccaggtaccgcagtgcggctactgccagtccggccagatcatgtccgccaccgcgctgctggagcagaacgccagccccagcgacgccgacatcgatgccgcgatgaacggcaacatctgccgctgcgccgcctatgtgcggatccgcgccgccatccacgaagccgccgacaccctgaaggcctga

SEQ ID NO: 346663 - DNA, 2196 bp, Pseudomonas aeruginosa
atgaacagcaagatcgatctgagcaacgccctgcccggctcgcgccgcggcttcctcaaaggcgccgcggtggtcggcctgaccatcggcttccagtggagcggagcccgtcgcgccctcgccgcggccctgccggacgccggcttcgcgcccaacgccttcctgcggatcgccccggacgacagtgtcacggtgatcgccaagcacgtggagatgggccagggcgcctataccggtatcgccaccatcgtcgccgaggaactcgacgcggactggagcaaggtccgcgtggaaagcgcgcccgctgacgccaagcgctacgccaacctggccttcggcaccatgcagggcaccggcggcagttcggcgatggccaactcctggatgcaattgcgcgaggccggggccaaggcgcgcgcgatgctggtcgaggccgccgcccgccagtggcaggtaccagccgccgaactgcgtacccgcgacggcttcgtcgaacatccgaccagccagcgcaaggccagctacggttcgctggccgctgcggcggcggaactgccggtgccggaaaaagtgcaattgaaggatcccaaggacttccgcctgatcggtcaccaggcgccgcgcgtcgacgttcccggcaagaccgacggcagtgcgcaattcaccctcgacgtcagcctgcccggcatgctggtcgccctgctccagcgcccgccgctgttcggcgctacggtgaaatcgttcgacgccacggcgaccagggcgattccgggggtggtcgaggtggtccaggtgccgcacggcgtggcggtggtcgccaagggcttctgggcggcgaagcaaggccgcgacgcgctcaaggtcgagtgggacgagaacaaggccgagaagcgtggttccgaggcgctgatggcggagtaccgcaagctcgccgagcaacccggcaagcccgcgcgcagggacggcgacgccgccaaggcggtggccggggcgacccgcaggatcgccgccagctacgagttcccgttcctcgcccatgcgccgatggagccgctggacgcggtggtcaggctgaccgccgacagctgcgagatctgggccggcgaccagttccagaccgtcgaccagggcaacgcggcgcgcaccgccgggctgaagccggagcaggtgaagatcaatacgctctacgccggcggcagcttcggccggcgcgccaacgcctggtcggactatatcgtcgaggcggtatcgatcgccaaggcgctgggcgccaacggcgtgccggtgaagctgcaatggacccgcgaggacgacatccacggcggtttctaccggccgatgtactaccaccggctcgaagccgggctcgacgccgacggcaagctggtcggctggcaacatcgcatcgtcggccagtcgatcctggaaggcacgccgttcgccgcggtgatggtcaaggacggcatcgacgccacctcggtggaaggcgccgccaacctgccctatgcggtgcccaatgtctcggtcgagctgagcaccacccaggtcggcgtgccggtcctgtggtggcgggtggtcggcagctcgcacacggtctacgcggtggaggcgttcatcgacgaggcggcgcaggccgccggcaaggacccctacctgttccgccgcgacctgctggcagagcagccgcgcctgcgcggcgtgctcgaactggctgcggaaaaggccggctgggacccgtccaggccgctgcccgccgggcgcgggcgcgggatcgcggtgaccgaggcattcaagaccttcgtcgcccaggtggtcgaggtctcggtggacaaggacggcaagctgaaggtcgagcgggtggtctgtgcggtggactgtggcatcccgatcaacccggacgtgatcgccgcgcagatggagggcggcatcggcttcggcctcggcgcgatcctgcacagcgcgatcaccctgaaggacggcaaggtcgagcagaacaacttcgacggctaccaggtgctgcggatcgccgagatgcccaaggtcgaagtgcacatcgtgccctccggcgaagcgcccaccggggtcggcgaacccggtgtggcgcccatcggcccggcgctggccaatgcgatcttcgccgccaccgggcaacgcctgtacaacctgcccttccccacctccttcgccaaggcctga

SEQ ID NO: 346664 - DNA, 555 bp, Pseudomonas aeruginosa
atgaccgagcctctcccttcttcgtccctgggccccgccctgcgtcgctggcgcctgctgcaccgggtcaagcaaacgcatgccgccgaattgctcggcgtggcgcaatcgaccatctcgcgctgggagtccggtacccaggcgctgctggtggaggaacgggcacgcctggagcgtctgctcggcgcccgcctggaagccgccgccgaccaggcactggcccgcctggtcgaggccaacccgcaacccgtgcacctgatctgcgacctcacccatcgcctgttggcctgttcgccggcacgcgccgcgcaattcggcgtgcctctcggcgaactgctcgaccgttcgctgtggccctattgcagcgaggaaatcctccgccaggaagccaccctcgaggaactcggctggcgcgaactgctggcaccgccggcgctggagttcgccagcggagcgaacgcctcggccatagtgccgatccggcgcagccgttgccgctggacccgcatgaccctctcggacggacgcgcggtgcgcctggtggaaaccctctga

SEQ ID NO: 346665 - DNA, 579 bp, Pseudomonas aeruginosa
atgtccctcgaactgctgagcaaccgcctcgaattcctccgcgaagccgaacgcctgaaagacgtcctgcgctccgcgcacacctcctccggccgcccggaaagcaccgccgaacatagctggcggctgtgcctgatggcactggccttcgaggaccaactggccggcctggacctcggcaaggttctgcgcatgtgcgtggtccacgacctcggcgaagcgatccacggcgacatccccgccgtcgagcaggccgcgcacccggacaaaggcgaacaggaacgcgccgacctgttgcagctgacccgtcacctcgacgcgccgctgcgcgaccgcctgctcgccctgtgggacgaatacgagcgcggcgagtccgccgaagccctggcagtgaaggccctggacaagctggaaaccctgctccagcacacccagggcgacaatccggcagacttcgactatgccttcaacctcgactacggccgtcgctataccgaccgcgcaccgctgttcaagaccctgcgcgagctactcgacgccaggacccgacagcgcctcgcagctcggcgcgacgcctag

SEQ ID NO: 346666 - DNA, 1188 bp, Pseudomonas aeruginosa
atggactctgaacgcgacgccgccgccctgcgtcggcaactggccgacccgttgctggcggctacccacccggtctaccggccgctgctctggaccctgctcggttgcgtgctgctgttcatcggctgggcggcctgggcgcaactggacgaggtgacccgcggcgacggccgggtcgtgccgttcagccgcatccagaagatccagagcctggagggcggcatcctcgaccgcctgctggtgaaggagggcgacctggtggaagtcggccagccgctggtgcgcctcgacgagacgcgcttcctcaccaacttccaggagtcggcgaaccaggccagcgtgctgcgcgcggccattgcccggctcgacgccgaagtgctcggcaggaagagcatcgagttcccgccggacgtcgatcccgaggggccgctggcgcgctccgagcgcgagctgttcaagtcgcgccgcgacaaactggtggagggcacccaggcgatccagcggcagatccacctggcgcagagccagctcgacctggttcgcccgctggtggccaagcgcgcggtgagccagatggaggcgctcaagctgagccaggacatcgccaccctcagcggcaagctgaccgagctgaaaagcacctatttccaggatgcctataccgagcgcgcccagcgcaaggccgatctcagcgccctggaaccgatcgtccagcagcgccaggaccagttgcgccgcaccgagatcctgtcgccggtgcgcgggcgggtgaacaccgtgctgatcaacacccgcggcggggtgatccagcctggcgagccgatcatggaagtgatcccggtggaggagcgcctgctggtggaggcgaagatcaagccgcgcgacgtggccttcctggttcccggcatgccggccaaggtgaagatcaccgcctacgactacaccatctacggcgacctcaagggcaccctggagcagatcagcgccgacaccatcgaggaggacaccccgcatggcaaggagtcctactaccaggtgctgatcaagaccgatggcagccagttgaagcgcggcgaggaggtgttgccgatcattccggggatggtcgccgaggtggacatcctcagcggcaagcgcagcgtgctcaactacctgctgcggccgctgatcaaggcgcgcctttactga

SEQ ID NO: 346667 - DNA, 2172 bp, Pseudomonas aeruginosa
atggaagctgagaaaaccccggataacgtcgtgatcctcaaccacgaccccatcgtcgacccgttgcgccagggcctgctgctgctctgccggcagctcggccggccactcggcgacgccgaactggtggacggcatgccgctggagcacggtcgcctgccgttgcacctggtggcccgcgcgttgcgccgcgccgacatcaccgcccaggtcacccgccagccgttgcgccggatcgaccgctacctgctgccggccctgctgctgctcgacgacggccgcgccctggtgctggtgggcaacgacggcgagcacgccgaggtgctggtgccgcagagcgacggcggaagccagaggatgccgctggccgagctggaagcgctgtacagtggcacggcgatcttcgccaagtgtcgctaccggccggacgggcgggtcggcgactacgccagcgccttgcccgagcactggttcttcggcccgctcaagcggctctggcgttcctacgccgaggtcaccgccgcggcgctggtggccaacgtcctggcggtcgcctcggcactgttcgccatgcaggtctacgaccgcgtggtgcccaacgcggcgttcgacaccctgtggatcctcgccagcggcgtggccctggcgatcgtcctcgacggggtcctgcggatcatgcgcggccacctgctcaacgtgctcggcaagcgcctcgacctgcaactctcgaccctgctgttctcccgcgtgctgagcacccgggtcgccgccaagccggcgtcgatgggcgccttcagtacccaggtgcgggagttcgagtcggtgcgcgagttcttcacctcgtccagcgcggcgctgatcagcgacctgccgttcgtggcgatcttcctgctgatcatcgccgtgatcggcggccatgtggtctgggtgccgctggtggcctgcgtgctgatgatcctgccggggctgctgacccagcgcctgctcggccacctgtcgcggcagaacctgcgcgaaggggcgatgaagaacggcgtgctgctggaagccttcgaacacctggagacggtcaaggcgacccgcgccgaaggccgctgcctgcaccaatgggaaaccctgaccggcgaactggccggcacggcgatgaagacccataccctggcctcgaccctgagctactcggcgagcatcgtccagcagctctgctacgtcggcgtggtggtcttcggcgtctatcggatcagcgagggcgcgatgaccgtcggcggcctggtggcctgctcgatcctcgcctcgcgggccatcgcaccgctgtcgcaggcggccggcatcctcggtcgctggcagcacaccaaggtggcgatggaaggcctcgaccaactgatgagcgccgagcaggagcgcccccagggcaagcgcttcgtgcacaaggagcgcctgcagggacattaccgcctggagggcgtgcgcctggcccacggcgacagcccgccggtggtcgacgtgcaggccctgaacatccgcgccggcgagcgtgtggcgctgctcggcggcaacggcgccggcaagtcgaccctgctgcgcctgctcagcggcctgctcgacgcgcaggcgggacgcctgctgctggacgacgtcagcctgacccagatcgacccggccgaccgccagcgcggtatcggctacctgccgcaggacgtggcgctgttccatggcagcctgcgcgacaacctcaacctggagaacgccgcgctgggcgacgaggaactgctggagaccctcgacggggtcggcctgggcgccttcgtccgcggccacccgctggggctggacatgccgatccagggcaacgccagcctgtccggcggccagcgccaggccgtcgggctggcccgggtgctgctacaggaccctccgatcctgctgctcgacgagccgaccgcggccttcgaccagggcagcgagaaacaggtcatcgactacctgcaacaatggctgggcaagcgcaccctggtcatcaccacccacaagaaaagcatgctcgccctggtcgagcgcgcggtggtcctgcgcaagggcagggtgatcatggacggcccgctggagcaggtggtgcagggcaaccaggtacaggcaccgcaggccgccgaaggaggcaaccatggactctga

SEQ ID NO: 346668 - DNA, 204 bp, Pseudomonas aeruginosa
gtgcagtttgtgcgcggtcccggcgacttcccggatcgagcgatggatacgctcgacgaactggttgaaggcatcgccgagcactccgaattcatcgcggctggtcacggcgaggcgcttggtcaggtcgccctcgccctgggcgatgtcctgcatggcacggcccatcaggtgcagcggctgcatcagcaggcggatcagtag

SEQ ID NO: 346669 - DNA, 2727 bp, Pseudomonas aeruginosa
atgtcgacagattccccgctgcgcaccaccgcttcgacctgctgctactgcggcgtgggttgtggcgtcctgatcgaacacgacggcgaacgcatcctcggcgtgcaaggcgatccgcggcacccggccaacttcggcagactctgcagcaaaggcgccagcctgcacctgaccggcgacctccaggcccgcgcgctgtacccccaactgcgcctcggcaagcaactggcgcgggctcgcagcgactgggagagtgccctggaacatgccgccgggcgtttcgccgagaccattcgcgaacacgggccggacagcgtggccttctatatctccggccagttgctgaccgaggactactacgccttcaacaagctggcgcgggccctggtcggcaccaacaacatcgacagcaattcgcgcctgtgcatgtcctcggcggtggtcggctacaagcgcagcctgggcgccgacgcaccgccgtgcagctacgaagacctcgactgcgccgattgcgtgctgatcgccggcagcaacatggccttcgcccacccggtcctgttccgtcgcctggaagccgccaaggccgctcggccggagatgcgcatcgtggtgatcgacccgcggcgcaccgacacctgcgagctggccgacctgcacctggcgctgctgcccggtaccgacgtcgcactgttccacggcatcctgcatatcctgctctgggaggactggatcgaccgttcgttcatcgccgagcataccgagggtttcgccgacctgaaggaactggtgcgcgactacaccccggccgccgtcgccgacatctgcggcatcgaccgcgccgacctgcagcgctgcgctgaatggatcggccgttcgccgcgcttcctttcgctctggtgcatggggctcaaccagtccagcgccggcagcgccaagaacagcgcactgatcaacctgcacctggccaccggcaagatcggccgcgccggatgcggaccgttttccctcaccggccagccgaacgccatgggcggtcgcgagaccggcagcctggccaccctgctgcccggccaccgcgaagccgccgatcccggccatcgcgccgaggtggcgcactactggggtgtggaacagttgcccacgtcccccggtctcagcgccatcgagctgttcgatgcggtccacgacggccggatcaaggcgctctggatcgcctgtaccaaccccgcgcaatcgctgccggaccagcgcaagatccacgaggcccttgcccgctgtcccttcgtggtggtccaggaagccttcgccggcacggaaacctgccaatacgccgaccttttgcttccagccgcatcctggggagaaaaggaaggctccgtgaccaattcggaacggcgggtcagtcatgtccgtcgggccgttccgccccccggggaagcacgccaggactggaacatcgtctgcgacttcgcgcgccgcctggaagggcacctgcgacccgctaaacccggcctgttcgcctttgccgacagccgcagcctgttcgacgaatacaagctgcttaccgccggccgcgacctcgatctttccggcctcagctacgcactgctcgaccgcctggggccgcagcaatggccatttcccagtggcgcggagcacggcaccgcacggctctatgcagacggccgcttccctaccgcctcgggacgcgcgcaactggtcgccgaaccctaccgcgccgcccaggaaaaacgtgacgcgcgctacccgctgaccctcaataccggacgcttgcgcgaccagtggcacggcatgagccggaccggcacctgcgcacgcctgttcggccatgaagaggaggccctggtgcacctgcatcccgaggaactgcgccgccgccaactgcgggacgggcagctcgtgcgcctgaagagccggcgtggcgccctgatcctgccagtgagtgcagacgactcggtgcgccccggccaggccttcctgccgatgcactggggcgatcgcttcctcaagggcctgggctgcaatgtcctgaccctgccggcgttcgaccccctgtcgaaacaacccgaactcaagcacgccggggttcaggtcgaatccgtcgaactgccctggcgcctgttcgcgctggtggaaaccgatatccaggcgcgtttcgaggccctccgtgcgctgtgcgaagtcttcgaccacgccagcttcagtctcgccggacgcgagcgccccgccctgctggtcagcgccgcacaccatgaggcacctggcgcagacctgctggagcggatagatcgccaactcgaattgctcgacgggccgatcctcgcctacgacgacccacggcgcgccatcggcaagcgcgtgcgcctcgaagacgggcgcatcgtcgccgtccggctcgccggcgaaaccctcgcccgcgactggttgaaagaactctggcttaccggccgggccgatagcgagctacgccgctggctgctcgccccactcggcgcggcaccgggacgacccagccagggtgcgggcggcaagaccctgtgcagttgccagaacgtcagccagcaaacggtgctcggcggcatcgcccgcggattggacctggacggattgaagcgcgagttcggctgcggcaccggctgcggctcctgcgtaccggaaatcaagagactgctggcggccccccggcccatggcggcgaatgcctga

SEQ ID NO: 346670 - DNA, 813 bp, Pseudomonas aeruginosa; identical to SEQ ID NO: 346607

SEQ ID NO: 346671 - DNA, 1353 bp, Pseudomonas aeruginosa
atggaggatgcgctgcaagcgctgtccgaaatgctggctgcttatgccagccaggaactttacgaaatcgacccagatgcaacgcatctccaagcaggtcgtgaacttcgtgaatggatcaagcggcgtctggtcgtagaacgagaggggcgtatctatgcaaccgacgcgttggagtccgccatccagttcgtcgattcgctggatagtcggatcatgacttccacggcatctcgcctttcggtggttcagcgcgagatcgaaaacctggaaacgggtctgaaccccagcccaactggccgtattgccagcctgcgccgccgaatacaggatttggagcacgagctagcgcaggtagaggctggcaacgtcatcgtgcttgatgaagcgcaggcgatagagggcatacgcgaggtatataacctggccaccagcctacgcgcggactttcgacgagttgaagactcttggcgcgaggcggatcgcgcccttcgatactcgatcatcagcgagcagtctcaccgtggagaaatcgtcgatcggttgttggacgggcaagatgctctactcaacactcccgaggggcgtgtcttcgaaagcttccagcagcaactgaggcagtccgctgagctggaaaccatgcgtgagcgtttgcgcaccatccttcgtcatccagcggttccaaaggcactgaatcgtccccagcaacgtgagctacgttggctggcgttacgcctggttcgggagtcgcaggctgtgctccaagcgcgcgcccgaagcgagcgcgatgttcgtggcttcatgaagacggggctggccgccgagcatcatcgcgtcggacagttactcaacgacttcttcaatctagcgctcagcgtcgactggcaacgccagtcagaacgccgtaagcctgcatgtttaccaccagttggcgtagccattaccggtatcccggcaatcgagcgtctccgcttcaagaccctggatgacgatgatacgggcgagctggatctgagtttgaagccagcggggttggagcagattgatgatgacttctgggatgccttcgacgggctggatcgtgaagcgctgattcaggacaccctagctgtgctggcggagcaggggcgccctgtgagtctcggggagcttgcgtctttgcttccacctgctcacgacctagaaacctttgcgctctggttggcgatggcacgcgaggcaggtattgaggtgctgaaagaggagcgtcagctcgtggagctagttgacgaggatgagcaacgctggcgcttcaatctgccttatgtcggactcgaccacgaggcactcaaggacatcgattgggagttgtga

SEQ ID NO: 346672 - DNA, 750 bp, Pseudomonas aeruginosa
atggcagggatcttcgatcgaattgcaggcgcctctggcgccgacgaaacggagctgacggtggagcccatagcgttggatgacggcatggatgatgaacagcctcttatgagcgccgctgttcaggtcgatgagcgccggacgccgcaacgggtacgtgaggccgtacaggaaatgctcaagtacgggctgctggaagaaagtcacaagcccaatctgtatcgctcggcgcttgccaatatcgaggcggtcgacacaatcctggaacccctcgacctggccatgggggtcgacgaggttcgcgggctggtgttcgtcaccgttcgtcagggcgaggtggccgagcaggatgactggtcgcacccccttgtgcgcaggcaaaggctgaacctggagcagtccctgctgatcgccattctgcgccagcatttcatcgcctacgaacaggaaagcggtacgggcgccactcaggcactggtagctgttgatgagctgattccgcaattgcaggtttacctgggcgagctgggcagtgaggcgaaggagcgcaatcgcgtcatcacgctgctggatcagctcaaggggcatggtttggtgtcggctctggacgcccatgaccgcgtcatcatccgccccatcattacccacttggccaacccggagaacctgcaggcactggtggtttggctgcgcgagcaggtggagggcgcgactaccccggctgccgctgctgaggaggacgaggcgtga

SEQ ID NO: 346673 - DNA, 1599 bp, Pseudomonas aeruginosa
atgcgaccacgctctgccctgcgctacagcctgctgctactcgccttcgccgccagcgccgccatccaggcccagccgaagaccctggcggtgtgcaccgaagcggcgccggaagggttcgatccggcccgctatacctccggctacaccttcgacgcctcagcccatccgctgtacaacgcgctggccgcgttcgctccgggcagcgccacggtgatcccggccctggcggaaagctgggacgtctccgctgacggcctcgtctacaccttccgcctgcgccagggcgtgaaattccacagcaccgactacttcaagccaagccgcgaattcaacgccgacgacgtgctgttcagcttccagcgcatgctcgatccgcagcaccccgcccacgacctttcgcccagcggctacccctacgccgacgccatgcaactgcgcgacatcatcgagcgcatcgagaagatcgacgagcaccaggtgcgcttcgtcctcaagcacccggaggcgccgttcctcgccgacctggccatgccgttcggctcgatcctctccgccgaatatgccggccaactgatcgccaggggcaagggcgacgaactcaacagcaagccgatcggcaccggcccgttcgtcttcacccgctaccgcaaggatgcccaggtgcgctacgcggccaaccccgactactggaagggtaagccggccatcgaccacctggtgctggcgatcaccctcgatcccaacgtgcgcgtgcagcgcctgcgccgcaacgaatgccagatcgccctgacgcccaagccggaagacgtcgccgcgttgcgccaggacccgcaactgacggtgctggaagaagcggcgatgatcacctcccacgccgcgatcaacacccggcacgaaccgttcgacgacccgcgcgtgcgccgggcgatcgccatgggcttcaacaagtcgtcctacctgaagatcgtcttcggcgaccaggcccgcccggccatcggcccctacccgccgatgctgctcggctacgacgacagcatccgcgactggccctacgaccccgaacgagccaaggccctgctgaaggaagccggcgtcgccccggacacacccctgaacctctacatcagcaccggcagcggccccggcggcaacccggcgcgagtggcgcaactgatccagtccgacctggccgccatcggcatccgggtgaacatccaccagttcgagtggggcgagatggtcaagcgtaccaaggccggcgaacacgacatgatgctctacagctggatcggcgataacggcgacccggacaacttcctcacccacaacctcggctgtgcctcggtggagtccggggaaaatcgcgcgcgctggtgcgacaagggcttcgacgaagccatccgcaaggcgcgcatgagcaacgacgagagccaacgggtagcgttgtacaaggaagcgcagcgaatcttccacgagcagatgccctggttgccgctggcgcatccgttgatgttcgacgcgcaacgcaagaacgtcagcggctaccgcatgagcccgatgtcggcgcgggacttttcgcgggtgaagctggactga

SEQ ID NO: 346674 - DNA, 915 bp, Pseudomonas aeruginosa
  misc_feature (238)..(238): n is a, c, g, or t
atgcaggacggcgcagagcgctgcaccggcgaacgcgcacggatcacgcccgcctggttctggctttgcacgtttgaggtcttctacttcaccggcatccggttgaatgcgctgttgtgcatccgcaagcgcgacatcgactgggaaaatcaactgatcctcatccgcggcgagacagagaagactcacaaagagttcgtagtgccaataacggaggggcttgtgcctcacctatcgnggctcctgcaagaggccgatagagccggattcgccgatgacgaccagttgttcaacgtcaaccggttctcaccgcactacaagagcaaggtgatgaactccgaccaggtcgaagccatgtaccggaagttgaccgagaaggttggggtgcggatgaccccgcaccgtttccggcacaccctggccaccgacttgatgaaggcacccgagcggaacattcacctcacgaagtgcctgctcaaccactcgaatatccagaccacgatgagctacatcgaggccgactacgatcacatgcgtgccgtgctgcatgctagaagcctggcccaaggcgcgctggagaatgtcaggaaggtggattacagcggctccccgcaagcctctgccaaaccgaagccatgcgggcaacctctcgctcgagtgagtgaagcgccgccaccggaggccaggacagagcctgcagaaccaagggagcacacgccagggacaggcattcagggaggtccaaccgcgtgggaagcagcgctaccacagccacctgacaccttcgaaccaagcgtgctgttcactctgatggctcaaaacttatcgaaccgtgccgcctcggcatccgcggctcccgctgcaacaagcggatcaggcggatggggatctgccgcccgaagcaatctcgcctag

SEQ ID NO: 346675 - DNA, 687 bp, Pseudomonas aeruginosa
atggataagtgcagttattgcgcagagttttccggggatgtggataacagctactacctaaaaaatgtcatgcccaacattggggtgagtaggttgagactggaaagcctatatttttacattttccccagtgtcgggtctctgatctctggccatttacttattgttcctaaaaggcattatacagcttttagtatggctaacaaaaatgagattgccgaacttgaattagtgatcagtgatttgcaggcaatctataagtccgtactgaattcggcttctattttttactttgagcatggtatattggatgttgataggtctttaatcaactgtgttgatcatgctcacttacacatacttccagcagccattgatgcgagctgcttggaatttaagaatgcgagttttttaagtgtttctgacttgccaggcatagaaacttccacgcctgattacattttctttggagatcccaataagtcttacatatcttttgatcaagataagcatgctcagtatcttcgtaaagctgtacacgaacaacttaaattgcaaaatcactggaactggcgaagtgactcacaggccgctaatattaagtcttggctagactgcatggataactttattatggggcaatctgaagagaaaaggtttaatgctatacggttttgtagtaaatag

SEQ ID NO: 346676 - DNA, 1737 bp, Pseudomonas aeruginosa
atgttactaactctcgaaagcaagatgcaagaactttataggaatagggttatatatgacggccaggaaggttggtatcgagagctaagatcaaacaagacaattggaattgttgcaacagcgcatgtattgattgcgcttagggaaaatggattcgaccttggaaagctataccgagcgctaaacacgctggtatcatttgcacttccagatggaagttttcctttcgtgtctaacgtcaataaagttggcgtggttgacgcgaccgcctggtcctgtcttgctctttcaaagtgcaataccgagatggtcaactttgacgaaaccatcaacaacgcattgacatggctggttggctctcaaaatgatgacggcgggtgggggcttatcaaaaatagtccttcaagagtagtaagtacgaccgttgcattgagggcgatttcgagcgtaagctcaagaacttcggagctcgacactgttcttcatcgtggtgttaggtatgtattgggaagcgctatgcagtcgggcggctggcccgatctaaatggtagagagtgcttgggctctacggcatatgctttaattttactgtccgagactgagtatagaagctctagtattgtttcaaaggctatcgattttgctctgcgtgccattggagatgctacctcatgggataagtgtttgaatcgtgaagaggtctctgtgagtgaagagggtagtcctagaagaataactttccattaccctctgacgcacttattcgtgcgcgccatcgttactaatgaccatgcgaaaaagctccctagcaaaattgttgaggaatacgtcaaaagagcaactggtggaagtcattttgtcggcgataccactgattatggcaaagagaccagctatggtgcccacgacaccattatggcaattgcggagcttaataaaaaaactgaatattttgcgtcgttcataaaaagttattataaatatgacgatataaatcccgcaaaataccctcagctgtatcaggtgtcagaagatcaccattcagaaattgatgtggtatttgttcatgggttaggaggagatgcaaggcaaacttggctcaacggaaacactgggttttaccttccaactaaaatgtccgaagaaactaagacaagagtattttcgctgggatatgcaaatccaccagtgcgagtgatggggaaggggatgtctcttgaagacaggactaataatcttcttcaccttctcgagaataatgatattttcaagagaaaaactgtacttataggtcacagctttggtggtcttataacaaagaaaattctcctttcgcttaagctgcggagtaatcaagatagcttcagaaatatagttggggttgtttttctagctacgcctcatatcggatcaaggcttgctaacttcttgtccctttcacagtttctcttaagtcccgattcagtaaaagatttgttttataacaataaagaattgactatcctgaatcgtgactatcacaaacttgctacggatcacaaaatttctcacaggagttatggggagaactcgaactttacaatagtcaacaaaagatcatcgaatccaaacttgccaaactgcgaccatattttggtcgatgcatcccacacagaaatttgtaaaccgtctgataaaacggtagttctattcaagtctatctgtgattttgttaaaggaatagctgtacatggataa

SEQ ID NO: 346677 - DNA, 1047 bp, Pseudomonas aeruginosa
atgtttattgtgattgaaggcattgatggtacaggtaaagcaacacagttatccttacttaaggagagatttgcagctctcgggaatactgtagatacgtatgattttccagcgtatgattcttttataggtaaagagctagggcaattactagcagggcatgacaaggatataaatgctaaaagccttccagggaagctgatggcaatgctttttagcctagataggatgcagttcgttgagaaaattaaagcatctatagcttcaggtcatattgttatttcaaatcgatacagcttgtcgaatgccacttttcagagtatacgcagcggcgaagatatttcatcgtgggtgtatgaaatggaacacggtgcattgggtctccctaagccggacttatacattgtgctaaaaggtagtatgacaagtgctcatgaaaatgttagttcgaaaggaaaacgaaattatgtagacgggcatgatgtttacgaacaagacttagatctgctgaagaaagctcaggatatgtattgtacgttggatacaggcggcgttcctaaatttataattaattgtatggatggcgacaaatttaaggcaaaagacgatatcgccgacgagattattaaatgcatagaccaagctagtaccaacaagcacaaccttgttcaaaaatcgtgtattcgagagcatattcaaaaatgtatctctgccagaattttggatatcgatgaggtgctcgagtatactaaggctctaccagcagagcagctagatgctttgagaaatttagctaaaaacttaaaggaaagcgaaacagggaaaatgatcggtgtgcttcaatctgcgaacgattcgttgccgaatattgttgcctcatcctatttgtttgcatgcagcaatgcgaagagatatatttctttgatgtttgagactacgaacgaaataaaaaagtcagccataaaagagtactgcgcaaggctagatacgacacaagactctgttgtgcccatggatagatatttcagacaagtgattggtgaataa

SEQ ID NO: 346678 - DNA, 210 bp, Pseudomonas aeruginosa
atgattgaacaactgaaggccgtgctggaggaacagcgcgttcgccagcatcagctcgccaatctcaactacaccggccgcattgcaggcgagttgcatgcccacgcccgcgaactgtgcgacgccttggaactggcaattgcaaatgcccagtgcctggaagcgcgcaagtccgaagaggccgagctgcacgcccgcttcgcgcaataa

SEQ ID NO: 346679 - DNA, 192 bp, Pseudomonas aeruginosa
atggccctggagggcaagacgatgttcagttcacggccgcgagcgacctgcgcctacatcttgcaaatcatggccgactaccgggtcggcgccatcagagtgccggcggcaagggcggattccatagagcgtttcgctatgtggcgccgacgcctcgctggatgcatcgatagcgcccagccgctgtcataa

SEQ ID NO: 346680 - DNA, 630 bp, Pseudomonas aeruginosa
atgcctatcactgagcagcaactgctgcaaatcctcccgaacgccggccctcgagccggcgtttttgttggtgcgctgaaccgcgggatgacgcgcttcggtatcacgtcgcctgtgcgagtcgccgcgttcctcgcccaagttggccacgaaagcagccaactgacccacctggtggagaacctcaactacagcgcccgcggcctggctacgacctggccgagccggtacctcggcgccgacggccagcccaaccccctggcgcagcgcctggcgcgcaacccccgagccatcgccaacaacgcctacgcctcgcgcaacggcaatggcgacgaggcgtccggtgacggctggcggtaccgcgggcgcgggctgttacaggtcaccggccgggcgaactaccgcgccgccggcgccgggctgggccagccgctggagcaggaacccgagcttctcgagcaaccggagtgggcggcgatctcggcggcctggtggtgggccagtcacggcttgaacgaactggccgaccgcggcgagttcgccgccatcactcggcgcatcaacggtggtctcaacggccaggcggagcgcctggcgttgtgggagcgcgcaaaggcggtgctgtcttga

SEQ ID NO: 346681 - DNA, 618 bp, Pseudomonas aeruginosa
atgaagatcactgccgatcaactcgaccgcgctaccggctgcggcgccgctactgcatcgacctgggtcgagcacatcaacggcgccatggctcggttcgagatcaacacggctgagcgggtggcgatgttcctggctcaggtcgagcacgaaagccagagcctcaagcgtctggtcgagaatctgaactactccgctgaaggcctgctcaagacatggccgaagcggttcacgccagccgaggcgaagcagtacgcacgacagcccgagcgcatcgcgaaccgcgtctacgcaaaccgcatgggcaacgggtcgccggatacgggcgatgggtatcgataccgggggcgcggcctgatcatgattacgggccgcgacaactacgccgaagccggccgcgccctggcgctgccactggtggcgcagcctgaactgctggagcaacggacctgggcagcaatcgccgcggggtggttctggcagtcgcggggtttaaacgacctggcggaccaaggccgattcgagcggatcactatgaagatcaacggcggctacaacggtgctgaggatcgagtggcgcgtctcgaatgggcgcgtgctgcgctcaagggggaatga

SEQ ID NO: 346682 - DNA, 333 bp, Pseudomonas aeruginosa
atgaagatgcctgacaaacccgacacttgggcggctgtgctcgcctggctgagccagcatgcgccgatcatctacgcctccctgctgtcgtgggccatggccatggccaggatcatctacggcggcggcacgcgccggcaggcgctcttggagggcgcgctgtgcgggggcctggcgctgacgattatcagcggcttcgagttcttcggagtgccgcagagcatggccaccttcattggtggctggatcggcttcctgggcgtcgagaagatccgagacctggccgaccgttatgctgggatcaggctgccgcgtcgagggtctggcgaatga

SEQ ID NO: 346683 - DNA, 1053 bp, Pseudomonas aeruginosa
atgcaaattgaacgagatggctgcgtgactttcggcgatgccaccctgagcatctgggaggaaggccttggtggcacatgggttgagcgccaggcgtgggagcgccagttcaagcgcgacgtcttcagtcgcatcgtgcagaccttgaatcgcctgggctacaccgtaggcccaaacaactacatcttcaccgacaacaacaaccgctatgcccgcaagggagacctgcgcgccgacctgaaattgtcgggccgatccatcaggcttgagttcttccagaacgtgaatgctcccgatcgagcagaccacggagggcgctaccaatccgacaaggaattccacatgccgtacctgatgcggctggaaatggagcgcacccgccggcgcattcgggactacctctgcaacgtgttcaccggctaccggttcgagcagaagaacagtgggcgcggtagcaagtgtggcgtgaatggtctgaccgcactggagttcgtccaagcctgctacgactattcgtgccacttcaagggcgacctgaccaagtgcgagatctccgactacaacaacaagtcggcggacaagctacggatcacccacggcgcacgtgtctggaccaccgactaccggggccggatcatcaccggaaccgccatgtacaacatcaacaacatgtggtgggtcgtgtgcggcaagtatgcagtcttcaacaaggccagctccgaaatttgggtgaacaatcccggcgaacttcgccgcaagcggaacgagctgacccgccgcaagcgcctggagtccgagctagccagggccacgaagcagatgaacttccggcgcgccgaggtgctgcgagacattctctggccgaaggatgaggcgctgtacctgctctggcacaaggagcataaggcctatcaccgcacaggcttctccggctactcctcgaataccgtcgacgccgggcgcttcacccgctccgagttgaatggctgggtgaaggacggcgctatggaagacgaccgccaccgcctcgtccccattgaggccgccgcatga

SEQ ID NO: 346684 - DNA, 438 bp, Pseudomonas aeruginosa
atgagtgaggtggagcggttcaacgaatacacctggggcgttactgaggatgagcacggggagttcgtcagatatgccgactacgccaagctagaagccgaggcccaggcgctaagggaggaagtcgcagcactgcgcgcaagggtggtggttttgccggagccgttgaacgaaggccctgctcgacgagaatgcggggagtacggagcggccatgcagcgtggatacaacgcatgcctgcgcgaactggcgcgcatcaacggcctgacggtcagcgaatcagcgctcgacacgctgcgaaaggccgcgtcaggagaggtcaagcacctgaacaacggactgtgccctgatgacattgaggggcacgaagcgcgcgatccggactgcccggtatgcagagcgctgatcgagacgggaaaggagagcgacaatgtctga

SEQ ID NO: 346685 - DNA, 1107 bp, Pseudomonas aeruginosa
atggctttggcagatgagattcaggcagcgcggaaaaaagtaatcactgatgggtacgagatgtctatcggggagattattaacctttataaaaatgaagaattagtgatcgatccggtttttcagcggctctatcgctgggatgacgaacgcaaaactcggtttattgagtccctcattctggggattccaattccaccacttttcgtatatcaggatgagaacggagtatgggagttgatcgacggattgcagcgtctctcgactgtgctgcaactcactggtgaccttaagggcgagcgtgccgatgatttaggggtgctaattctcaatggcactcgatttataccaagcctaaatggaaagcggtggaaagagtcggccaaagatgccggcgatggaataagtcaatctctgcagcttgagatcaagcgcgcgcgcgtaagagtggagatactcaagtctgatagcgatgtttcagcgaagtttgagttgtttcaacggctcaatacgggtggtgttagtctaacagagcaggaagttagaaacagcattgcggttgcgttgaatcgtgatttctacaactggctaatcgagcagtcgagaaatgaagcgttcatcgaaactaccgatcaaaccgaatctgctttggagtcgcaggctggggttgaattggcgttacgtttttttgccttccggaatgttccttacactccgggtgtagacgttcatgagtatcttgatgatgctttgatgaagatggcaacagaaaaaactttcgacatgaatgttgagggggaggtctttgccagtacattcaagtttctttcggatgctctcggtgctacggcatttaagcgatggaatggaaatgggttttccggaaaattcttaatgtccgtgttcgaggtaatgtcgacgggggtctcgcataacttagatgcactcaatcagcttgcgccacagcagagaaacgatttcctccaacaggctgcaagagaactttggggtaacccgatgttcaaccaaaactcgggagctggggttaggggtactacgcggctatcacgattgctgccaattgctgctaatttattgaagccgtga

SEQ ID NO: 346686 - DNA, 657 bp, Pseudomonas aeruginosa
atgccagatatacgcactttagaccaattgcaggatgctctggatttggagatgggctggcgagtgaaggagatcgcggccttcagggttgcctcaaagggtgacggcccagagagaaaattctttatacgagcaggggtggcactcgtttatgcgcattgggaggggttcataaaggcttcgtccgagcagtatttgaattttgtccaccatagaggcctcacgtaccgcgagttgaagagctgctttgcggtttttggtctaaaaggtaagttgcaaatgttgtccgactctcggaagtccggtccaaacataaaggcatttgacttcattatttctgagttgggggagcctgcgcacatgcagatgtcttcagctataaataccgagtcgaaccttacgtctaaggtttttgccaatattgccatctcacttgatctcgatatagaaagatattcaacgaaatttaatcttatcgatgaaagtcttgtgggtaggcgtaataaggtggctcatggtgagtatatggacataggggggagggagttcggagagcttgtcgatgaggtgcttcaattgatgcgcgattacaagacagacctgcttaactctgcttcgactgagggctacaaaagggctgcgccgcttgtaatctga

SEQ ID NO: 346687 - DNA, 264 bp, Pseudomonas aeruginosa
atgaaaattgagaaaattaaaaccaccggccatgtgactactcttaacgggttaccgggaatgtcctcgcaggagatcgcagagatcaccgggaagcgacataaaaacattctgcgcgacatccaaaagatgatggtagagatcggctcaaatatgagccaatgtcaggttgtggatacttgggctccagatagctatgggcgccttcaaccactgaccatccttgataaggaacttacattcaccctgttgtctcgctactag

SEQ ID NO: 346688 - DNA, 471 bp, Pseudomonas aeruginosa
atgacgattacagccaattccactcatgacgaagctctagcccacaccatcagcctactcaatgaattacgctatgcgcttgacctaattcgagccgagacagagcgagaagaattagcgtccgctgtgcaaaacacgaagggacactttgcagctctgcgtgaggagttggaggacaccattgcccatcgcggcggacagaagctggcaaggctggctgaagagcttgaacacggatatggcgttgtggacgacgacgaggtcttcacgattggcgagcttcgggacatggcgaaggcctcccctcgggcccttgatagctcttatcggtcaattcatgaagcatggaagacgcacgcaacttctgatcagcttgagcagtatctggactccacagccaccaaaacatcatttgaatggcaggtgaaacacaccctgctggcctacttcgacgaagcgaaagcacgctaa

SEQ ID NO: 346689 - DNA, 774 bp, Pseudomonas aeruginosa
atgaataaaggtagagaaagatacctgctagaacttttcattcaagagctaagggaagatatagaggtcattgacgatcagggcgaagaacccgactttatagttcgtagcactaaaggcattgtcggaatagaggtttcagaaatttttgtcccagcaacaccggacgggcttattttacagcaagaagaaggcttggccgaagatgttctaaaaaagacgcacaaaatatgcaaggaaaaaggtgcgcctcctgtatctttaaaaattctatttcaaaaacatgtaaactggaagttaataaatcggaaaaagctagcagaaaatatagctcttttccttgaggagccggagttttctttagaaaactatgaatggataaatggccggtttggaaaatacaacaaggatctatatccactggtatcgttaaggtcgcacccggcactaagctgggaaaaggcaatttggttaaatgttggcagcttgacgggatgggtgcataaatataagagcgcgcccttccaagattgcatagatcaaaaaagcaaaagactaaaaagctatagagctagagctaaagaaaactggctgctaatggtaactaacggagtggcatcccagtttattgatccgccagaaccagaacagcccctcaatctaagcagcccatttgaaaggacattctgttattggagatttaggtctcatctaagagagctagcgaatgatgtcgaaaaagtgtcgaaatcactggctaacaatggccagtaa

SEQ ID NO: 346690 - DNA, 768 bp, Pseudomonas aeruginosa
atgggattagtccttataataccgctgctagtcagcggttttttagtttaccaccatcatcccgtacatttttataaactgcatcgccatgaaggccaatatctttacatacaatgcgcccgccttggcttatacagccttataatatctttcttaatttgcaccatcctccaccacctcctaacctattatagaattggcgacttcgacctagaaaaaataaaccttttttcatggacggccaaacacctagctaacattgggattgttaaaaaagaggagtctacgacttacgcactcttcatatgggccatcattctctctctatggccaataccacacatttggggtggcttgacccgcattttcttcttcgaactaagactaggtgcaaagaacgctacacaaacaaaagtcgcagcaatggcacaaatattcaaagacagtccacttgatgactttctttttaaatcagccatcaataaagacaccgtcatgctgcacatggatgatcgaaaagtatatgttggctttattacaaccatgggcgaaccgaatgagacccaaggtgcagatcaagaaatagccataaaacccgttatgagcgggtaccgagacaaggacaccttgacagtaacctttactacccagtacagagaagtaggagcagatgtcactcttatcctacgtcaagaagagatcatctccgccacaaaatttgattcatctgtatacgaaaaattccaagcttcgaaaccccgtaattag

SEQ ID NO: 346691 - DNA, 495 bp, Pseudomonas aeruginosa
atggaagagtcgcaaccaaattcaccttggtacgagattgcccagaaagacttagcagaccccgtctttactaatttcagttggaatggcaggactacagattggttccttcaggagttagtgggtaacgtgaatcgctatccggaggcgcggttgagcatcacgctcttcaccatgagcggcatgctatccggcaccttaataagtgcagaggaatattttcaactgttcgctgacagtttctgccaagggtgggagtctgaagaaaaaaaagctactgctcgaagctacttcctcagtttaagtccgtcccgcagcaaagacgaggcatcctcattgactgaggatgcaccatctcaatacatccatctaaagaacgccaaacatttctcccccacaggagaagttccaaataacgacggcttactctggcgcgggactatcgcttctatttccggattttctttagggcagttacagcgcgttcagacatag

SEQ ID NO: 346692 - DNA, 411 bp, Pseudomonas aeruginosa
atgcacctggcgggggaggcaaacgagctataccaatgcggggtgatagggctacaagacaggcacaacatggtcaccgacgccctcggcatgtactcatgggcgatcgagcacagcatcacgcgcgagacgcactacagcgcggactgctgctacgacgtgctcgacggcgacagtgttgccgggacggtgaacaacgaggggatctaccacgaccctgaacccgggcggcagcggctgggctgcatcagcctggatccactggatggaatgacctatctgcgcctgggccaggcgcttgagcgtgccggcattgtgcgcggcctcgtgatcgaactcgacgccggcggcacgctgctgctcctcgaacagatacccgatgacttccggccactgcggtgggacacctga

SEQ ID NO: 346693 - DNA, 786 bp, Pseudomonas aeruginosa
atgagccagaagacccaacacgacagcatgcccgacgccgaggcggtcgaccttccagagatcagcgtggagcactccaccgagtttctgaccggttccgcaccgtgcgccggcgtatcccgaccactgcccgccgcctggctaggccagcgcggcatctaccgctccagactcgaagccgtctgcaacggcgagcagttggtggacccgctgacgctgggggagttgatcccgcacgcctggcgctacctcttccttacccgtcgcgccggcctggggctaaagccagctcgacagccgctgaccagcaccaccaagacgccggaagccaccgacaccgcatttgatcagatgattgcagaagaaccaaggagcaagggcatgaccgcttttcgcgaaatcacgcttgcgcaggccagggcggaggagctggagcgcaccctacaggccaaggtcaaggctgccgaccatggttcatcgcatattaccgtcatgcacgccatcgagaaggcgcacgaaactctcgcaggaaccgccccggtcgcccaggctgggcaggtgcgggatcgctaccgcctgaacttcatactcagcaaacatcgtcaggtgatcgtcgaggtactgccaggcaactggaaggacgtctacgtcgagcaaggatgcatgggcgaggtgaaatacccagctgtcactgtgtgcggcgatatcagtacagagaaactgctggaagtgaagcgtcgcgccatcgacctagctatgcagagaggtgacgccaatggcagttga

SEQ ID NO: 346694 - DNA, 207 bp, Pseudomonas aeruginosa
atggcagttgaactggagcgctatctgcgtgaggagcaagtgctgcagtacaccaccctatcccacgcaaccatgtggcgcgaaatcaaggcgggccgctttcccaagcagatacgtctatcccctggccgcgtcggctggaaagcctcagagatcagccaatggatgaccgaccctgaagcatatgcaaaaaccaaggcggcctag

SEQ ID NO: 346695 - DNA, 621 bp, Pseudomonas aeruginosa
atgtctgatttatggaagaccttatgctttgttcttgtagtggttctagttgttctgctgcttgtgatattttttgttcttattaacgttggggctgagggagaactcttaagcgctgcaaatcaagttggttcgattttgggcggtttgggaggcattggtgcggcagtttgtgcaggatttggagtctctgtatggcgccagcaaatcctcacgagcaggcgagtccagcatattttagatgctcaggtttccattaggaaatacctgctggctctaaggcaagtgaacttgtatgtgaaattgcttgcagagacgggtattggcggctatgcagagaaggctttgccagctcaggttgacgcagctatcgcaatgcaattggagtgcatgaatagttgtgctgtggtggatgtaatagttgagaatggggcgtggatatggtctccccaactgggtgaagcagcggaggcttgggttgcttaccacggaagaacgctagcagatgcgcaagccaaaaagaagtttgatggttctgattggttcaaaatcgaaaaaggtctaaccgcgattagcgaggcgctagggaagctgttagacaaacataccaaaggcggctag

SEQ ID NO: 346696 - DNA, 372 bp, Pseudomonas aeruginosa
atgccgcgactggaaccgggaatggcgcgaatccgcgtcaaggacctgcgcctgcgcaccttcatcgggatcaaggaggaggaaatcctcaacaagcaggacgtgctgatcaacctgaccatcctctacccggccgcggacgccgtggaggtcaacgacatcgagcacgcgctgaactaccgcaccatcaccaaggcgatcatccgccacgtcgaggagaaccgcttcgccctgctcgaacggatgacccaggaaatcctcgacctggtgatggagaacccggcggtgcgctacgccgaggtggaagtggacaagccgcacgcgctgcgcttcgccgagtcggtctcgatcaccctcgccggccatcgctga

SEQ ID NO: 346697 - DNA, 564 bp, Pseudomonas aeruginosa
gtgtttgactacgccctcaacttaagctggcactacccgatactcttgccattgcttgagaagatcgatgtgacctcggaatactatgacaccgacctggtggttgaaaaattcgacaagatcctcgaagtgaatgctttgcaccgtcgctcagatggtatgtgctgggctttgtattacttgaagcaactgaaatcctatccgtcacccgaaaacattgctctagtgatcgagagcggtgacgccgctgcgattacattgttaagcggcttcgatgctggtgtagatgctgcggtagcctttgcgaacgagttagttcaaagcagcacgctctatgaactcgaccagtattggatactgctctatcaactgttctttcacgacagaatcggcaacccttatgaggacgaacccaccttcgaaattttgaagaagtacgacgtccagttcgtaaaccctccagctcgtcagtccaaggccgaagactattgcttccacttctcacatccctttattaaaaaggaggacaggcttagttttcaggactacctggagaagaactga

SEQ ID NO: 346698 - DNA, 2523 bp, Pseudomonas aeruginosa
atgatccagctgcccatcgatgccgccatcccctctctgcgccaggccctgacaggccacgactccgtcgtattacaagcgccgcctggtgccggaaagaccacacgcgttcccctcgcgctgctgaacgagtcatggttggccgatcagggcatcctgatgctccagcctcgccgggtggctgcacgtgccgctgctgagcggatggccagtgagctgggcgagaaggtgggtgagaccgttggttaccgtattcgcctggagagtcgggtcggcccgagtacgcggatcgaggtcgtcactgaagggatccttgcgcgccggctccaggatgacccttcgctggagggggttggtctcgtcatattcgatgaattccaccttcggagcttggactctgatttggccctcgcgctatgcctgaatggccgtgagctgttccgtgatgaccagccactgaagcttctagtgatgtcggcgaccttggaaggcgcgcgcctttcgagtctcctggaggatgctccggtcgtgaccagtgagggacggatgttccccgtcgacactgtatggggtcagccctaccagactggtgagtacatcgagcccaaggttgtccgagcctgccttgatgctgtccacgatcaacaaggcagcattctggtcttcctgcccggccaggccgaaatccgccgcgtgcatcaggagctcagcgacaaactcgcggggcgtgatgaccttctgttgtgtgccctgcatggcgagctggatctgagtgcccagcgcgcggctatcgaaccggcgccaccgggcaagcgcaagatcgtgctggcgacgaacattgctgagacgagcttgaccattgagggtgtgcgcgtagtgatcgactccggtctggagcgggtgccacggtttgacccgtcaagcggaatgacccgcctcgcgacacaacgcatatcccaggccagtgccgctcagcgtgctggccgtgctggtcgcttggagccgggcatttgttatcggctttggtctcaaactcaacatgagcagatggcggcctatggcgccccggaaattcaccaggccgacttggcggctctggcgctgcaattggcgcgctggggtgttacgcctgatcaattgagatggctcgatatgccacccgcagctccctttacccaggcgcgagatctgttgggccggttgggggctttggaggcggatggtcgtttgagttcgcatggccaggcgatggcagaggtgcctgcgcatccgcgtattgctcacttgctgctgcgtgggcatgcgcttgggctcggggcgctcgcttgcgatgtggcggcgctcctaggtgagcgtgatgtgctgcctggtggtggggctgatctgcacagtaggctcgcgatgctggagggtagccagcgtatgccgcgtcatgcgcagggggcggcacaaaggattaagcagctggctcgtcagtatcggagttaccaacgcggaagcgttaccgaggcagtggctgatcccgagcaccctcgttggcttggctgtctgttggcgctggcctaccccgaccgggtggctcaacagcgccgagctggaggcggtgagtaccgactcgccaatgggcgtgcggccatattcactgagcctgatgcgctgatgaagcactcctggttggtagtggcggagctgggtagccgtcagggccaacgtgaagagcgcatctacctcgcgaccgacctcgatccttcgttgttcgaaaacgtactcgcagagcaggtaacggtcgtcgacgagctcgactgggatgatcgtgctggagccttggtcgctgagcggcagcgcaaggtgggtgagctggtgttgagccgcgagccgctcaaggagctcgatgcggatgctcgtagtcgtgcgcttctggggcttgttaggaagaaagggttggaattgctgccttggacgtctgagctgcgccaatggcaggcgcgcgtggcgctgctgcgtgagctggatatggcgcagcaagggcaaagtaagtggccgtgttttcgtgatgacacgttgctcgcaactttggaggagtggctgcttccgtatttgaacaacgtcagccggttgagtcatttcagcctgttagacctcggctccattctgcgcggcgcgcttccttggcctcttccgcaggaactggatgaattggctcccacccacatcaaagtgccgtcaggttcgtcgatcaaattggactacagcgagtctccgccagtgctggccgtgcggcttcaggagatgttcgggctggcggatacccctcgtattgccggtggcaaactgccgatcaaactgcacctcctttcgccggcaaggcgacctgtccaagtgacccaagatctcgcgaacttctggcgcagcacctaccttgaagtgaagaaggatctgaagggccgatacccgaagcactggtggcccgacgatccgatggaggcggagcctacggctcgggcgaagccgagggggagttga

SEQ ID NO: 346699 - DNA, 615 bp, Pseudomonas aeruginosa
atgcaattccccgaatccctgaaatcccttggactaatagtcactggctttacggcgggaattgcggcctttcaaagcattctttccatagccggtctagaggttggcccccgccactcctcgtgccccaatggccaggtcgccctgcgggttgaggcctatccatttgacgccaaagtcgacatcactgagctcgacaagcccttctataacggcatgtgcctcaaccaaggccgctacggcgtcacagtcaaggccgaccgatatcaacaagaacaccgcgttgttcatcttggggcatcagatcagatctcactgttctccctgaagcccaagatcattgtccatctggccaaagaacatatcgttgcagacagaaaattcactggcgaggcgatatcaatcagactgctggatattgacgtgcgatctgccgtccagttgatcgcggactttgcaggcaagaacttcgtcgtttcgaatgacgtggaagggacaataagtctagcgctggagaatatcccttgggacttggcgctggattcaatactgatcgccaccggaaatcagcttgaggaaaggaacgggctgttttatgtgtccaagaaatactaa

SEQ ID NO: 346700 - DNA, 960 bp, Pseudomonas aeruginosa
atgtcctccgacgactgggaggatttcacgcttgagttagtgcactacctcaaggagcagtaccgaaaggtcaccaaatgtggtggcggcggggatatgggacgtgacgtaatcgcctataccgcgagcgggtggaacaattaccagtgcaaacattataaagaaaagctgagtgttgaggatgccgtcctagagataggcaagatttgctattacacctacatcggcgaatacctgcttccagagcgctactactttgtaacgcccaagggctgtggcaccaacctcatcaaagctctccacgaccctcagaagctgaagtctgagcttttgagccgatgggataaaacatgcgctagcaaaatcaccaaatccaaaatcatcgaactggattcagaatttcttgcacatatcgacaccattgacttctcgatcttcgacgatattcctccgctggcgttgatcgaactgcacagcaaaacccctttccatgcgctgcgcttcggattctacaacagaagaaggcctgaaatacccaaagcccctgaagccattgcggcatcagagcacatttatacagcggctctgcttgaagctttttccgataaaaagggagaagtcattgacctttcctctatcgccaactatccagacttcaagactgaactaaaaagcgctcgcaataacttctacgccgccgagtccctggagcggttctccagagactggttgcccagcggctacttcagtgatttgaaagaagagtgccacgaggccatatctgccaccgtgaaccagcaatacatcgacggctatgcgcgctacttaaagacttgtgagatatcggctcttgcccagtacagctcccatccgctccacccctttataaaaattcaagacaaaaaagggctatgtcaccacatcgtcaatgaccaggtttttcggtgggtaaaaaaatga

SEQ ID NO: 346701 - DNA, 441 bp, Pseudomonas aeruginosa
atgactctcccagtcgaaatcttcaatggcacagttgaggtcggcactcgcatagcgctgattctgaccaatattgaaaacatagagctcaacctggatcagcttgctttcttcgattatgtattaatctactccaaagagttcaacggcgtagccaatgttcatcctcctcttcccaatcattttgccgagattatcaagcgaagagaaacacttcccgccacactggcttactttatatccaagggcataatcacgaccagcattggtcgtgatggcatcaagtacaaggccaccgacaaggcgatttactacacaagcgcgctgaaatcctcttactacaaaaagcttattcaaaatctctcgtggatcgagaacaacattgatgagctgtttgaagagcagaaaagcttgtttaccacaagggttcgctacagatga

SEQ ID NO: 346702 - DNA, 1863 bp, Pseudomonas aeruginosa
atgattattcgcagcctgactgtcagcggcgagaacaaagtttcctctgcactattttttgagcgtggcgccaacatagtcgtgggcgcatccgataccgggaagtcctacgtcgtccagtgcataaaatttattcttggcgccgaagagcctcccaagcctatcgatgaatctgccggctacaccacactgaccgttcagttcgagcatgacgatggctctggcttcaccttaacgcgggaactgagcgaaaaggcgcccatatttctatatgagccaggttgctcgcctcgcaagctcaaaacgaagcatcagtttggcgacctcaacaatttatcgaactacttcctagacaagatttccttaagtgataagaaacttctccaaggaaaggaaaagttaaccaccacctcgctgtctctacgaaacctggagaaggtattcgttatcgatgagacgaggattgtggctgaatactcgcccctcgggacggggcagaataatgaggccacgtcagaactgtcgctgctgcgcaccttactaaccggggtggatgactccgaggtcgcgtcgatcaagaaagacttggcgtccaaatccaccctgaaacaaaaggtctccaccgtcgagtacttgttggagcggctttaccctgaaggaagggtgccgttggagaccgagattgatgaacttgaagagaacctagaagcacaagaaacgctcctcgaactcagagagcgggagcttaacgccctgatctccgaaaatgatcacctattgaacttcaagcaatcaatatcgatcaatctttcggcggcagttgaaactcttgcagaaaaccaaggactgatggataggcttgtcgcactgcaaggaaaatatcgctctgatgcggaacgtcttttaggcataagcgaggcctctggcctgcttgagctatacgaggaagttttatgtccaacctgtggcagcaaagttccccatgagcacttagagaactcccctacagatatcctgcctgctgtagaggccgaaagggcaaaaattgactttcacctgaacgagctgacggttgcactcgcagacctaggcaatacgatttctactgaacaaacctcaatcaacagcctgaaggatattcttttcaatgttgaacagaaactttcaatgtcctttactgatgtgctggacgcagtgaatggtattagagataactgcaacgagctgaagcgaaaaaccctggcactccgacataaagccagctccttcgacgagcttgcccatgagctggatctactcaaagaaaagctcgatgagaagcaagatgattacgcaattccagacttcgacagcgaaatcaagcaactgtccgcagccgtagaaagtgttttggcgcgctgggactttcctaaccacaagccaactgagttcgacacgaagaaacgagacttggtgatcgctggcaagagaagaccacacttcggaaagggttatcgcgccatcggcttttcgtcgtttgtcattggcctcatgcaacaccttgccccactgggtcgacaccctggttttgtagtacttgactcgcctcttaccacttacaaacaggccgaccaagaccgtggcgaagagcaaagcgaggctgacaagattgctggagacatggtgtattcgttctatagcgatgttgccgaaaactacaaagatcggcagataatcatcttcgataaccaagagcctgacgtatccctgatccctagcgtgacctattaccatttctcgaaaaataggaatatgggaagatttggtttcttcccacccgttgatgggaaggactactctcaagctaaaagggaatcgcgctag

SEQ ID NO: 346703 - DNA, 357 bp, Pseudomonas aeruginosa
atgtctatcattgccgaatacaaagccctcgaagctcaaattgccgagcaaaccgcccgcctcgaagcgctcaaaaacgaccaaaagcttcagaaagagatcgagtttgaaaacaaactccgcgccttgctcgccgagtacaactactccctgcggaacgtgatcgccctgctcgatccgaacgctggcaaggcttctgtggccccggtgaaaggtgctcgccgcgagcgcgccgttaaggtctacaaaaacccgaacacaggtgaagtggtcgaaaccaagggcggcaaccacaaggtgctgaaagcttggaaaaccgagcacggcgctgacgttgtcgaagcttggctgcaataa

SEQ ID NO: 346704 - DNA, 654 bp, Pseudomonas aeruginosa
atgttgcgcacttctttcctgctaatttcgcgagcgactttccaggagtacaggttcctccctgcccgcagagctcagacagggtggcacggcaagctccttcatctccaatcactctttgcagggatatgcaccatgagtggaaaacccgccgcccgcgtaactgacccaacggcatgcccactgcccggacatggcactaaccccatcgttcaaggctctccaaacgtcatctttgatggcctagctgctgcacgccaaggcgacaactcggcttgtggaagccccatcgcctcggcagtttcatcaacggtgttcatgaatggtcaacctgctgccaccctgggcagtgttggggcccacgggaatgtaatcatcggcggctctgggacggtcattatcggtgacgcattcgctcccgcccctttcattcctgtaaccccactacccagtaacacggcaccgtactcagggcgctttcaactgatagaccaagagacaggcaagcccgttgccggacgcaaggtcaaggtttggtctagtggcggatggagcaccgtcgacgcgacggatagcgaagggatgacgtcgtgggtcaaccacgatgcatcggagtccatacatatcgacttggtgcaggaaggcgaagcatga

SEQ ID NO: 346705 - DNA, 708 bp, Pseudomonas aeruginosa
atgagtgatcagccgagcctttctcagggcggaatgagccccgagggcaaaaccaatcccgttggagttttggaacccagactcgatccgcaggacaagaaggtgttgtgttcggcgatctgctattgcagtagcgcccccaatgtcagccaggatgggaagaatctcaagcagacctgtgtggcgcagcgattgggagagttagacgaaattctccagggacgcagcccatacaaacccgaggtcagttacgacatgaccaagaaccctccacaacccattctcgacagtcagacgggaaccagtgctcatagctggatacctggctggatcagcaagtactgggatgaagacccagatcatccaccgttcagacctggtagaggcatgattcgccggcccgacgtggtgatcgtcaaagatccaaacaggccgccgacgcaagacaatatcaagcaggtggtggagatgaagttcccacctgacccacctgatagcaggcaggtacaagcgtacgagaggatcgctggcgatgaacggaaaatcgttgaaatgaagtccaccgattgcgactgtagccaggaaaatcagcaatccaaggtgccagtagagcagcttgggtgggcggcagctatcgcaagtggcgtgatgtttatcctgacacgtggccgctctccgcgaccgcccatcccagcaccagcctattga

SEQ ID NO: 346706 - DNA, 1086 bp, Pseudomonas aeruginosa
atggagcaggaattcaacctggcagacgagttggccaagcagccaaatgtgctggaaataccaggcaatctactgatgaaaggcggccctcaggactacatcggtgccgtgctgtgtctgcgcggaacgctttacttcaaggaggctcatacccctctggtgcgggaagcgctatgccagtgcttcgacgacttcaagcgcctggcagagccccacctcacttggctttggcgcgaggaacctccagagggtaagcctctgactgcctatggtgatgcaaagccgttgcgtgaaatgctggccagcatggatgaggattacccgctgagcttctattacacgagcggtaaacagtctaacgacgccggtgcttggtacttcgagatttttggccaggcagcttgggagtcgaagatgggagacgatctcagtgttctggagttctctgttcctcttctttatcaggagcagaaccctttgggcttcctacgattgttcctcgactctgcgcgccgactggctccagagcaaggctatgccggacattcctttaatctctccgtgaccaacaggggagacaatcagcccacggaggccttcatggcagcacgtatgcctgggctggatgtgggtgttgctggcctgcttgctaatcgtccggcgttcaaaaccagcaagataaagactgtcagttggctgaccatactcgaccaagtgcggttagagcaggtcggtggtctggaggcattgcgcgctcagctgccgtccagtcatttcgctttctacgactacggtgccggtgtggtgattcaggccggagcgtacccagccggtggcgatgccgaagacccgagacccgcctcttacgtgttactgaaccatgtgctgaaggacattcgctatgagaccgtgggttcgctgcacggcggctctcacgacggcgagctacgactggtaggctggtcggcagatcagtggctcaagcgtttggatgtggacgagggcgagatttccgcctggcgtgccaagctccttagcaacgaaccttacctggactccgcgaataccctgccggagcgcttgtag

SEQ ID NO: 346707 - DNA, 696 bp, Pseudomonas aeruginosa
atgaaaacctctgaatccagccagcaaccccgtccactcactcctactgaacttgctcagtgcgtcagattgtttcgcgaagccaaccgctggtctcaagagcagctagcggggatctcagggttgagtgagcgaacgattcagcgagtcgagaaaggcctctcaggagacttcaacacgcgacgtgccctggcgcgagcattcgagttcgaagccatcgatgttttcaacaaggcctatgagatcccctccgaggaagagctaagggccgcccaagagaaatacgacaaagagaatgtcaccttggcggccacaccgctgaccacggggaggcagctagccaaactggtgacaactagtacggcggacatgtccgagccggcgttcgagttgacccgcgaagccgaggaagcattttccggtttggtggactatttcagggagtatcgcgattgcgccgacctgtatagcgaaaggcagaaaatcgaggtgtatgacgagatgcagtcgttcatcgatgcactcaacgcgcttggagtgtctctggtttacagcgagcgaaaggtaaagatgaaatgggggacaaacccagcctctgagcctatgcccgcaaaaatcctgtatgtcgttgcctttccgatgggagaagagcctacgcagttcgccacaccgaagtctggcgccgttagcctatag

SEQ ID NO: 346708 - DNA, 735 bp, Pseudomonas aeruginosa
atggccaggcttattcagctatccaacacttcttgggagcagccatttcgtgaccggaagaaagagcatgctctatggggctcacacccagaggttcgtgaacactgtgatttcgtagatggcacccgtcgccttctccagatttcatttgaaccgcgtttcgatctagatgtggttgatcacttccagatcaccagcggatgtgagattcaatttcctcaagctctggtcgagataatccgtcccatcgtgcaggaaaacccggagtccagcttcgtcgttaccgtgcttgatgctgaggaatacgaagatgggcagggcagcaagcaggacacctccaccctcatcacctctcgcgccacgactgtcatggctcgtgttggccagcaaagatttagaaagcaggtaatggcgttctggggagatgcatgcgcactctccggcgtggatgagcccaagctactgatcgcctctcacatcgtgccctggagcaaatcagacgccgacgtgaagcttgatccattcaatgggttgttgctggctccgcattatgatcggctcttcgaccaaggcctgatctctttccatgataacggctcgattctcatgtcgccggctgcgaagcagctaccaccagagttcggcctgtcttcgacaatgaggttgcgcaagatcgatccaaggcatttgccttaccttgctgagcaccgccgtacctttggctacgacaagtga

SEQ ID NO: 346709 - DNA, 435 bp, Pseudomonas aeruginosa
atgaagctcaggatagtcggcgaaggcgagattcccctgtcttggtacttcaagagcatcgcctatgccaaggtaggactctcaaaccgtgttatccatggaggtgccagcctggtcaagcgctatggcacgggtaacgatcacgatttagggttcaagctcaggttctttgactgggttgataacaaaccagtgttcctctacgtatccaaagagcagatgagcgagtaccgatttcggcgatacatcgatggaattctgcgccagaaagatgccgattacttccgtgtattcgcgctaggggagcttgctcttgcccccagcggcaagagcatcgacttgaaagttaacgacctgaggcaattggtggtgattccgggctttaagcagcctcccaagggtgatgctgtgacgtttccagtggagcagtcgtga

SEQ ID NO: 346710 - DNA, 1710 bp, Pseudomonas aeruginosa
atgtcatctctttcgatactggcccgaggtgagcggctacgcgagcgcctgctgaccgacgtagccacagacctgcgtattacaggcttccagtctcccgccgaggatgaaaaggaagatggcctatctctcgacaggcttaccggcctgggctcaccgcatatctggggtgtccaggtactggacgacagcctgatcggcttcggtatttttcgtggagatcggctgatcgttaatcgagcggccagtcacctggatgacaagctcgtggtggtagacctaggcggcgagggataccgagtgcggctggttcagcgtgacttgttcggagggcgctggctcaaggctgctgaccccaccatgcccgatctacagctagacggcgagcagatcattgaggtgtggggtgtcgtgggtagtaagtcgtgtgtcgccatgagcataccgtctcgtgtgtttgctctcatcgactgcaacagcttctactgtagctgcgagcggatctgccagcccgagctcaagcgccggcctgtcgtcgtgctctcgaacaacgatggctgcatcatcgcccgcagtagtgaagccaagctactaggcatcggcatgggcgctgcctattacaaggtgcgccatgagttacgccgccagggcgtggtggcacgctccagcaactacccgctgtatgcagacatcagcaatcgagtgatgcacttgatggctgagatgctgccaagcattgaggtgtattccatcgatgaagcctggggcgacatgactggtgtggtagatcctgaaggcctgggtcgaagcattcgcgagcgcctggcgcgcgagatcggtatgcctgttggcgttggcatcagcacaaccaagaccttggcaaagcttgcgaactgggcagcgaaaaagtggaagggtactggtggtgtgctcgacctgaccgaccccattcgccaggataagcttcttcgcctagcgccggtgtcggaagtatggggtgtgggtcatctctcagcgtccaagctcgcagccctcaatatctccaccgcctgggatctggcccagttcgaaatcggcactctgcgaaagacgttcggtgtgaccatggagcgcacagcgagagagctgcgcggtatcagttgcattggtttcaacgaaggcccgccccctatagaggcgatcagttcaagcagaatgtttggggtgcgccagacagagctaccaccgattcgtgaagcactggctacgtatgtgagccgcgctgcggagaaattgcgtgctcagggctcgctatgcagcacgattcaggtaggccttcagactcagttagcggatgtcgacgggccgcgttacgccaacgcagtgacgctggccttgcctgcacctaccgatgacacgagagagattttggcgctcgctcagagaggcctacgtcagatctaccgccctggatatcccttctctaagtgttccatcttgctgatggatttgagtcagcggggcgaattgacgctagacctttttgcgcccaaaccccgccgtggcgccgagcagctgatggccgtagtcgaccagatcaatcaacgcgagggacggggcacagtgcgcattggtcgggtgccggcgaaacccgcttggacgatgcgaagggagatgctgagtcagaggtatacgacgaggtgggatgaagtgattggcgtacgggggtag

SEQ ID NO: 346711 - DNA, 2388 bp, Pseudomonas aeruginosa
atgagcaagactagggataatcattttgtagctcagtggcatcagaaaggattcatccatgagcgggacggccaactctgctatctaacgcgccgagatataaacctaaagaacggtgaaaccaagaccatttactccaagagatggcatgcgccggctcaacagttctataagatagatctatattcgacattcttgggtgaagaacttaatgatgatattgagcaaaaactttttggcccgatagacgataacggatcaaaagccgtgcgagcatttctaaccgatgaccaatcgcaatggcatcaaaactttcaaaagttatttgtatatattgacgcccaaaaactaagaacccccaaaggcttagcttggattgagagcaagtacccaaaactaagccagccgcaattgatgatggaaatgcaatcgctgcgcacattaaattgcgttttgtgggctgaaggcgtaagagaattggtctccactgaagactccgaagtaaaatttataatttccgaccatcctgtcaccatttacaattacgcgtgccctcctggaacagaactgtgcgaattccctaatgaccctgatatttcattaaagggctcgcagacattatttccgctagacaaaaatcgttgcttgattctaaccaatcttgaatatgcccaagaccctgacaatgtaaacccacttgagcaaagaaccaattccgtccgtgttcgcaatagcatggttaatactattgagtttattaactcacgcaggcttacagcggaagaggttgcaaaagtcaattacgtcattaaaagcagagcccaatcatcagtagctgccggtaaagaggaatggctttaccctgaaatcaacttgaactgtagttgggccgatatacgaaaacttctcctgccaccagtcgatggactttataggtttggcggggaaatgtttgcaaagttcgatgatggctctgttcactatcaagatgcatttggtcgaacaacgcctcaaagcgaattcctaaacaagaacatagatgaagccaaaattggtcgaaacaatttttgcggttgcggcagtggcaaaaaatataagaattgttgtcgagacattcccaatgggcttagaaccacttggaaagtggcaagtatacgagagcgaaatctagcgttctgcaactgcattcgcgatgttcttggtctcgacagcggtaaaacttggatggatgttaggcgcgaactgtccgaagaccaggtatcaagaatttatggtttttattctattttatggcctcgtgataccgatatttatgcgttgctgcctaagcccgatggaagttttcgagggctttacacaggaatattagatgttcgggttattagtgagaatgccttgcccatggcggctattttcgacgaatttctaatagaaactccaatagtcaatccaaataatgttaagccagaattcagcccgattaaatcaccaataaagtacaaatatcaagcgttaaaagattttctctttatgcttgagatggagccatttattgggcgcggcctagtaaaccttatcccagatccaacagagttcgacctcgccctaatgaagggtatgatggaaatggctgaagatcgatcccagtatcgcactaaagaaatgttctgtgagaaagacctagaattgcactacaggttggccaatgaggacttgctgaacgctatggcaatgatgcctagtactgcaaaaaaacaagcattaatacatcagtttgggttgagtgaggaaaaggcagcggaggcagtcgccgaattagaacggcatgccgaggcgtctccactaactatgctgcaaaacatgcccattggtgaaggaggtcagttcttccaattcagaatggggccaaattatgagatggcacttttcttggcacaagtcacaggatcggcactggttaccgatagcggttgtagatggcgagaattgattccatcacagcatcgaactcagggaattgtcaattatccatggggttatgccttggagcaaataacgtccatcccaatggattatagatttatggaaacacttcagaggtctccgggtcaatttgccgcgttaagagagatcatgaaatcggcagatcgtatggttttagataatgaccgagatgctgacaagttaaagcatctaactgatcaggtaacgcgctttattagtcaaattgggaaaaccatagatcccaagtcgaccaacccaataacaatattaagccctgaaggcgggttctatgactccaacgtccaaagattattagccctatctggctgccaacattatgaaaatgaagttaggtcgatctatggggtttcgcttgaaaattaa

SEQ ID NO: 346712 - DNA, 969 bp, Pseudomonas aeruginosa
atgggaaaagaaacaactatcgaaacactggattttcttgatgttacaggtcttcgcatcataaacaaccgcttccgattgcttgaagaggttccagggggaaaaagttcgactagcttttttggagtcgacgaacaaaccaataaaagcatctttgtcaagctgctaattttcccaagatccgaacttgaatcagcaagatttcgcaatgaagctgaattccttaaaggtcaagagggattcaataaactaatcaagaagacgccgaagtatataagccatggcagtctttttcaaggaagggtattgttcttagtaactgaaaaagttgaaggcactttactttctgactggatagatacaagtttctgcaaggccggcttgacggaacgtctaaaaattgcctatcgcatttttggtgctgccgagcatttcggctattttgttactcatcgcgaccttcacccaggcaacattaaaattctagatggagatattgatctatatacaagggttccaaattataaagtcatcatccttgactgggggcagtcacattcaaaacttgaagcgcactacgcagaagaggatgacgacattaaaataattgacaatgggatggggcgcgaaataacaacctccttctacaatcttccgccagaaacctttatggactggaatagagccggatcagagtacaacaagtatgactcatgggcaatgggccttcttttatacaagctcatatccggcgaagacctcttctcctttgataatatcggtcaatttgcagagtcgatgaggcacattgagatggatattgaatcaaaggtgcagagaattggggagtatgccggagcaaaaaaaactcatacttcagggattgctatatcacctcctcgcaaaagatccccgcgaaagaatgtttatacaaactgccagaatggtgttgtggtttattcttgttga

SEQ ID NO: 346713 - DNA, 678 bp, Pseudomonas aeruginosa
atgcgacagtcgattcgcgacgaagtgatgaaactgacatcccggctcgcgcagagatgccaccagagtgttgcggaggagcatgctgcgctgatcgcaaggtacgcgcgtctggatactgcctgtgatgcgttcaatgcctttaacggctgccgcccagtcgaagattcagatattttcgaaacactctctcagcgccgtagggacatcgctgacgtgctagctcacgcgaacctagaagctttcgagcgcgaggcggctcctgggctgtatttagctattccctacttctattggtgctctgacatccagcccatttggcttgtcaatcgcacacacgagccatgcacctacgtccggcgcgcttgctatgcgttcgccagtgcggatgatggcgtcgacgagtatcgaacggcaagcagcgcctttgctgacggcatagctgccggcgcagtcattcaaccgggtgagaagcttcagatcgatgactactcaatgcgagttgatggcgatttcgtcagcgtcaggagagtcattctggtcgtcaatggagagcgcggtgagtacttcgtcagtatctcgaagctggccggttacctgacgtgcgagcacctgcacggtctccatgaactcaagagcgttcaaagtgttcagggcaagaagccaactacattctga

SEQ ID NO: 346714 - DNA, 348 bp, Pseudomonas aeruginosa
atggctggtgttgaaatgcctcaggatgaagccgtccggatcatgcgcaagcactttccatacttcgaatactgcctagtacgagattggatctggatcgatctcgacctaacccccgagcaaagcgctgctttcgccagaaaccagcgtcagccctcgctgatctttgcgcacacggtcatctacgacagctcgcgacgcttcgacgttggagacttcgtgcgcacgagcccactgtataaatgggaagaaggcttcatctttgccacgctcaattccgcatatcttttaatgggcgatggggtgcgcaagcgagccaccctggaaacgttagccagctttttttga

SEQ ID NO: 346715 - DNA, 357 bp, Pseudomonas aeruginosa
atgctcctcactctcgcaagctcagccgaccaggccgttgtccgtgctatctcatcgaatgacatcgaactcgtaaagcagacacttatctctcccggagaaggcctcttcgtgcgttcattccaggtggtcttcgcttctgacttccccgataacttaggggtgggcgtggcggaggtctatgagctgattgaaggaaagaccaagaagaaggaagtgttctatcggctcaaaaccaaatacggcgtgttcaggttcggcggcccggcacacctgctgtcgaaccatgaaaatctcgattggagcgtgaggatttactccagtgaacgaccgcccaagcgctattacgccgactga

SEQ ID NO: 346716 - DNA, 294 bp, Pseudomonas aeruginosa
atgaatcttaaagaggggctcggcgcagctctccgagccatgcgcaagcaaaaaggtctgagccaggaagatttctctgaggtcagcggcaggacttacatgagtacgctggagcggggtatgtatagcccgaccgtcgacaagatcgatgaactggcttcagtgatgggggtgcatccggtgactcttctggtggcgggctacctgaaagcagagccaggggtgagttcagaagagctgttgtcgcgggtgcatacagagctgacagaggcagggctggctggatcgaggtaa

SEQ ID NO: 346717 - DNA, 153 bp, Pseudomonas aeruginosa
atggagtcggtcgttcccgcccttggtggtcgagggcaccccgttgtgacggagattcatggcctgatcgagcgcgtcttcttgcactccggaaacttcctctacgcctacaaccagcagatcggcgcggcctatcgggagcgtgacctgtga

SEQ ID NO: 346718 - DNA, 309 bp, Pseudomonas aeruginosa
atgaactcctcaatcaccatgctccgccacgggatccgggcagagcgcgacctgacctcgcgcctctggacgatcctcaacgaaatgcggttgcaaaggcagctccccgagtgggccgagcgcgccatcgatggcacttcgcagcaggcggacgagatcagcacacaccgcaagcaggtcgacaggatcctgttcgagttggtccccgggcttcgcgaggacgttgaaaggactgatcgcgagagcgtcgtcgagtggaaagcgcgcgagcgcgaggtgaatggcgtactgggaggtggccatgtctga

SEQ ID NO: 346719 - DNA, 279 bp, Pseudomonas aeruginosa
atgaacgcggtccggaacaagccccagtcgtctgcactgaaggctccgatatctcagcttccgccgcggagattcgcagcgattaacccgaccacgacggtcgaagaggcgttgagcgaggccatcgcgctgacgctaagtgtttctagcattctcggagcactgaccacctccgacgaagagcacgcgtgcttgtatgccctggagattgctgcagagatggctggcgatttggttgacgccgcgctcgactccctgcgtgaggaggaccagcaatga

SEQ ID NO: 346720 - DNA, 318 bp, Pseudomonas aeruginosa
atgtcacagcaaaacaccaccacgcaacccccgcgctctgcttaccggatcgcctctgatttggcggaagacctcggagcggccgtcgataccatcaacggactgcgcgccatcctcacctcgatcagcagggatgagggtggcaccagccatatcaaggacctctgcgcgattgggctcagtcaagccgtgatgatgggcgaagccctcgcaggcttcgcggaggaggccgatgcggagctcgaagcgctggatcctgtcgcgacccaatccgaaccctacaaaaacgtgccgcaacacgaaggcggtgcggcatga

SEQ ID NO: 346721 - DNA, 1014 bp, Pseudomonas aeruginosa
atgcagttgctttcggtaagggattgcgagtcattcctagacgcgctagaacggatcgaatcaggccttgaggatgtctccattgcctttgatggatggccgaattttgacgtcaagatcagcggagagcgttataatagtacgatgacatcgaagctcatgcagggcttcatttcgtaccaagaagaggttcttaggtcttacgcagagataaaatacggtacgtcttctctgctgaggctgaccaatgaggaaaaagcctcacttgagattgtctttcacatagcccagggaagcacggagggtgagggtagtcttgatggcatagctaatcgcctgctagataagatccctttccacaaaatgacaccacgtcaagtagcgctttgtttggctctaacaatcggctcagttgctggctattttgtattttcagaatggcaggatactgttcgtgaccagcaaagacttgaggcccaaaccgcaacagcatctcattatgagcgcctatttaatagattctctgaagcccttgcctctccagaaaccccgcaggaagcacgtcgggttcatgagcatacccaagaaggctataaggctatttttgctggagctcccgacgcgacctctgcgagcattcagggaaaggggtttactcaagagcagatgcacgagataacctcgcgcgaatctccttccaggcaacgagttgagcgccatgactctgtgataattgaatccatcaagcgaacccctgaatacttgacgcttaccatgcgtcttccgcatgaggaaacaacctttacaggcaggatcgacctgatgtcattcacgcccgaggccctacctcaagtgtttgatgcatttagagatagtactccgattcggttcttccatttcgccaccgtagaggcaggcggcatcgttaagacgcaggtgctggcggtcgatagcatagaacagcaagtggcgccggtaattgcgcgagatttacttccgcctcttggcgaatag

SEQ ID NO: 346722 - DNA, 1746 bp, Pseudomonas aeruginosa
atgtgctattgtcagggacggctaaacaaggatgaaatgatggatccaatacttaagggctatgttgatagtttttctggcgagcgaggcctaagcgagctggatgatcccgaaaagtttgaatatttcgtcaattactgcatggtgtctaagcagtatccacgagattttgatcttgatgccatatcggtcggggggagtgatgactgcggttttgacggcgttgcgataatagtcaatggaaatattgttaagaaggtcgaggaggttgactatctcctcaaaaaaaatggctatttagatgtctcgtttatctttatccaatcaaagtcctctagcaagttcaaaggagaacaagtagggacgtttgtttttggacttaaaaatttcttttctgataagtcatctatccctgagaatgaccaggtacgcaacctccgtgagttgaaggaaaaaatatacgattccagcattaaatttgacagtttgcccgcgctggatgtgtattttgtcagtactggtgagtggaagtcccctgaagccattactggccgagtaggacatgaacttcaggatcttgaaaaactaaagatatttcgttcagtagatttaagcttcgtagacgcggagcgcttaaaaagtaccttccgagaactaaagagaaagaccgttaaagagatcgagttctcgaatcatgtggcattgccggaaatcaataatgttagacaatccttcgttggaagcttggctgcaagtgaatatataaagcttataactgatgacgaaggtggcctgcaaaaaagcctttttgatgataatgttagggactttcaaggtaaaaataaaataaatgccgctatcggcagcactttgaatgatccaagccttcaagctgcgatggttattctcaataatggcatcacggtaatcgccaagaaagtcgagctaattggcaagaagatgaagctcaccgactttcagattgttaatggctgtcagtcttctcatgttttgtatgaaaacagggcaaaaatttctgctggcacccacattatcgtcaagataatcgaaaccactaatcaggagctttcctctaaggttattcaggctacaaacaagcagacgcttgtaaccgatgaggcatttgagtcactatctcctttccataaggatcttgaggagtactataaagctactgctaataaaatcgacaatcctatttattatgagcgccgatccaagcagtacgatagtgcgccggatgttccggcatctcaggttatgacgcttagcactcaaataaaagcatatgtggctacgaccttagctcaaccccatagtactcatcggtactatggggagttgctagaagctaaccggaagagcatgtttaggcccagcgactcccatcagtcatattatgtctcttgcttagcgcttaatcgactggagcgactgttgcgagcgcctggggttccgaggctatacaaagagtttaagtttcaactgctttaccttatgcattgttatcatgactttttgaggcgaaataaaaaaggttacggctttgatcaaatccttgcgctctacaacgacaaaggggagtgtcaagttctctttgacgctgcgaggaactctttggatattgctttagggaaatctgggctacagataaaagatgccgaacggagccgggaatttacaaatgctctgcgggctgagtttgagaactgtatctcgagttag

SEQ ID NO: 346723 - DNA, 978 bp, Pseudomonas aeruginosa
atgagagatatgaacgcatcggatttttggaaaaacttcaggctcggcgaggaggtacatgtcgccggatcatttatctacaacggtcttcgccgattccatgaactacaacagctagaccacaccgacgagatttttgagtttctctacaacttgtcggtcggtctagagaggctcttgaagatcgcagtcgtgctgcttgaacacaccgactcgatcgatcaacaggcgttagagcagtccctaataacgcacagtcatttagacttgttggcccgcgtgcgaaagtatgtcccagtcaacctaagtaagccagcatatgaactcttgcagcttctgagcaggttctacaaaacgctacggtacgaccggttttcacttggctcggtatatgaggggaaaaaagaggcaaaagctattcgcgcgctgctgagcaagtacttgagtgttgagttcttggatagccctctattaggtacgccaaataaagatcgctaccgcgccttcatcagtcgcacggtactgaagatttcacggacgcttttcaagatcatcaatgagcgctccagcacgcttgggctgtatacctacgaactgaggcacggctcaaaggcagaaagcgtattcctgcgagaagtggaaataggccatgaggatgtactttggaaggagctgcttatcttctttatgaatgtgaacccaagtacaggctacctaaaatttctcaaggatattgagccgctagacttcgatcctgctttggtcaatgactatctcgacagcttcaaatcagatgctttaaaggccgaagtcatggacgagttagagtccctatacgaagatttggagcctaaggagcgtgagcagcggctcaaaattatggaaattatcggagccttgggagtgtatttcgatgatcctgaagatgatgagtttcttaaggaggatgagcagtttgatgatgatacccgctcctaa

SEQ ID NO: 346724 - DNA, 1026 bp, Pseudomonas aeruginosa
atgagcaagcaacagctgcgcacggacaatcattatgttccgaagctatatatgaaacagtgggcgtcgaatggaaaaatattaacatatcgactacttgtaccaaacgatcactatccgatgtggaaggaccacacgcttaagggtattgcctatcataaacatctctatacctatttctcagatcatgaggagactgatgaatttgagcgttggctcgacagggaatttgaacaacccgcagaggaggcactccgtagggtcgttcatgaactgcccttgaagccagaacattggcgccgattggcgcgcttttctatagcccaagacgtgcgcactcctgctcgtctgagggagttcactcgtcggcagaacgagacactgccggcgctgataaatgaagtgctggaacgcactatcaataggctagagcaagcagcggctcggaacgaatcaccttccggagtcaagactttaagcgctggctactcacctataaagctttccatagagaaacagccggatggcagtggaaaaatattggctgagactactattggtaggcggttatggatctggcagatgactcacctgctgacggaaactatagaacttctacccactcatcgctggacaatccttcatgcacctactggcatgagttggccgacttcagataatccgcttgtgcgcctcaactttcaggatgatagggactataacttcgacggtggctggggggttaaaaatggagatatacttctgccatttagccctaaacatttgctctacacatcaataggcaataaaccaccgcaacgtggtactacgctcagcgctcccttattccagatacttaggaagatcatcattgagcatgcagatcggtatatattttcccgcacgccagacgatattcacctgatccggccgcgactggtttgccctcacacctacaaaaaagaacaagctgcgtggcaagactggcaccacaagcagggttgtgtagagacaaaccgtccgtga

SEQ ID NO: 346725 - DNA, 423 bp, Pseudomonas aeruginosa
atggctctatcagacgagcgccgcggcctcggcgcgaggaacgaagcgatccgccgcgccggcggccaacgggttgaagcggagcggcgtggcgaccagggcttgaccgcggcgctcaaccggctgatcgagccggagcgtcaggcacgcgcactgcgcaagatcgatccgcgcggggctctggatgcaaagcgtggtcgggctgactacaaccctgtcgggaagcagatcggcggtggtggcggtattgctagccccttgatcgaggaggatgccggccagcgcgaatactacgaactgcagacaatccccaccagcgatggcttggcgtggctccggtatcgcagcgtgaagaaggtcgtcatgaccgacgcgtcaggcgcagaagttgtaatggagtacgcgaacgatgtttcccaatag

SEQ ID NO: 346726 - DNA, 492 bp, Pseudomonas aeruginosa
atgttcctggctcaggtcgggcacgaaagccagagcctcaagcgcctggtggagaatctgagctactccgccgagggcttgctcaagacgtggccgaagcggttcacgccggccgaggcgaagcagtacgcacgccagcccgagcgcatcgccaaccgcgtctacgcaaaccggatgggcaacggctcaccggatacgggcgatgggtatcgataccggggacgcggcctgatcatgatcaccggccacgacaactacgccgaagccgcccgcgccctggcgctgccattggtagcgcaaccggagttgctggagcaacggacctgggcagctatcgcctcggggtggtggtggaagtcgcggggtttaaacgacctggctgaccaaggcagattcgagcggatcactctgaagatcaacggcggctgcaacggtgctgaggatcgagtggcgcgtctcgaatgggcgcgcgcagcgctcaagggggaatga

SEQ ID NO: 346727 - DNA, 318 bp, Pseudomonas aeruginosa; identical to SEQ ID NO: 331054

SEQ ID NO: 346728 - DNA, 192 bp, Pseudomonas aeruginosa
atggatgacgccgccgagccctgggcgctggcggtcgaggttgattgcgagccgcttgtgctcagcgagatgcaggaatacgcggtcaccgtgacgccgccggcagatgtgcttgtggttgttgcgggtgaccaagggcctcccgggagggatggcgtagacggtgcccaatggggcgcgactgattggtga

SEQ ID NO: 346729 - DNA, 747 bp, Pseudomonas aeruginosa
atgattgagaacatggcaactaatggagttgccaaggttctaaccggtgggttattggagaacggcgagaaaaaacgccgagctgccttggagccaaaactcaaggaactggaagaaaagcttcgccagcgtcaggactcagggcagaaaccgcatatcctggccatgcgcttgtatgtctatggattctcccgtggggcggcggaggcacggacattcgccaactggctgcaggaactgacccgggccagcggtgccgacggtcgggtggaataccgcttcgccggcctaccgatctccatcgagttcctcggccttttcgacaccgtggccgccgtgggcctggcggatagcgcgccgttcgccgccgggcatatggattgggccgacgacaccatgcgtttgcccgatgaggcccaggctcagtgcctgtcgaccatcctgccagaggactgctcttttctgaaacgttgcgtgcatttgatctcatgccatgagcagcgtgccagttttccgctggattcgattcgccgtcgcgacctggatgccaacggacgtcgtacggggccttcctgctatcggcagggtacggtggaatatgcataccctggtgttcactcggatgttggagggggttatggcgttggcaaccagggtaaggcggtgggaggttcggaattcctgctatcccagatagcgctgcagcatatgtatgcggaagcttttggtgccggtgctcctttgtag

SEQ ID NO: 346730 - DNA, 2109 bp, Pseudomonas aeruginosa
gtgaacctagattcactagtcagagttgtgcaggcagcaagtatttcagaccttagatcattagtagtcgacttccttccactagtagggataaacaaagcatttttctgtgacggaccatatgatgggggaaaggattttgcaatctatggcgaccaagcaaagggtgtcgagataggaatccaactatctgttgagtcaaattggcagggaaaagtcctaacagacgcaaaaaagtgcaaagcaaaattcaatgttaacctgatgtattttgtttccagcagaagaatacctgaaggtagttttgaatctacccgaaaggaaatatttaaggagacaggcgtaacagtcttaaaatatgactcccaggcaatagcaaccgcattcacccaacacaacgaagtgaataccctactgaaacatttgggaattgacgtaacgccaaccaatctaccgaaaaaatattttagcgcaaaaaatgaagcagttgcatcactcttagttttcgacaatgacgtaaaggattttagagccagactatatgactcgattgtaaaatctgttctcgcccgaaacgaaggcggattgaatcgtgaagagcttatcgacgaggtgataagcacctaccaaatgtccaatgcacaacgggccttggtaaattcccacatagatcgactactacaatcaaaagaaataaattccagaagtaaaaccttgtatctaagctcttccgaaatggccgcctacaagggacttaaagattctgcagaatacgaagcaggcatactttttgaaagaatcaaacaaacactatctgaaaagaatatactgaaggacgataataacatctcgcttcttctcgataactacctaactctctcctgcagcctaattgagaagaacttttccctaagcgataacacgaatggaactaacgcatcctatattgccatcagggaaattttgaaatccaaagaaggcgaggaggcaaccgagcaggcattccaagaaatatccagaattatcgcagactcggaatttgccaaactagtatcctctgcaaaactttacgattgcattctaaactcagactctacccgattaataaacgcactcggcgccgacaaaagcatcaatatatactttgattcctctgtcgtaataccactaatctgcggaatactatattcagctgttcgcgacagaaacagccggtccggagcggcattatatgagttagtttcagaacactcatttacatcaattataccagcaacttacgctgaagaaattagcgcacacctcatcgaggcatgtagagattacaaatcgatccttgagcaaggtattgacatgtcctattcaggaaatgcatttgtcagtcactattgccaatacataaaaactgaaaacggaaaaaacttaagcttcagcgactacgtaagagtttttggaattagtgctgacacaatcagcacatcaatgtcagatacacaattctacaaagcaagagacagggcaactggcgagatttctagaatcttaccaaagtatgggtttacagttgaaacactcaacccaactggcgttgatagagcaatattagaaatcaaagaaattctgaaagaaaaaaatctaagaaaaccagacgttctagttcgacatgatgcagtcgtcatcagctatctctctggcgcatacgtaccttctgacattgcaaaaatactatgcacatgggacaaaattcatcttagcctaaatccagaaggattaaatggctatttcgtaatgaacccaattgtccttattgacttcttatcaattgcgaaaaactcagccaaggaattctctttggctcacatactcgattttgccgcaatacagcaagaaaaagaccttgaacttagcgcaaaaatctgggatcaaatagcaaaaatcgagcacggaaaactttctgatgcatcgctaatgctacaggctagcaaatttaaagagcaatttatagaaaataactcaggacaactagactcgattgaggatgcgataagagaacaatggcagatatggaaaaaaacttttccagaacaatctggagttgaaagttcatga

SEQ ID NO: 346731 - DNA, 243 bp, Pseudomonas aeruginosa
gtgcgggtgcgttccaccggcctggcggtggcgtataacctggcggtgatgctgttcggcggtttcgctccgttcatcgtcacctggctcaccgaggtcggcggctcgccagtggcgccggcgttctacgtgctcggcgcggccttcctcgggctgctcgccaccctctatctgcgggagggcgcgacgcccgccccgcgcccccgtgaaccggccctgggcaagccggcaaggagtctgtga

SEQ ID NO: 346732 - DNA, 234 bp, Pseudomonas aeruginosa
atgctgaagactgcggaaaccacctgctacgagattttccgtgagatcctccgcgaggcgcgtgcctaccaggccgactcctacctggtgctggccaaccagaaggtggtggaccggctgctcgacgaggagtcgggtaacgtcgccgatctcgaggcgttcatcggccgcaccatcaagttccaggtcgaggcgatgtactcgcaggagcaatatgacgtggtcctgctctga

SEQ ID NO: 346733 - DNA, 426 bp, Pseudomonas aeruginosa
gtgcgcaacgacgaaatccgcgtcgatggcctgtccgaccagttcgtcatcgacgtcggccccgaggacgagctgtcctgggcccgcgacggcgtccaggaaagccagttgcgcaagctcaagcagggcctggtgcccttcgacggtagcctcgacctgcacggcatgagcgtggagaaggcccggcagacgctatgggacttccttgccgaggccacccgcctggaaatccgctgcgtgcgcgtgacccatggcaaggccgcgcgcaaggacggacgcagcccgctggtgaaaagccacgtcaatacctggttgcgccagcacccgcaggtgctcggtttcacctcctgcctgccacgccacggcggcaccggctcggtctacgtgatgctgcgcaggaccatgctcgaaggccgcgacgagtag

SEQ ID NO: 346734 - DNA, 996 bp, Pseudomonas aeruginosa
atgaagacaccctctcccgccgacagcgacacccttgtgcaggacgccgcgcattggtgcatgcgcctgcacgccgaggacctctccgaggaagagcgtggcgagttccagcgctggctggcagccgatccccggcacgccgccgaatacgcagaaatggaggagatctgggcgctcagcgaactgctgccgcgaacgccggcgcccgagcttcgcaaccacgccgcaacccgcccgctcggccgtcgccgcaggggctggaagagccaggcacgcgccgccgccctcgccctgcttatgttaccgacggccggctacctcggctggctgcaaggctggattccttccaactaccagcgctacgaggccgagggcaacgtcaggcatgccgttcttcccgacggcagcgaggtcgaactggacctcaatacgcagctgagcttcgccaatttcaaggacatccgccgggtttccctggacaggggcgaggcctacttccatgtcacccacgacagcgcgcaccccttcgtggtcaaggccggcaacggctcgatcaccgtcaccggcacccgcttcaacatctggaagtaccaggacaacgtggtagtcaccgtcaccgagggctcggtgaaggtccgcagcgaaggctcgggcaacgacagcagcctgactcccggcatgcaggccagctactatccgggcctgctgcaaccgttggtcgaagccgtggatacccgccagacgctagcctggcgcgagggccgcctggtactcgacgacctgcccctgtccaaggccctgccgctgatcaaccgctacctcgacgctccgctggtcctgggcgacaggagcgctgcgaaactgcgcattggcgggatctacagcacccgcgacatccgcagcctggtcgacgccctgccgaaagtcctgcccgtggacctggaacatcgcgaggacggcagcatccgcatcagcagccgttacgcccagctctga

SEQ ID NO: 346735 - DNA, 864 bp, Pseudomonas aeruginosa
atgaagaagttatacaagcgtttttctaagttggcgatcaagtttgagtctgacgttctatgtagcggtctgcagaaagacccttatcatttgacgtatgagaatggggcttatcgtcaagacgagcttgtgaaagtcattcgtggcgcgcttcctcattttgctttgacttctgaagagtatcagaggctcaaggatgacgatgatgtcgatgagatgtatagacttgcattctctagaatctctaaagctaagaaagataagaaaggtgactatggcgaacttctgctgtttctcattttaaagactttttatgatgctgatcgcctagttacaaaggtgaagttacgaagctcggtcaaggatcaaattaaaggatttgattgtgctcactttactgtggatgagaacgaagaggtcaagctttggcttggagaagtaaaattctataaagatttttcaaaagctcttgatgatgtcgttggggagattgaacgacatactcaggggcaatatttgaaagatgagttttctatcctttgtcccaatgtcgaagtaaatcatgaggttccagtctcagaaaaaataatcgagatgcttgatgggacaatctctttagatgacgtccgcattgtgattccggcattgataacttacgagactgctatgtttaatgggtttagtaagttggatgacgcctttaaggcgaagatggcgaagcaaatagaagggaaatttgatctgattgataagagagagatcaaacagaatgttaatattgaagtatttttcattctcctgccattggcagatgtaggaagtattaaggaaaagcttgaggcaatggaggccgtatttgcatga

SEQ ID NO: 346736 - DNA, 768 bp, Pseudomonas aeruginosa
gtggctcaacagaaaccgagctattaccctcctcaaccgggcgtctgggcggcgcctgagtccctcagcccaggctatatcgatggcgccgacggcgtagcagggttcggtcatcgtgatttctatgtcgcggtgatcccccgggcccttgcttgcggtctcatcatcaagaatcactactctcgtcgcatcgtcgcgaactcctacatacaccttggtgtctgggtcggcggcgagatgcgtggcgtcttgcagtacggatatgcgatgaatccccgggcggtcggcaagatcgtggccggcacagagatcggacaatacctggaactgaaccgcatgtggctcgatgatgttgctccgcgcaacagcgaaagccaggcgatcagctacagcatcaagtacatccgccgagcttgtcccaccgtggcatggattcagtcgtttgccgacgagcgatgtggaggctggggcgttgtctaccaggccgcgaacttccactacttcggccatcacttgaaggccttctacgaactcgacggcgagttctaccactcgatgctcttgaccttgcggcgtaatcgctctggaggacgtggcgagtttctacggaacaacatccatcgggcgactgagtatcgcctgaagcagtttcggtacatctacatggtgaagccgaaatggctgaaacgatgcagggtccagcccctaccgtacccgaagccggggcagccgctacccaacaggcgcaggcgggcagcgtcgaagtag

SEQ ID NO: 346737 - DNA, 1059 bp, Pseudomonas aeruginosa
atggctgtcgcgcacgccgggcgagcgcaccaccgggaaggcgcgctggacccagcgcagcagctcgatgctcgggctgttcaacagcaggcgtacctgcgggtacagccagatcagccggtcgacgttgtcgttgggctcgtaggcgacgtcgccgagaccgtcgtcgtcgcggtcccagcccaggtagtcgctccagtagttgccgcggccgtcggcggaccactcctgctcgcggctggcgacgtacttgacctgctggcggttgcctatgaaggcgttgccggcgatgcgattgtcctccgagccggcggtgaggtggatgcccagggcgctgtcggcgaagctgttgccttcgatgcggttgaacagcgagttgtagatgaacagcgccttgccctcggcgccggaaatcatcgcgtcgccggtgctgccgctgcgcacgccctcgacgcggttgccggccagggtcgagtaggtgatgtagttcatcaggatgccgtagttctcgtcgtcgatggagcggttgccggtcacggtcagcttgcggctctgcatcagcgcgtagccggtgcgggtgcgccgggtcaggttgtcggtcacccggctgttgtgggtgaacatgtagtgcacgccgtagcgcagctcctcgaagcggttggcttcgatgctgctgtcgttggaagtgtcgatgtagaccccgtcgcgggtgtggctgacccggttgccgcggaccagagcgtccttcaccgcatagaggtggataccgttgccgcgatcctgggagcgcacgctttcgtcgccctcgatgcggttgtcgagcacctgcgcgcccaccgtggcgtcgagccagacgccgaatcccgcgccgcgcaggtcgttgccgcggatcacggcgccgctggcggccttgccgacgaagatcgcggcgtcgagttcggtcaggttgcgcccccagttgcgcagccggcagccctcgacggtgatcccggggctggtcagggtcagcagactgccgtggccgccgccgtccagttcggcgccggcctcgcagcgtag

SEQ ID NO: 346738 - DNA, 330 bp, Pseudomonas aeruginosa; identical to SEQ ID NO: 339051

SEQ ID NO: 346739 - DNA, 3129 bp, Pseudomonas aeruginosa
atgacacgtctcgctttctccctcgaagcaatagtctccgcttccgaagatgcagaaaaccggatggccgcagcattcgtcgccggctccgctcatcacgtaatattgcttgctcaagagttaatgccaaaaaacattaaatctagcacattgagtgcatacggagtctcccctgaagtttctgcaaccttgctattcctgattgcagaggcaagctctgacgctgccgaaacagcaaagaaaattatcgtgagcggcgaagactctattgaggcatctgtacttaaagcaatttatcatttggcgaacggaagtctattaaaaatacttgctacgcgcgtcccgagcccagacaaatttcaaagcactgacagcctagggcaggctgttgagtcactgtactatatgctattgcatgggatccgggcgctggcggcatcattgctagggtctactgacgagcatgatttattagaccatgactcaaaaattatttttaatcgagtaaagggattatgcgtcgatgaaattgatgagttagtcggtctgggagatcacccagtccacaacgtatttcccggcccgctacatttagcatccctattggcgatggtcgccgaccatcttattccatccagcattataaatacagaccctcccaaaggtatagatgcagcaaaatggtttgatatgaagcaaagcatagcttcagccaggccgtatctatggagaaatcatcggcaggcgatatcttcaggttatctagaaacagggatgtcttctgtaataagtttccctactggagctggaaaatctacgctttccgagctgaagattgcgacagctctactacgcaacatgaaagtggtatttttggcgccaacactttcattggtagaccagacgactagggcgttagctaatacattcccaaatgcagaggttcatcgagaaattctagatgagttattatttgatctggagaatgactcactcccagcaatttcggtcatgacacctgaaagatgcttagcgatgctgagctttaaccctgacatattttcaagtgtagggttattagtatttgacgagtgccatttactgcacccaagggatgcggatcacagccggcgctcgatagactcaatgctttgcctactaaactttacatcggtagcacctaaagctgatttgcttttactatcggcaatgatgaagaattcagaagagattgcagattgggtgtctgagctaactagcagaccctgcttaccattggcgctaacatggaagcccacccgtcaagtaagaggatgcgtagtttacgctggcgatgaaatcaccaaactcaagcaacgcttaaaactcgtgcgatcccaggtaaaaaatgtaaatgcgcctgccccactcaaacgagaattgcttgtacagccatttggcttcttctgtttaaatcagacatggcactcggcgagccgtaaagattacgcattaataccagtacttagcgagactgttaatttatcaacaggtaccgcttcagaaggaaacaactggtatttaacacccaatgggaatcaagtatccgcaacgattgccacctccacggccaggcaaaaaatcaaaactttgatcttcacacaaactataccactcgccaatagcgcagctaaaaaaatctcagatgacctcgaatcatcaaactgcatcctgacagacgaagagttgcaccttttccagacggtagtcgatgagtttgggggggaggagcatgtctatatcaaagtttcgcaagaaggtcgactactatcctctagtacatgccatcatggacttttgctttctatggagcgacatttgcacgaatcgctattcaaacgaacagatggcttgaatgttttagtggcgacatcgactctagcacagggaatgaacctcccaagtgaagtggtaattattagtggtgatagtagatttgatcaagaagccgatgctatgcaacgcttggaggctcacgaacttttaaatgcagcgggacgtgccggcagagccggcgacagttcctatggatttgtattagtagtgcctagcaaagttgtccattttgataacaacactagccagatccataaccactggatggacttaagatcgatattttctcaaagcgatcaatgtttggttatcgatgaccctctcacgtcaattctcgaccaaatacacagcggcgcactacctctccctaacttgccaagctatttcttaagcaggttaccggtcgattatggcgaagaccaagaaggacgaaactcattagctcgcgcgacgatagaacgctctttctctgctttccgagcaagaaaaaaaggtgatcaagaatgggtaaaatcaagaatagaatcggcaatattgtcaagaaattcgaatatagacacctcacaacccgccacttgggttgatcgcctagcagcagcatcaggtatatcgacagcgatcattcgagagcttggcgaaccgctttctaataacattaatcactcggctaccacagacgcttggtatcaatggtttcgcgactggctaaagcgccgccccgccctaatcccaactctgataagaaaggagaccttggaagtatttttgggcagcgactataagaagcttaaggatgacgcctcaagaggtacgcatgcctgtgacataatatttccattattggagctttggatgaccggtcatacgctagctagtatggaggaatcgactggcactccgattaatagagttggcaggtgtgaattcgctagagagtttgttttgaggatcgtccctgaactttcttatatatttggtcttcctaatcagattttcaatgcaatcacagtcgatagaggcgaggataccgagtcacctgtcggccttaactgcttagccttgtgtgttaaggaaggcttaaacagcgtagaaaaagtcgctcttcgcgaagtaagcaagaagcgcttagccagaagagaattacatcgtaagtatcaaaaaatcgagagctatgcgggcatacttaaagaaggtgaaaactttggcgacgtagtgaaccgtattactcaggccctagccttcgtgaatttctaa

SEQ ID NO: 346740 - DNA, 147 bp, Pseudomonas aeruginosa
gtggacaacgaaaacgaaaccctggtcgcgctgcttgtcatcgcgctgatcgtcttcggcatcttccggatagtcggggacttccagaacctctacgagcagaccgagttgaaaggacaggatttgagcagatggagcaagcaatga

SEQ ID NO: 346741 - DNA, 264 bp, Pseudomonas aeruginosa
atgagggtggtgctgatgctggtgattgtcgcgctggcgggatgcgccggccaggtggagcctgagccgcgcacggtgcgcgtagaagtaccggtggcggtgccatgcagggtgccggcggtggaggtgcccgtgtgggccacagcggggctgcggaaaggcgacgacctacagaccaaggtccgtgcgctgctcgccgaacgcttgcagcggataggttacgaggcgcagctcctggctgcgaaccgggcctgtcaggattag

SEQ ID NO: 346742 - DNA, 366 bp, Pseudomonas aeruginosa
atgaacatcccgacccaagaatcactgcgtgcccaagccatcaattcggccgtggctgtgctggatgatccgctgttcaaggcgttgcaggaaacctcgcgggtcgctgttctacggcaactaatgctgcttggccgcgcggacgtggggcagatcgcggagaggctgccccaagagcgttcggtgatttctcggcatctgcaactgctgttggaagctggaatcgtgcgtatggagcgtgccgggcgccatcgcatctacgaggtggacgggccggcgatcatgcgcaagttcgaggtgattcttcgtgaagttggccggctcgcaccctactgctgtcctgcgaacggggccgaaagcaaatga

SEQ ID NO: 346743 - DNA, 1149 bp, Pseudomonas aeruginosa
atgaagactttgcagacccttgtcatcggtggcggccaagctggcttggccacgggttggcacctcgcgcaacggcagatcgacttcctgattctggaagcctccgaccgctccggtggcgcatggcgcagctactacgatagcctggaactgttctcgcccgccggctactccgcgttgcccggtctgccgtttccggggccgcaagggcgttacccgcatcgcgatgaagttgtggcctatctggacgactatgcgcggagattccggctgccggttcgcaccggagagaaggtggtgaacgtcgtccgcaatggcgatggatttgaggcggtgacggcaagcggccaacgctaccacgccagaacgctgatcgcggcatccggtgcgttcggcatgccctatgttcccgctatcgaagggcaagagcggtttcgcgggcgaatactgcacagtgccgagtatctgaactccaaggacttcttgggaagcagcatcgtcgtggttggcggtgcgaactccgccgtacaaatcgctacggaacttgccggggtcgcccgcgtgaagctggctaccttgcagccgatacgtttctttccccaacgcatcctcggcctggacttccatttctggatgaagtggactggcctggagcaaacacgctggttgaacgaccaaagcaccccggtactcgacagcgggagatacagccacgcgataaagaccggacgggtacagcgccaggaaatgttcacccgcatcaccgcgcacggcgtggtctggccggatggcaccgaagaacaggtggacgtgctgctgttcgccacgggctttcgcccgaatgccacctacctccaggagttgggtgccgttagtgccgacaaccgcctggcacagcagaacggcatcgcgcaggccacccccggcctctacttcgtgggctttccaaggcaacgcaacttcgcttccgccaccctgcgcggcgttggtgccgacgccgcgcacatcatgccgcacctgctcgcgtacttacacaagaacgatcaagaaaccggccacatgagcacggcctcggcttctacggatcatgtcggctctatcgcattgatccaagatcaaccaccgcgtagcggaagtgaaatttcatag

SEQ ID NO: 346744 - DNA, 354 bp, Pseudomonas aeruginosa
atgaccaccattgaaatctttgaacccgcaggatgctgtgccaccagcagcgtcgtaatcgaccaaaacgcactgcatttcaacgccgacatggattggtgcaagcagcagggattcgaggtcaagcgccacaacctgttgaagaacccgcagagctttatcagcaatccgcgtgtcaaggagttccttgacgtatcgggaacgcagtcgctgccggtcacgctggtcaatgacgtggtggcgttaacgggccggcttcccaaccgcgaggaactggcccgttggttcggtgcggaggtcacaccgatcagcactgctccaacgtcctgctgcacacctacggcgcgtgcttga

SEQ ID NO: 346745 - DNA, 1761 bp, Pseudomonas aeruginosa
atgtcgttcaaatttctacacaacgcaccgcccttcttattcttcaccggcaagggcggtgtagggaaaacctcgttggcctgcgccaccgccgtgcgtctcgcggatgcaggaaaaaaagtgctgctggtcagtaccgatccggcctccaatgtcggccaggtcttcaaccagccgataggccatcaaatcgtcgccatcgttcaggtgccgcgtctatcggcgctggaggttgacccgatggccgccgcgcaagcctatcgggatcgtgtccttgatccagtacgcgattcgatgccagccgagatcgttcaaagcatcgaggagcaattgtccggttcctgcaccaccgaaattgcggcattcgacgagttcaccggcttgttgacgaatcgggccttgcgcagtgacttcgaccatatcgtcttcgacaccgcgcccaccggacacaccatccgcatgctggaattgcctggcgcgtggtcaggctatctcaaaaacaatcccgatgccgccgccaatctggggccgttggttggattggaaaaaaagcaaagtcagtatgccgatgcggtcaaggcgttggccgaccctgcgcaaacccgcctggtgctggtcgcgcgagcacaatcctccacgctcaaggaggtctcccatacccatgatgaactgcatgccattggactgacgcgccagcacttggtcatcaacggtgttcttccccaacaggccgctgagggcgatccgctggcgaccacgatctttgaacgggaacagcacgcgctgaccctgcttccagccaacctctccacattgccgcaggatcgtttgccacttaagcctttcaacatgatgggggtgcaagccctgcgcatgttactgggcgagcaatcggacgggccgctggagacattgcacgatcaggcagagaccaccttcccggcgttgtcagggctggtcgaggtattgagcacgcaggggcatggcttggtcatgatgatgggcaaaggtggtgtgggcaaaaccactgtcgcggcggcggttgctgttgctttggcccagcgcggtcatcaggtgcatctaaccacttccgaccctgccgctcatctgtcgtacacgcttgatggcagcctgaaaaacctgtccgtcagccgtatcgacccaaaggtcgaaaccgagaactaccgccaatttgtgctggaaaaccagggcaaaggtttggatgcggaagggttggcggtgctcgaagaagacctgcgctcaccttgcaccgaagagatcgctgtattccaggcgttctcgcgcatcgtcaaggaggctgatgagcatttcgtcatcatggacacggcgcccaccgggcacacgctgttgctgcttgatgccacgggtgcctaccaccgagacatggtacggcagatgggcaagcccggtgagcaggtcatcacgccgatgacgcaattgcagaaccccgaaaagaccaaggtgatcgtcgtgacactggccgaaaccacgcctgtgttggaagcggccaatctgcaagacgacctgcgccgcgcgggcatcgagccgtgggcctgggtggtgaatagcagcctggccgccgctcgaccggcatcaccgttcctggtgactcgcgccaaccgcgaattgccattgatctccgaggtgcaagaccagcatgccaagcgtttcgcagtgattccattacaggcgcaggagccggttggcatcgacttgttggggcgcatggcgacccattga

SEQ ID NO: 346746 - DNA, 1194 bp, Pseudomonas aeruginosa
atgtcccgccccacgcaatccccggtttatctcatcgccctcggtgccttcgccctgggcatggcgtcctacgtcaccgcaggcctgatcccgatgatcgaaacagccttcgcggtgcccgtcgccctcgcggcgcaactggtgacagccttcaccctggcctacggtctgggctcaccgctgttcgtcgcgctgctgccggcccatcggcaacgcggcggcttgttgtttgcgctcggtttgttcgtgctcgctaatggtgctagcgccttggcaaccaacttcactgtgctgctgatcttccgcgccatcgcgggcatcggtgccggcgtctacctcgccatgggcatcgcagcctcggcggccctgtcagtccccgaccagcgtggcaaagccattgcggtgatcatgggcggcatggccagcggcaccgtgcttggcgtgcccttgagcctgctgttggctgatcgcctgggttgggcatccgcgctgtggctggtcgccgcgttgggcgccttgtcttgggtggggctggcgctgaggctgccagtgtttcccgccgcagccgccacgccactcaaagccaagctggccctgctggccgatggccgcgtggtcgccatcctgctggtgtcgctgttggccgccatcgccagcctgggcatgtacaccttcatcgcgccgctactggccgccactggcgatggtctggcccgttcgaccacgccctacctatgggtgtggggtgtgggtggcgtgctcggcagcttcctgatcgggccgctggtggatcgggtcaaggggccgctgttgaccttgtggatcatggcgattctggccgtggcgctgttcctgctgccggctacggctgcactgggcgcatggttggtgatgctgccgatcgctgtttggggtgcggtgggctgggcgctgcaggtgccgcagaacaacgaactgatccatgcacgcgagcagcaaggcgatggcaatctggccgtggcgctcaacgaatcggcgctgtacctgggcagtgccatcggcgcggcgctgggcggcgtgctgctgctccagcagtggccggtaagcttgctggccagcggtgcgggcatcgttgcggccttgggcacgctggtgcaactgctggtcctgcgtcgcgctccgaccgcagggcgagttcgagccgaatcgcactga

SEQ ID NO: 346747 - DNA, 264 bp, Pseudomonas aeruginosa
atgaagaaggcaatgctgttttcgctggccgtggtgctgaccgcctgcggccccgccgatacgccaaagacggaaagcgtgccaaccgttgaagaactggcatccgatcccgtgcgcctgaaagagctgcgacagcagtgcaagaccgatcgcgccacgctcggcgacgtgttgtgcaaccgggtagccgaggccacgcgcaagcggttctatggtgatggcaacacaccttatacgccgccggagaacccgcccaagttctga

SEQ ID NO: 346748 - DNA, 327 bp, Pseudomonas aeruginosa
atgcgatgcgcttgtgtcctgctggccgtgctgctgaccgcttgcggccagcagccggccgagaacctggccgacgccttggccgccgatcccgtgcggctcaaggcgctgcgcgggcaatgcgcggctgaccggcaggccgtgggcgaggacgcctgccgcgccgccgccgaagccttccggcagcgcttcttcgcaggccataccgggccggacgagtacgactcgctggccgaactgccgccaatcccgccgagcttcgatacacccgacgacgacatgcaagaaggcaacgcgccgctcgccccaccggaggacacgccatga

SEQ ID NO: 346749 - DNA, 222 bp, Pseudomonas aeruginosa
atgagcacgccaaccaagaaattgcggctggggccgctgccgtccagcagcagcgtcaagctgacttttacatgcccggccagtctgaaagacgaactcgaccgctatgcgcagctccatgcgcaaacctatggcgaatctgtcgatgcagcgacgctgatcccgcacatgctggaagccttcatggcgggggatcggggattcaggaaaatccgaaaatag

SEQ ID NO: 346750 - DNA, 993 bp, Pseudomonas aeruginosa
atgcgcaaagcactaatagtagggattgatcattacgcaaatataaattccctcagcggctgcgttaacgatgcccactctgtcaaggcggttttggagcgacacgccgatgggactgtcaattttgcaactccccgagtgataactggaacaggtccagccgacattgttgaaaagcatttcctcaaagatgctgtacgagagctttttagcggcgatgcagatattgcgctgttctattttgccgggcatggatacattgaggataccggcggcttcctttgcgcaggagattgcagaacgggcgatgatggacttgctttgtcggaagttatgactctagccaacaactctagggcaaagaataaagtcattattctggacagctgccatagtggtattgcaggagacacctcgaatctggccggatttgctgaaataaaagaaggaacaacaatcctcactgcatcaacagcagagcaatatgccatggaagctccgggcggcggctctggtgtttttacaaacttatttgttgatgcgcttggcggggctgctgcgaaccttgttggcgatgttaccccaggtagcgtctacgctcacattgatcaatcacttggcccatgggcgcagcgtcctgtatttaagacaaacgttaaaacttttgtttctctaaggaaggctgcacctccaattggcctggccgatctccaggccataataaggcatttcccgagtgcagattatcaattacccctagatccctcatatgagccggaacgctccgaggaacagcgcaatgacccaaccattccagcgcccaatccagtgaataacgctatattcgccatccttcagcgatatgtaaaagttaatcttgttcggcctgttggcgcaccccatatgtggcacgctgccatgcagagaaaagcttgcgagttaacagtgttaggtcagcattattggaatctcgtaaaagaaggcttaatatag

SEQ ID NO: 346751 - DNA, 399 bp, Pseudomonas aeruginosa
atggcaggggtcttcgatcgaattgcaggcgcctctggtgccgacgaaacggagctgacggtggagcccatggcgttggatgacggcatggatgatgaacagcctctcatgagcgccgctgtacaggtcgatgagcgccggacgccgcaacgggtacgggaggccgtacaggaaatgctcaagtacggtctgctggaagagagtcacaagcccaacctgtatcgctcagcgctttccaatatcgaggcggtcgacagaatcctggagccgctcgaccttgccatgggggtcgacgaggttcgggggctggtgttcgttatcgttcgccagggcgaggtggccgagcaggatgactggtcgcaccccctagttgtgaagcgtcaagaggttatttcttga

SEQ ID NO: 346752 - DNA, 288 bp, Pseudomonas aeruginosa
gtgttcaaaattaccggactggataagcttcagaaaaacctgaaagatgcgcagcgcgccttgagtgagttagacggcgaactgggggtcgtaaactttgatccacatgatcccgccagcattgagggcgcaattcaatcggtcaatcgaatgatcgacgagcgcttaggggaatattcttcgaaccctatcgttggccctctcgcagaacaaatgaaggaaaagtatcgggagagtattcttgaaaaatcggcagaagctagattaaagtcggatgaggatgagtga

SEQ ID NO: 346753 - DNA, 897 bp, Pseudomonas aeruginosa
atggctaaagacttattctcggaaataaacaatgcagttctagacttgcagtcctcacagcttcaaacctacgaaagaccgctcaaaaaattggctcaactgctacggcatcccgaccttgagccatacaacgccgagctcacggaaggtctcgacgttgaggcgttcatcgctgaaagtgaaaagaccgggggcagcatggttggaagcgcccagcttgcttggccagatgagcccaatcaggtgctggggttgacgttgcttttaatcgagaagctggcggcagaccccggctacgctaccaacttcggacaccattttttctattccggaaaaaagatcattgctggaatccacgcacttactggccagctaatcattccctttgtgcgagattacaagagttatatccaggccaaggggagcacggatgtcatgttaaaagctcaattttcgcgcaaggtctttattgttcacggtcacgatgatggtgctcgtgaaacagtggcacgatttcttgagcgaatcggacttgaagccatcatcttgcacgaacaggctaaccaaggacgaacgattatcgaaaaagtggtcgcacacagtgatgttggtttcgcagtagttctgcttacgccagatgatgagggctgcgtaaaaggaggaacgcctgagcccagagcccgtcagaatgtgcttttggagttggggtactttattggtcgcctgggcagagacaaggtatgtgctctcaaacgcggggcggtggaaattccaagcgatttcgccggtgtcgtttgggagacgatggatagcagcgggggctggaaacaggcacttgcgcgtgagcttgaagctgccggtcatagcatcgactggaataaggtcatgcgtgcatag

SEQ ID NO: 346754 - DNA, 684 bp, Pseudomonas aeruginosa
atgcccgccgggctttcgggctgcgccccgtgccgtctttgccgtcacggccattcggcttcaatccctcgcgccttcgcgcctgcggcgctgcgcgctgcgcttgcggtgaaggcagcgccccgccgcaatgatcggggcttgtgggcctacgccccggcttgctgccgcaggttgcacgaaagcgtgccgtcctcgaccctggcagttcgtcgcctgtacgtcacgaaggacggttcaccgacacgccacccggcctcgctatggagcatccacgccacgcatcaagcccgtcgccgcaatctgcggcaagaggcgttctcgcttgtcgttggggggttggccttgcccgcgtcagggcgcaagccggtgaagccgacacgcggggataccgagtcggccatatctccattcgggagcgggcggcccgtgcgtccttggcttgtcgtgaatcctggcgagggaatggctacgccttgggcttcatggccgcaaccttccagcgaaaacaatttccccgccgctgcgcggcttcctcgcgggacaaattcttttcgcttccaggttctccacggtgttgcgaccgctgcgcggtgcggccagcccatcccccgccggccggatcacaacaaggacgcactggcgcgaccttgttcaacccgaaaggagaaacatcatggctaa

SEQ ID NO: 346755 - DNA, 717 bp, Pseudomonas aeruginosa
atggaaggcatgccctcttgggttaatactgttattgccgttggcggtgtcctaggaacgatagttaccgctgtcgcaactttttttctatggcgcgtaaccaagactcttgcgcatgaaacgacaaggatggctgaagccgcagctcaaccacatgtcgtcgtgacactcactcccaatcggtggtcaatgcggcattttgatattcacatcgacaacaccggaaatgcgacagcatatgacatttctatcgccttcgatcctccactagaaaatggggaggcacgcggagaccgggtcgaaatcccattccagaaaataagtgtcctcaaacccggtcaaggcatggtgagttatttgtctgaattcggaaaactgaagggcaagacctacgaagttgacattagctggaagcgtgatgcgtccagccaacagcgtcagaaaaattcatataccttaagtatgctcgaccatgagggagtcagtcgtctcggagatgagccattggttgagatcgccaaacacatcaagaaaattgaggaaaactggagtccggttgccaaagggaaaaaacgcacaaaggtagatgtgtttagcggttttgataggctgcatgagcgtcgagaagcgaatcggatgcgtcgtcagtggcaaagagaacaagaggctcattcttcaaagaatgcgcaatctgacactccgaattctcagcaataa

SEQ ID NO: 346756 - DNA, 876 bp, Pseudomonas aeruginosa
atgtgcgaagactgcatggacgccgatctcgaaacgatgactagccgtccggactgtgcaggccaatgcagcgatacccaggcattctggcgcgatccggccttgcccttcgtcgagagccgccgcgcctgccagagccgggcctgctacaagccccaccatcacccgaccttttccattggtgccgtcgatggcggcaccagcgttttcaccggtgccgccgatggcccggttctcctgtcccctggcacgctcgtcttcgtgcccgcatcacgtgtccatgcgtgcaacccggctccggacaccgcctggagctaccagatgctgcacctggacgccgcgtggctccaggctgttcggcgggagtacgcccgaaccgacgcgatggacgacgagccggtgcgcatcgtgaccgatccggcggtctatgcgcacttctgccgactcaacgtgctgctgttcaaggaaggcgacccgatcgagaaggaggccgcgctgatcgagttcgtcggggactacgacaccgaacaggggctctccatcaaagggccgaccgtgccgtcgaacctggcggagcggattcggcccgccctggactgtctgtgtgcttcgcccaccgccactaccaccctggagaagttggcagacctggcaggcatgagccgctatcaggtgatccgggcattccgcgccgtcaccggcatgacgccgcacgcctggcaactcaaccagcgcgtcaacctcgccagggagtggattcgcagcggtgacagccttgcagacgtggcccagcatctcggcttcgccgatcaggcccatttccagcgggtgttcaaggcgcatgccggtgtgacgcccggccgtttccgggcctga

SEQ ID NO: 346757 - DNA, 636 bp, Pseudomonas aeruginosa
atgcagccgttcctgatgattgccgcagcgcatttcctggcgctgctttctcccggccccgactttttcctgatcgcccgaacctcgctgtccgccggctggcgggtcgccagcggcgcctgcctggggatcgccgtcgccaatggcgttttcatcgttgccgccttcgccggcatggcggcactgcgcccggacagcctcccgttcgtcgtattgcaactggccggctgcgcttacctgctctatcttggcgtgctgttcatccgccacgcgggccgcagcgacctggatgtctcgaatggcgggcgttccacggcacccgcgcatcctttcatcgcgtggcgacgcgcaaccggcatgggcttcctgtccggcatcctgaatccgaagaacgcgctgttctacgcgagcctggccgcgatgctgaccggcgcgcatgccagcgcgggctggaagacgatctatggcgtctggatgttcagcatcgtgctgctgtgggacgtgctggtcgcagtcctcatcggcaaccaggccgtgctgcgccgcttcgcgcgggcgctgccgtggctggaacgcatctccggtgccatgctgatcctgctggcggtggctgtcctcgtcctcctggcacgttga

SEQ ID NO: 346758 - DNA, 618 bp, Pseudomonas aeruginosa
atgaccgaattgatagctgtcatcacaatcaccttgctggccgtcatcagccctgggccggactttgcgatggtcacgcgcaacagtctgatgctgtcgcgccgtgccggcatgctgacggccctgggcatcggcttgggcgtgctcgtccacgtcacctatacgctcgtcggcgtgggcctgttgatccagcagtcgctctggctgttcaacgccatcaagttggtcggtgccgtctatctgatctatctcggcgtgaagatgctgcgcgccaagcccagcggcgcgctggccgacagtaccgtggcgccgctgtcggatatggcggctttgcgtaccggcttcctgaccaatgcgctgaacccgaagaccacggtgttcatcgtcagcctgttcatgcaggtggtgcggcccgacacgccgctggcggtgcagatcggctacggcgcattcatctcggttgcgcacatggcctggttcggcctcgtggcgctttgcttctcggccggggccgtgcgcgaccggctgctggccgtgcgccactggatcgaccgcgccttcggcgggctgctggtcggattcggtgtcctgctggcggtggcgcgcggggcgcgctga

SEQ ID NO: 346759 - DNA, 510 bp, Pseudomonas aeruginosa
atgtcgcaactgtccttttcctcgttcgatgacgctttgctggtgcgtgactctcacgggcactatgcgctggcatcggccgatcagattctggaggccgcgcgcctggtcatcgaccagaagatgcagcggggtacgtctttcacttcaccggcggcggtcaaggaatacctgcttgccaagctggccggcttcgagcatgaggtgttctcggtgttgttcctcgacacgcagcatcggctgatcgaatacagggaaatgttccacggcacaatcgactcggccgaagtgcatccgcgcgaagtggtcaaggaggcgcttcggctcaacgcggcggctctggtcatctcgcacaaccacccaagtggcaacccggagccgagcgcggcagaccgggcgctgacccggcggctcaaggatgcgctggggctggtgggcgtgcgcgtgctcgatcacgtcatcgtcgctggcagcaccacggcgtcgttcgcagaacgcggcctgatctga

SEQ ID NO: 346760 - DNA, 1200 bp, Pseudomonas aeruginosa
atggcaaaaatcaaactcaccaagtccgccatcgatgcggcaaagccccaggcgcaggccgtcgaactccgggacaccgtggtgcccggcttcctgtgcaagatcaccccagcgggtcgtaaggtgttcatgctccagtaccgcacgaacgccggcgagcgccgcaagcccgccctgggccagtacggggaactgaccgtcgagcaagcccgtgttatggcgcaggagtggctggccgaggtgcgccggggcggcgaccccagcgcggccaagaatgccgcccgcaaggcgccgaccatgaaggagttttgccacaccttcatggaggactactccaagcagcgcaacaagcccagcacgcagcgcggctatcagggggtcatcgaccgcaacatcattcccatcatgggccggatgaaggtgcaggacgtgaagcgcccggacgtggccgcgctgatgaagaagctggcccacaagccggccgaggcgaaccgcaccttcggcgtgctgcgcaagatgttcaacctagccgaagtgtggggccttcgcccggacggcaccaatccgtgccgccacgttcccatgtacccgcccggcaaggaaacccggctcatcgtggacgatgaactggtgcggatcttccgccagttggagacgctggaggcagagggactggagaactacgtcattccgctggcgatccgcctgcaattcgagtttgccgcccgccgctccgaaatctgcccgctcgaatgggactgggttgatctggagaagcgccgggtggtctggcccgacagcaagaccggcggcatctccaagcccatgagcgaggaagcctatcggctgctttcgacggcgccgcgcctggaaggttgcccctatgtcctgccgtcgcccaacgacgcgaccaaacacttgacccacggcgagcactatggcggttggaagcgcgtgctcaaggccgccggcgtgccacatgttggcacgcacggtatccgccaccgggccaccaccgacattgccaattcgggcgtgccaaccaaggtgggcatgaagctgacgggccacaagaccgtagcgatgttcatgcactacgtccacaccgaggacaagccggtgcgggaagcggccgaactggtggcgagccggcggcaggccatcacgggcgtgcggcgccttgcggaggcgacggcatga

SEQ ID NO: 346761 - DNA, 1797 bp, Pseudomonas aeruginosa
atgcccaaaatttggccgtatatccggtttagtagtgaagagcagaagaaaggcgacagccttcgccgtcagcaagaactgatcgagcggttcgcggcacgcccggaaatcgtggcggaaggtgcggaaatcgacacgagcctagaccttaacgatcttggggtttccggcttcactggcaaaaacgtcctacaaggccgttttaaagactttctcgacgcagtagatagcggaatagtcaaaccgggcgattacctcgctgttgaggctttaaaccgcgttacgcggctcgatccaatggagagccttccgatcttgctggatctgatgaaaaagggcgtaaaaatagccattacggccaattctcagatttacaagcaaggcggcgacataacgcaactttatattgcattaggcgaattacaacggggatacgccgaaagcgaagaaaaaggccgacgagtgcggcaggcttgggataagaaaaaagaaagagcctttcaaaccggcgagatcgcaacgtctcgcttaccgctctggcttcgcgcagtgaaaaccgatcaaaaagggttgattgttcggaaagtcgaagaaattcccgaacgtgtggcgatagtgaaagaaattttcaggctatcggatagcaacatcggagcaatcgcaaccgctcgccttttgaccgagcgaggcgttccgacattcacacgcgaaaacccccgcaaaaaccccaattacggcgatttttggcaaccctcctacattaaaaagatcctcgatagtcgcgcagtccttggccattatcagccgatgacttgggagaaattgccagacaacaggcgtcgcagaatcaaccacggcccagagattgaaaattatttcccccaaattatcacgcctgaactattccgccgcgttcaagaaaaacgccgagggaggggaaaggaaggtcaaggaaataaaggtaaaaaattctccaatcttttcttgaaaatagcccactgcgcaaaatgtggcgcgaccgcttcgcacgtcaataaaggaccagatccgcgaaaaggcgggcggtatctcgtttgctaccgcgcgaggcacggcgattgctcttataaagcgtggcgctatgatgatttagaaacaatgattttaaaatttctcgcagaagcagatattaaaagcattatcagcgaagaaaacaaagcggacgaattgatcaataagaaatatgaaatcgacgcagagatcaacgacattcaagaaatgcttgacgcttataaagcagatttcaaaagattaaaaggaagagtgagcgacttagatcgagaaatggcaatcgaaaacgaacaaacgcttaaagaacttaaagaaaaagcgaaagatttagatcaagagattttcaaagcattagaacagaaaaaagcagacattgaaaaagacattcttgatcttcgtggtttgtcaaatacagaggatgcgaacacagttttcgaagttagatcgaaaatcaacgaacgattaaaagtgatcatcgaagatataaagatcgattttcaagatcgacacattgaaataattttcaaaaatgaaacaagaagacatttaaaaaatcatcttgctgttgaacgacgagagagcacagaagcagatcaaaagcgtcaagatgattacgatgatttttattcttcactcacagacgaacagaaagccgaactcaatcaatattcaatcccggccgaaatagcaaatgatccaaagcgcttaattgaatatctcgctcaatttaatgtcgtagaagattga

SEQ ID NO: 346762 - DNA, 1275 bp, Pseudomonas aeruginosa
atgaaattcaaaatacgcacaaggcaccaaggcgcacgctttacagtcaaatatattcagaaatacgcaaaacccggatcaatgcgttcaacaatcccaaaatttgaaggatcgacgaattgggactatgccaatcttttcgataagaaactcgaacagggcagagccaaaggccagcaacgtctttatttacaccagatcgttgcttttcacccctccgacgcacacaagacagacgagcagctactcgacatagccgaggaatcgctacaacaagcgatgccgggcaagcgtcatttcgtgatggccgtagaacgcaacacggcacacccacacgtccacgttgttgttgctcttcgctcactcgacacgaagcgcgtccaccgggatttcgttgactacatcgaaattggcaaagagttagagatcaagcacggtctctacaacgcagaccgaagccagaagcctagcccgtatgccccagcgccaaacaccattcagatcgagcgcagaacaggccagaagagccttaaaaacgatttaaaggacaaggtagcgacagcactcgaaaccgcagcagatacggccagttttatcgacacgcttgacgctttcggcgtgcagatccttccaggactaaacgcctcgggcctctatggtgcgtccttcgcgcttgacggggagatcttcaaaggctcgcaactcaacatttcagcgaagaaaatcaaggaaaaattcggagccgatccattttttattctgctgatgcaagacgcagagaaaaaagcaaaagcatacgctgaaaaaaacacattagaagcgcaaggctcgaagccaacacttgcaacaaacctacgcaatcgcacattagacaagcatttcgagagcgcagacgataagacctatttctataaaaacacgaataaaaaggcgttcaactacgacgcagaaaaaaacgcggttgcgttcgatcattcgaattacaagaacataaaagccggaatgcaaaagatgatcgaaaacggagcggagaaaatagaagcaagcggatcggaacgcttcaagcgtcaagcgtggaccgtagcgatacaaaatggctacccaatgtccgacttttatcaacctactctggacgactacgagcaggcattaaagacttgtatgagcgaaaaacaaagggagaaaataaaggaagaaatggagaagcagaagcaaaaagaaagagagaagcaagagcaagaaagaccaaaaaatcgaatgaaattaaaaatataa

SEQ ID NO: 346763 - DNA, 486 bp, Pseudomonas aeruginosa
atgaaaaagacattattgacaatagcgattttaacagcgtcagcgtttgcgaatgctgaatatattataaaaatgccgttagagcaggcccaaggcgggcaactgcccaacggatcaatacaaatcgttaagaacgacgcagcgcagtcagaaaatgaaaataaagaggaattgtatttcgagttagtcgatacaatgcttgtaaattcttgcccagaaaatcgccagatttcaaatgtgagaaactgcaacgtttcgggcttctatatagcgcaatcaataccgctacacggagcaacgcgctacgatttgtttttgtcttggtatgaaggcccagatcatacgcaaatcagcagaatagagctaagcaatggcaaatcttgcgtgccaagtttcaaggttgttaatagcgtaaaatgcgaatttacagagatgtttggagaagaagagtatggcaaagaaataggcataaaggtgtataaatga

SEQ ID NO: 346764 - DNA, 135 bp, Pseudomonas aeruginosa
atgagcgatatagaattttacttacagatattttttaaggtagtgccctacgtgatttttagcgttgtgatctggcatctacacataaaaggctttatcaagaaattaacaaacaaaaaacaaaaggagatttaa

SEQ ID NO: 346765 - DNA, 711 bp, Pseudomonas aeruginosa
atgagcaatgaattttttaataaagcaaactatacaagagtagcaagattatttgttctattgctcgtttccctgccaatttttgcgttcgctgattcgatagatagagaaatcgcagcgagcgagacattcgaatatcgaatcgctttaataagtatgatgttgaatgtgcttgataaattcagcatttttatgggcgttctgctttacataattgcgggcttgaaattaaagcagatgagcgacgaaaaaaacccgtcaaaaaaatggggcgtaataatgacatttgtcgcgggatcattcttctttaattcatatcttgcttatgaacttgtatcagtttggaaaattgcaggcgatgaaaaaatctgttttatggccgacgatgctggcgtaaatgatcaatgctacaacgacgaagtaagcgaattatctggcgaacttgctgagcgtgttgggaagctttcaggcgattccgtaaaagatgattttatgaataatttccgcgcaattatcggccttttccaagttataggcgtgatttattttatggttggaacgtggggtttagtgcaagtcagcaacggaacaaaagacgaaggatatggtaagcctatcattacgatgatttcctcggctctaatcattgatttgccacatacggcgtcgatgtttttggacacattgcaaaagataggcgttaatttttaa

SEQ ID NO: 346766 - DNA, 456 bp, Pseudomonas aeruginosa
atgtcgaaactgctcgcactaatctcacaacagcaagaaattgaagcacagatcgcaaaactcaaaaaagacgaaaaagaagcgaaagtcttcgaagcagtcaaagaaatcaaagcagttcaacaaaaatacggctatgaagataaagatttcgtagatgtgcttttgactttctacaacgtaaacgcagcgaagcctgcaaaacgtgcatacacaaaaagcacagcagcaaagccaaaaaccgaaaccttcccggtgaagatcggcacggaaaccgtcgaactgcgcaagccaacggcgaagcccggcaggctcacaacgaagctaaaaacggcaatgacaaaagcaggctttgagaaatacgatctatttcttaacgacttgatgactaaaaacaaagtcaaaacattcgaagagttgatcgagaaaattggcgtaaaagcggaacagaaataa

SEQ ID NO: 346767 - DNA, 1806 bp, Pseudomonas aeruginosa
atgaaaagcctaaaaccctggctcgctatcctcggtggaggcacggtaaccatagttgccgggatcatggcgacaggcgcgggctcgacacgaataatcgacgccttgatggccggcgttggcgtgatgttggtttccggcgtggcgatgaccgtgcgcgcccgctacccacaacgcccgctctggatattgctcggaatgctcgctgtagcttacgcgcttcatcccctaatttattcgaccaatgatctgctctatacgattggcagaaccgttcgcccctgtgctgaagcgctgctggtgtgggtggtgctgaccttcccgactgggcgcatcaccgaccgacgtgagggtatgctgattggcgcagctatcgctgctattgccttgctatggctacccagcgtgatgctgactccgcacgtgccgcgcttcggcccactgccctcctgcactgacgtgtgccaggacaatttactgtttattgccgaccaccctacctggtccaacctcctgctgaatgcctttcgcatcgtcaacacaggcatcctgatcgcgaccagcctgtacttgctacagcgactgcgacaggcctccacactgatgcgtcgctcgctcgcccccgtactactcgcctctgtcgcccgcacgctatgcatggcgtttttcctgacaaccgggactggcttgttgttgcttacctttaccttctgggccgttccgttagctattgccttgggcttgctgcgcagccggctctacaccgcccaagcgctacatcggttagtgaccggattaaggcgccggccgaacctgcaaggcctgaaaaccatgatggcgaatgctctggatgacccatcactggagctaggtatttgggagccaaacactgggcgctggattaactcatcccaacaagtcgtgccgttacccgaaccaagtgccaaggagcaagccgtacgcgtactgcatgacctcaatgaccaacctagcgcaatcctgattcataaccgcgccttgttggaagagccgatgttgctggaggcagttgttagctcgatccataacgccatcgtcaattggcaattcgaatctgccttggccggtgcccatgcccattctgaaactgtcgcggaagaggagcgccgccggcttgaacaagacctacacgatggtgcacagcaacgcttactcgcgctgcgtatgaagatcagcgtgaccagacgcctggtcgatagcgatccgagccgagcggatgcactgctagtggaaatggcaacggacattgatgccgccatcaccgaactgcgtacgctggcacatggccttactccgccactactggctgagcgaggactggcagcagccttgggagaggccgccaataatgcgggcttgccagtagtcacggactttcaagcaccgagacgcgaaagcccgctcgccgaacgagcaatttacttctgctgtgtcgaagccctacagaacgcagctaaacatgcaggagcaggggcaacggcgaaagttacattgcgccaagaacgggatgggatttcgttcgctgtggtggacagcggctgcagcaacaggcacccgctgaatctcaatgaaggccaagggatcgccagcatgcgctcgcgcatgctggcgataggaggagagctcgaaatcagcatctcctcaacaggtggtttgagcgtcgtcgggcgaatcccctgcgcgaaggacaatgtccaggggatggcgaaaaatagcgcgctacagctgcttccgaagcaccataagcgagcctctaacatgtcctaa

SEQ ID NO: 346768 - DNA, 705 bp, Pseudomonas aeruginosa
atgaacgcgatgcacagttctgacaatgtcactttttcggcacctcctatcagcgtggcaattgccgacgatagctaccttattcgcgagggcttgtcgcagattcttgcccagtctccaagagttcgtgtagtcgggctttatgctgacccaaccgcgctgcttgcagcggtagaagcaaatccaccacaggttgtcatgacagacatccgcatgccgcctacgcaaacggatgagggcatgcgagtagcagaacatctgcgccagagccatccggatataggcgtaatcgtgctgagccaacatggcagctcacagtatgcaaccgagctactggagaaaggggcatctgggcgtggatacctgttaaaggatcgtattcacgacctcgatcatctggtgtctaccattcatgcggttgcaactggtgagtgtcgaattgatacgcaactaattgaatccctgctgtcgcgcaagcaccagcgctcccccttagaagagctaacaccacgccagcgggaaatcatggccgaccttgcgacaggtaagagcaaccttgccattgcgcgcgacaggggagtaacccagcgggcggtggaaaaacatataagcgagattttcggccgccttggcttggccaacgacgaaagcatcagccgccgggtacaagcgacgctgctttatttatcacgtaacggccaatga

SEQ ID NO: 346769 - DNA, 1017 bp, Pseudomonas aeruginosa
atggcacttagattccccaaccacccttactacattccgatcattaagtggcagtcctgggagcagagagctctgcttcagactcggggagacgttaagccctacgttcgcccctgcatcgaggtccgtcactcgaatcaacacagcagcctggtagggaatttccaaacagcttggggagcccctgcattggtagattatgcgaatcccgaagggcggctcgttggcattcgtcctttagaatttgaggcgttccttcagatcgcaaaagctaacggctttccaactcttccagttatcaatccgttagatgcccctctgctacgccctgcgctacttggtctagtgcaatccttccctgagattttcctacgcttacgtatcagtggattaacagttaatgctgagcactacacccagacgatgatggccgcacaggtactatcaaggcctggcaaccgtattcatcttatggtcgatctaggtgttactcccgcttgggaagccgcagaggtacccgcctttacaggcatgatggcggcgttcaagaacgcagggttttcccaaattcatgtggcatcaggtgcgttccccgagagtcttgcggccgtaaaaacggtagctaacttgccacgccgagactggtctctatgggccgcgctgaataccaacgctcccggactgcttctcggatattcagactatgggacgatatctccgcgctggactgaggagacactaactcgccgcggcggccgtgttgccattcgctatgcaaggaaccttgactggttggtgttgcgagctgacggaagcaagtcagagcattcagttgctatctcgactttgatggtgaccgtgcatgcagcctccttcaaaggccgagagtattcctatggggacgaattaattgcagatcgagcgaatccggcaatcaaaaagaagaatgcaggcctcttccacttcactgaaggttggtgtcatcaccttgcgacggtgattaaggaacagtactag

SEQ ID NO: 346770 - DNA, 1056 bp, Pseudomonas aeruginosa
atgcatgacgcaacgactccaataacagtgaagtccgccttcgaaagtcttaaggctgcaggatatccgcgcccttatgttgagagactattgcccgattggtgggatcacagcctcttcaagaccagcgctggagccttccaatttgcactgttgcttaagcaacgcttgggcttggttgtaaattttgcccaagacggcagtcttgcaatcgacgcggctacgcccaacgctcgattcaagcgaagaagaggtacagaggaaggggcgctaaacatagcggccagccttggcatggcgttggctcgactttcaattttcagtgccggagccccatacagccccttaccccctgacccgaattatatcgggcacctagttcgccagatctcgggtacgaatagcgtaggttttgaagggcttctggcgctttgctgggctcagggcattcctgtgttgtttctcaaggatttgcccaaaacgtcgaagcggatgacaggtatggccgttagcgttcaaggcagacccgcaattgttttaggatttaatagcccccagcacgctcgacagttgttcgtcctagcacatgaactcgctcatatcgtatgcggccacgtcggtgaaaatggtgttctcatagacgaggacattgccgaagtcaccgatgccttggccgggagtgacgccaccaggaaggatgcggaggagaaagaggctgactctttcgctctcgcacttttgaggaacgggcatacaaacgtgcttaaagctatcggacgaccagactccgcagcagtactagcctcgaatgctgtcatagctggagaacaacttggagtcgaccccggccacctaattctttcctacgccagagagaatgacgattgggcccgagcaaatcaggccttgggttatatcgcagaccccagaggggcgatcgaggtgcttaatcagtggttcatgcaaagtaccgatctcggagctcttagcgacgagaatcgggagcacgtgctagctatccaaggcttcgggtcagtcacacgtgtacctacttga

SEQ ID NO: 346771 - DNA, 336 bp, Pseudomonas aeruginosa
ttgtttgcggccgtaagccaagacgaagacgacgccctcatcaccggcgataaacgagcccttatcgccctctctgagatatcagaagtacccatcgtagatagcctctgggaaaagatcattacccttgaggaagcaatttatttgattgtgcagcgttcgggtttcgacctggtttcgcaaaggattcgggcgagacccgacgtgaacgtggccctcagcgtaatttttggtagagctaacccaaacaaaatcggagaggtcctcgaaggactcaacagctatatgaatcaccttcagtcgatctcgcagggtaaatacctgctcccgtactga

SEQ ID NO: 346772 - DNA, 444 bp, Pseudomonas aeruginosa
atggatattccaaacgtgaactggggctccgtcgctgactgggcattggcagttggatcggtgctcgcatcaggcgtcgcgctttacttgtccgcagacacgaaccggctgaaagcaacagtggactgttccgtcaaagtccaggtggacggtgtcacaaccactaaggtcgtctccattttggtaacgaataccggaggaatcgacttccagccagacattcgcaaggtgttctacaccactaacaccatcgagtcggtgaacatgagtctacgcaaaatcaccaagaaccgaggctcgtttcccagtgataaagccctgctgaaactcttctacttggcgctacgtaacatcagcaagaaatggacgatgccgatccgtggctgtaaggcggcgctgacccgatttacgatcagctacgaaggcaggttgccacagcagtaa

SEQ ID NO: 346773 - DNA, 192 bp, Pseudomonas aeruginosa
atggtgtatgtaccgcgcgatgatcatggccgtctgctccgagtcgaatatcagccctttgtgggcattacggataatcagtacaccgacctgccggaagcggcgcgcaacaagttggatgagcaggcgctggcgctggcgctggcggaaattgaaggcctcaacagcctgctggaaaacagcaatatctaa

SEQ ID NO: 346774 - DNA, 3306 bp, Pseudomonas aeruginosa
atgcgggacagacatgtgcctcgacgactgaaatacctggtcgcaccgctagtggcaattgccgtattgctggcgtcggccctgctcattctgcaaaccaaccacgcctcagtcatggcccacaacctcagccagctgcaagcccggctggcgattgtggagcgcatgatccaacgatggcagcgcaaccagctgcataacgccgagcggctggcggcattgccacccgttcgcgcctgggccgcgcgccagctgcaacttgggcctcaacaggcggagcgcagcgctgacttccaactcctgcagcagctctacagcgaccttggctataagggccatgtgctgttcaacgagcacctgcaggtggtcaacgacaattacccggtgccgcataagcacccgtatcaggccgcggccgttcggcaaacgctgctcaccgcacagcgtgaaggcgcagccgtttcgcaagcctttaccgcgccacaagccctgctacacggctattcgacgccggactcgaccatacaaatagtctgtgcccaactcagtgcagaccccagcacaggcacgctctgcttgcatgccgaactgcgtaacggcttgccggaactgcttaacagcctaagcagcccacgcaacagcgagatattcgtcgtcgaacgtagtggccaacaactgggcacctcctccctgtggccgaaccccattacgctcaagaccggtgacagcagccaatacttggaaggttatttgaatgcccatggtgaacacgtagccgggctgctgaaatggtctaacgaactgcagcttggcctggttctggagcaacccatagacaagctgtacgaggctaatgcgcactcgcgcaatctagtgattggcctgacggcgtttgccatcctgctgattgcctggctcagcctgctggcccaacggcaccgcaagcgtttagcccagagagaggcgttctatcgccaggttctggatcatctgccgctgctggtacgggtacgtaatccagacggtaagtgcctgctggaaaaccaactggcacgcgacagtcatttactcacgcatcaggatctatcgctccagcaggatcaagcagacacccacctgccccccttcagccgcgaagtctggctcaccctacgtgccacgctactggaagggcgtgtgtgcgagcgccgcctgacacaaggggactttcgcagccccgacttcgaggcgaaacggctgatcggcttcccgatctgggacacccgaggcgaactagtggcactcggcagcatcgccctgtatgaatccgagcaagtgcgcagtcgcctggctctacaagccctgactgacagcctggaacagcaagtgcaacaacgcaccaccgagctagcgcaggccaaagaagtcgccgaagctgccacccaggccaaagccaatttcctcgccaacatgagccacgaaatacgttcaccgctgaatgcagtgattggcttagcctacctcgccgagcgctgcaaccaggacccgcgagtcgcggtttaccaacagcgcatcctcaagtccgcgcagcacctgcaggaagtggttaacggcattctcgatttcagcaaactggacgccggcaaattacagcttgagcaggtgatgttcagccccgaacggctgatggaaaacgtggccgacatcctctgggaaaaagcccagagcaagcagctggagatggtgtgcgatctcgacccgcggctccccgacgtgctgtatggcgactcattacgcatcgcacaaatgctgatcaacctggctgaaaacgccatcaagtttaccgcccaaggcatggttgctgtccgcatccgcctagaagagcagcgtggtgagtactggcagctgtgtttcgaagtgcaagacagcggcagcggtatacctgccgaacgcttgctggagattttccaaccatttgaacagcttgataacagcacatcacggcactttggcggcaccggtttgggcctggccatctgtgcgcaactggccgagttgatggggacacgcatcgaggccaggagtgaactcggcgtgggcagcctgttcagcttttcgcttagcctcaaaggcggtgcctcgcatcaagcgccactgccgggcgctcgcagcgcacgacgggttctattggtcgacagtaacgctcacagccgtagcaacctgagcgaaatgctcgccgcactcggcctgcaggccgatatggcaagcagtggccagctcgcctgcactctgctcagccaggcccaggtgcgcgaccagccctatgcgttagtgctcgtggactggaatctgccagacttaccacccagcgaactgctggcgtgggctaagccgcgccagttgctcaaccacagccgggtgattctgctcagcgcccacggcagcgagcagcccctggccgacctgccgctggaagaatatgacgccgttctagacaagcccgtctcaccacaacgcctgcgggaaacagtcttacgcctcgagcgcagtgaagcccaccccgcgctggaaggccgacacgtgctgctggtggaaaacgaaacgatcaaccaagacgtcgcccgtgagctactagaatcgctgggcgtgcgtgtcagcctcaccaacaacggcctcgccgcgctcgcctgcctggcgcgcgatgccagcattgaactggtgctgatggacattcaaatgcccttgatggatggcctcgaagcgacgcgccacatacgtccgctgtacccggcgttgccggtcattgcgatgaccgccagcaacctcgcgggtgaccgtgagcgctgcctggcggcgggcatgaatgactacctggcaaaacccatcgaccctcaacgcctagcggataaactacgccgctggctgtgtgtgcaagcgcctgtaacggctgccctgcttgagcagaacgaagcgctaccgcagaagaccaaggataggatcaatcgccaggcggctctagagcgactactaggcaatgagcgcctgtatcacagcttattgcagcgttttgtcagcgagtatgggcagacggctgagcagcttgagcaggcgctggcggccggcgagcacaacagggcgatggagatcgctcatcgcttcaaatcagtggcagccactattggcgctgaacacctctgcgaactcacgcagcacttcgaagagcaactgcgcgagcaacgcccatacgccacctgcctgaccagcctgacgctcgagctgaacgcactgttgttgcagcttgacgatgagtccgcgggggagtcctaa

SEQ ID NO: 346775 - DNA, 1251 bp, Pseudomonas aeruginosa
atgctgtccctactgcctgagctgcccaaacatattcgtgagcaatctgtactgctggtagatgacagcctgtttcagcgcgagcttatcagcgccttgctgcaggccattggcatccacgatatctggcatgcccaggatggtcgcgaagccctgacacggctgcagcagcaccaagggcccttaccgttattggtggtcgacctggagatgccagggatggacgggatcgagctattgcagtgcctggcagaagagaagattcaccccaacgtgatcattgccagtggccgcgagcaggcgctgatcagcacggttgaggggatgctccaggccttaggactgccattactgggcagtttggccaaacccgtcagcgctcagcagttgcatgcgttgctcgccttccaacacccgccgaagcgctctgccagctggctggccaacaccagcgataccccgaccgtggaggcgctcgccctggccatccgtgaccggcgtatcgtgccctactaccagcccaaggtggccctgaagagcgggcgcctgattggctacgaagtgttggcccgctggcagcatgaagacaaccggctgatttcgccggcggactttattcccctggcgagcagcaacgggctattacgcgaattgacctttagcctgttggagctagccttgcgcgatacaggcgaattaactcgcgcggaggcgcccttgcacatggcgctcaatctcgacatcagcctactagccgaccgcagttttgccgaactgttgatccaatgcgtgcagcgggccggagggcggcctgaacaatggattctggaggtcacagaaagctcactgatgcatgaccccggggtgacattagggtcggtggggcgtctacgcctggccggtttcggcttgtcgattgatgattacggcacggggttctcgaccctgcaacagctgacacgtctaccgtttaccgagctgaaaatagaccgcacattcgtgaccgaggcccagcagaatctgcgcgctgaaggcgtgctgcgggccgccatagaaacgggccgcacgctcaatctgccctgcatcgcagaaggcattgagagccaggccgaagcgcaattgctcgagcgcctcggctgttttgccggccagggttatttattcgcccgccctatggcggcggactgcctacctgactggcaccggacttattcgacttattcgtctctggcgcaatggtttgacgcctga

SEQ ID NO: 346776 - DNA, 1080 bp, Pseudomonas aeruginosa
atgatcaaggtaatgattgtcgacgactcggccgtggtgcgctccatgcttaacgaaatgctctccgggcaaccggacatcgccgtcatcgccaccgcgcccgaccccctattcgcccagcagaagatgcgcggcgagcggcccgatgtactgattctggacattgagatgccacgcatggacggcctgacgttcctgcgccaagtgatgcgcgaagaaccgatcgcaaccattgtcttctcctcactcgccgaacaaggctcggcaacggctctagaagcgctggatgccggcgcagtggcaattatgaccaagcccggtgcaggcgtgggcgactacctgcaacgccagcagcaggaattcatccacaccgttcgccaagcagcggccgccaggccacggcaggtaaaagcgctgggcaacgccaacaccagccggcccgccagcagcgccgcggcgctgcgcagcaacccgagcaatgcaactgccaaggcactcagcaaaaccaccgacgcgatcatcgccatcggcacctccacgggtggcacccaggcgctggaacacgttctgacccgcttgccgctggactgtatcggtctggtgattgttcagcacatgcctgccaacttcacccgcctcttcgcccagcgcctgaacaacgcctgcgccattgaagtccgcgaagcgcaggacggtgaccgagtgttgcctgggcttgccctgatcgcccctggcggcatgcacctgagcgtgcagcgcagtggcgcgcaataccgcgttcaggtgcaagacggtcccaccgtgtcgcggcataagccatctgtggacgtgttgttccgctcggtggcgcgcgcagcgggggcgaatgccgtgggcgtgatcatgaccgggatgggcgacgatggcgcgcgcggcctgaaaagcatgcatgaagccggcgcaaccaccctggcccaggatgaacacagctgtgtggtgtttggcatgcccaaagaggccattcgcctcggcggcgtgagccatgtctgcagcctggatgagattcctggacaaatcggccggctatcgcgccgcacctga

SEQ ID NO: 346777 - DNA, 831 bp, Pseudomonas aeruginosa
atgaaccctcaactcgtcctcagtgaccaagccttccgccagatccgtgcgtttttccaccgcgaaagcgggatcgacctgccggagaacaagcgccacttggtcgccggacgcctgcgcagccgggtggcgacactcaagctcgacagctacgacgcctacttcgagctgatcggtcaacccgatcaggccaaagagcgccaatgcctgatcgaccgcctcaccaccaacgagacgttttttttccgcgagccaaagcactttgagctgcttgcgcagagcatcttgccgagcctaacccaacgcccgctgcggctgtggtgcgccgcggcctcgaccggcgaagaaccctacagcctggcgatgctgctcagcgaccaactcggcccgaagggctgggaactggtcgccagcgacctctcgacccaggctctggccgccgccgcgcagggtttatacccaatgcagcgcatcgaactgctgcccgccgactacctcaagcgcttttgccagcgcggtactggggagtatcaggggcaattgctgatccgccgcgagctgcgggaaaaagtccaactgctgcaacacaacctgatggacagtgctgcagcgctgggcatgttcgacgtgatcttcctgcgcaacgtgctgatttacttcaaccccaagagcaagcaacaggcgattgatcgcctggttagccagctgcgcccaggcggctggttaatcgtcagccactccgagtcactttatggcacccgcagtgatctgcagatgatcacgccctcggtctaccgccggcccgccgtgcagaacaggatttgcgcatga

SEQ ID NO: 346778 - DNA, 546 bp, Pseudomonas aeruginosa
atggccatcaacgcaacgccgggcttaaccccggcgtccgcgcctgctgagcaggccgggcaatacctgatgtttaccctgggcagcgaaaccttcgcctgcccgatccacagcatccgcgaaatcatcgaatgccctgcgatgaccgcaatacccttgagcccagcctttctgcgcggggtgatcaacttacgcggcgccgtggtgccggtgattgatctgtcggtgcgcttcgagcgtgggctgaccacgctgggcgaacgcacctgcattgttatcgtcgaaattgaatcgggcgatgtcacccagttgctgggcgtcatcgtcgatggcgtgaccgccgtgttggaggtcgagcgccatgacatcgaatccaaaccgagcctgggcagtggtattcgcgccgaattcgtggcgggcatgatccgtcgcgacgacctcttcgtgctgatgctggacatggcccgcgtgctgtccaacgacgagctggaggggctggtggcccttgagcagcagtcctacacggagggcaccgcccagtcgtaa

SEQ ID NO: 346779 - DNA, 1611 bp, Pseudomonas aeruginosa
atgaactggtacctcacgctcaaactgaaaaacaaactgctggtggcctttatcaccggtgcagcgctgaccctgatcgttggcgtgctggccatcacccgcctgcagcagctggatgccatcaccaccgacatgtacgacaacagtatggtctcggtgctcggtctggataaagccattaccgcgcagctgacccacagccgggcatccctgctgctggccctgctcgagccccatgagcgtgacgagcaaatggcggtcaatgaacgcattatggccacactggaagaaggcctgaagacctatgaaaccgctaaaagcagtgaccaagaaaagatcctttatgaggagttcaaggcccgctacgccacctaccgccaggcttatcagcaactgcagcaagccgtgcgcaacggtgatgagctgcgcatcaaggaattggccgtgggcgatatccgcagcagtagtttcgccctaggcgaaaaaacggatgaactgatgcagttcaatgcgcagatttccagcgatgccaacgacaacgccacgctcgttgcaaagaacgccttaaacctgatgatcgtggtactgatcattgcggtgattctggccatcagcatgggcctgctgctggcgcgccacgttacccggcagatcggtggtgaaccggagtacgccatggaaaccgtacgcaaagtggctaatggcgacctcagcgtcgaggtcaaggcggaggtcgagaacagcttgctgtcggccatgcgcgacatggtgaaccgcctgacccaggtcatcagtgaagtgcgctcctctgccgacgccctggcctcggcctccgaggaagtttcagcggcctctggcaccctcagccagaactccaccgaacaagcggccagtgttgaagaaaccagcgcctcgattgagcagatcaccgccactgtggcgcaaaacgccgagaatgctcaggtcaccgacaacatggcgaccaagtctgccagtgaggcccgcgaaggcggccgcacggtgaaggaaaccgccagcgcgatgaagcacatcgccgacaaggtcaaaatcatcgatgccatcgcctaccagaccaacctgctagcgctcaatgccgccattgaggcggcgcgagccggtgaccatggcaaaggcttcgccgtcgtcgctgccgaagtgcgcaagctggcggagcgcagccaagtggcggcgcaggaaattggtgaactggctgcctccagcgtgcagctggctggcaacgccggcacggtgctggatcaaatggttccggccatcagccaaaccgccgatctggtcaaggaaattaccgccgcctcgaaagagcagcgcgtcggcctggaccaaatcaacgccgccatcggccaattgtcgcaaaccacccaggccaatgcggcggcctccgaggaactgtcggccacctcagaagaaatgagcgcgcaagccactcagctgcaacaaatgatgaccttcttccgcctgagcagcagtgaagcggcacagccgcaaggctcatacagccgtgcaccgctcaagcgaagcttcgcggcaccggcgggcaacatcaacgaagcagccttcaccgacttctaa

SEQ ID NO: 346780 - DNA, 1980 bp, Pseudomonas aeruginosa
atggatatgcaagcggtacgcaacgtactgatcgaagaagcccgcgagttgctggcagcgatggaacaagccctgcttgaggtcgagacgcacggcgccgatagcgagcggatcaatgccatttttcgggcggcccacacccttaaaggctcctcaggcatgttcaacctgcagctggtggtgggctttacccacctgatggaaaacctgctggtgcgcgtacgtaccggcgaacaggccatcgacgcacagctgatcagcctgttgctgggctgtggcgactacctgagccggctgtttgacaacgtggccgacggtttggatgaacaagaccccgacccgcaaacccgcgccctgcttagcgccgagctgcaacagtacctgacaatcgtcgcccccctcagtgcgaccgagccattgccgggcgcagcgctaaacacgcacgtgcagcattggcggatcgagttgcgccccgagccacaggtatttctccacggcctggatcccattgcgttcgtcaactacttggccgggttaggcgaagtcctgtgccttgaagtgctgcaagacacgctgccgaccctcgccaccctggaagccgagtcctgctacctgggcttcgtgctggagatcctcagtagcgcgacacaggcaaacatcgagcaggcgctggagtttatcgcccaggattgtgccatccacatcagccagcagccgcctaccgagctgactgccgccccgacatggaccccggagctgacagcggagagcgttcaggcgctggtggagccgggcgacagcctgcgcgcgcgcagccaggaacaagtgtttatcaaggtcgatgctcgcaagctggatcagttgattgactcggtgggcgagctggttacccgctcggcccgcagccgcacattggcggaagatgccccgcgcgaggcggtgaaaacctttatggaagaggtcgacagcttcgtcgaacagattcgcgaccgcgccctgagcctgcgcatggcgccagtcaacgaagtgtttcaacgcttcccgcgcgtagtccgcgatgttgcgcgtgacctcggcaaacaggtcgaccttaacattcgtggggccgacaccgagctcgacaagtcgctactcgacaaactcaacgacccgctgctgcacatcgtgcgcaacgccctggaccacggcctggagccggccgacgtacgccaggccatgggcaaaccggcccttggcacgctgagcctcaacgcctatcacgattccggctgcgtggtactggagatcagtgacgatggccgtggcctggacgcacagaagatccgtggcaaagccatcgagcgcggcctgatcaatgtcgacagcgacctcgacgaacaggcgatctatcacctgatcttcgaagccggcttctccaccgccgaacaggttactgacctgtctgggcgcggtgtcggcatggacgtggtgcggcgcagcatcgaagcgctgcgcggcaccatcgagatcaactcacacctgggcagcggcaccaccttccgcattcgcctgcccctgacgctgtcgatcatcgatggttttcaggtggtggtcggcgaggcgcacttcgtaatcccgctggagcaagtggtggagtgcctggaactcggcgagcgctctggcagcaaccagatcgtcagcctgcgcgactcgcccctggcattcgtgcgcctggccgagctgttcaacatcccggcgcaagccggtgcccgcgaatgcctggtggtggtgcaacacggtacacagcgtaccggcatcgtcgtcgaccgtttcgctggcgaactgcaagcggtgatcaaacccctcaacccgctgctgcgcagcatccgtggcctgggtggttcaaccatcctcggcgacggcagcgtggccatgatcctcgacatcaacgccttgctcgacgccgaccggcgtggcgaggcgctacagcgacaggcgtga

SEQ ID NO: 346781 - DNA, 279 bp, Pseudomonas aeruginosa
atgagcaatctgcctgacgcacccatcagccccttgattttgggcggtgctttcaccatcgagcgcgctgttgcgctgcagcaactgctgctccagcagctgcaacagattggcctgcaggaggtttgcctcagtggcatcagtgaaatcgactgtgccggcctgcaactgctgctggcgctaaaacacagcaacccgcacctgcgcttgagcgcacccagcccagccgtcgagcaactgctgacgcgactgcagctgacggcgctattaagtgattga

SEQ ID NO: 346782 - DNA, 366 bp, Pseudomonas aeruginosa
atgagcaagacaattttagtcatcgacgattcagccagcatgcgtcagatgatcagcatgacactgcgcggcgcaggctacagcgtggtcgaggcccaggacggcaaggacgcgctgagcaagctcgacggcagcaaatacaacctcatcgtctcggatgtaaacatgccgaacatggatggcctgagcttcgtcaaagcggccaagcagttgcccgcctacaagttcaccccagtgatcatgctcaccaccgaagccggcgaagcgaaaaaagccgaaggcaaggccgcaggcgtcagggcctggatcgttaagccctttcagccgcccatgctgctcgacgccgtttccaagctggtgatgtga

SEQ ID NO: 346783 - DNA, 1131 bp, Pseudomonas aeruginosa
atgggtaatccaaaggtgctggcaggcttgggcctgaccaacctgctgctgtgcacgctgctggctgaatggtggtggcagggcgcagcctgggggctggccgtttttgcgctcagcggttggagcctggcgcgcactgcgggcgcggctgaacagagcagtgaactcagtgatgagccaaacatcaacgccgctcagacccaacgcctcagcgacctgcaagccctgctgcgcggtgttatccccacgtggacgcagcatctaaacttggcgcgcagccaggtcggcgaggccattatcgggctgtccagcggctttgccggggtcagccaacggctattcaccggcgcccagcaaagcagcagcctgcaaggcggccgggcgatcgaaaccatccagcaggccgaacaggggctgcatcagatcatcgatgccctgcaccaaacccaggcctaccgcgccactctggtcagcgagatcagcagcatcgccagccacacccatgacctcagccgcatggccgagcaggtcggcaaaatcgccgaccagaccaacctgctggcgttgaatgcggccattgaagccgcccgggctggcgagagtggccgcggtttctccgtggtggctgacgaagtgcgcaagctctcgcgccagtccggcgaaaccggcaaacacattcgggcaaccgtcagcacggtgaccgaggccatcgataaagcccagcaaatctcggcgcaatttgccgagcgcgagcgcagcctggttcagctgtcacagagcctggccgaacgcatcgtcggcgacttcaacaccaccgcgcaagaactgcagtactcgctggatgagctgcaccaagaacgcagcctgctggaaagcgacgtcaatcaactggtcatgcacctgcagtttcaggaccgcgtcgatcagatcgtcagccatatcgtcgatgacatgcagcgcctggagcaggccggcggccaactgctcgatcacgacgcctgcttaccgcccgtacagagctggctcagccgcctttccgccacctacaccacccttgagcagcaggcgttgcacgagggtcagcacgccgccggtccagcgaataacgcctcgtctgtcaccttcttctaa

SEQ ID NO: 346784 - DNA, 627 bp, Pseudomonas aeruginosa
atgcctaaagagattgcagcgctgccaagctcattaccggctggcaccgtctttcttatcgacgacgacgacttcatcctgcaggtacaagccgaattgctgcgctcggttgggctggaggttcgctgctttacctcttcagccgactttctacgcgcctacgtcagcaccccccgcgaatgcatcctttctgacttgcgcatgcccgaaatcagtggattgcagttgcaagcgcgcctgattgagcgcggcctggatacgccgattatttttatcaccgggcatgccgatgtcgccaccgccgtcgaagccatgcgccgcggcgctttcgactacgtggaaaaaccggtgcatggccaacacctgctggaccgtgtctatgcggccctgaaactcagcagcgagcgttaccacgagcgccaggcgcgcatcacccgtgaagcccgcttagccctactgaccccacaggaaagtaagattgccggctgggttgttgcaggtaaatccagcagagaaatcgccgaactgggcaacatcagcgtgcgcacggtggaaaaccaccgggcccgcatcatggataaactgcatgtcacctccgtggtcgagatggtccgcctgctgttctga

SEQ ID NO: 346785 - DNA, 957 bp, Pseudomonas aeruginosa
atgaatcggctactccataatcacactttctaccctagatttgcatttcttcatgaaaatgaagatatatcttattctgagagtgagtatgtttattggagccatcgtttcgaattagctaaagcgccatcgcgattttgccctgagtgtgtgagagatgatattgcatatttagggttttcttactggcgaagagtgcaccatccagatatcaatgtatgtgccaagcataacgtgtatcttgaggctcagtgtccattttgttcagagcctttttcttatgaaaaaaatggattagacgtaatgtggaaggggtgcaaaggtttacatttaagtggagccccctctaggaaaaaccttgaagtttcggagcttaagaaggcagaattttttagagatgtttttaattatgagtcagtaatatctgttgatgctgtgcgtttggcattgacgcaaagagctgttttgaaaaagccgcatatacaaaaagagctattatccgctaaatatatgcatgaatgtattgagatactaaaggttgaattcaaggaagactggataatcaaaaatagtcctatatcatccttaagcgctgataatgtatgggccgcgacagtagctctttatgaaggattcgatgactttataaatcatgttaaatgctatgattatagacctaggaaagtagagtcactttggtctacatatgaacatggaacctataagttcgcccagtatatccaagaagattatgtatatggggtagggcactggtctagcactctttcgtcaaaagagttgatcgaatatcgcggtgagccattcggacggccaagactatatccctgttgtaatgacgtcccgccgttctatcagactggacgtctccagccgactccagttgggtggccacctccaagtgttcctatactggcaaagcatccgtcagagtattga

SEQ ID NO: 346786 - DNA, 318 bp, Pseudomonas aeruginosa
atgactgatcaggacgaagagcgctacgccgcaatcatggcagaccacgatgccgccattgcgcgggagttggatcaggtgcatgccgagaactcggccgtgctcgatcaggtgcaggcaatggtctcaccggaggccttccagcagatcaaggatacgctggccgattcgggcttcacccacagctaccagatcgccgacagcccggtgggcatgccgcaggacgatgatttcgtgctgggcaccgtgtacgtcaatcagaccaccaacggcggcttctcctgtgggatgcgaataaagattcatccgtacaaataa

SEQ ID NO: 346787 - DNA, 351 bp, Pseudomonas aeruginosa
gtggatagcgagattctgctttggatagctggtggcatgtttgtcttcctaatggtcggatatgcctaccgtgaggtgacatgccccagctgcggtaaatttttctcgaaggttgtcgacaaaaaggaagacataggcaggcgctacgaaaacgtctcggtggagaggcaggttaaaaagaatgatggagctgacccgccgaactttgagactcgcgtgaaggaatacgaactgacattcacgaagtatctcaagcactacagatgcaagagttgcgcggatacttggactgagcagacggaaagccaaactggcaagcgtttcctcagtgaacacacaagactctattga

SEQ ID NO: 346788 - DNA, 387 bp, Pseudomonas aeruginosa
gtggcgatgatcaccgggcgtgagtatgcagcggtgcggcagttgttcctcgatgcgcagatcggcacgcgcaagggccggccgctggccaccaacttcaccgaactccagaaggcgctggcgctgctaggcgtggactgccagcgaaagcgtttcgaaggttgggactcgatccagggcgtgggcatccttgcagtcgatagccgcgacggcggaaacaacagctggcactgggtggtggtggagcggcatccccgctatggggtggtgctgcatgacccggacttccctctgcccagtttcagcgacaagacgcctgccggcatccgctctcacccgttcaccgagtaccaggcccgcaagagctggctgtgcgtgacggactga

SEQ ID NO: 346789 - DNA, 411 bp, Pseudomonas aeruginosa
atgaacgaaatcttcgcagccggctttaaccgccagaacctcaaagtagcccgtgaagccattgagaaggccttgagcggcctcgatctcggctttgaagtgaagctgggcaacatttcattcctcgacgacagctttacctgcaagatcgaagcctcgctgccgggcaaggttgatcgcaagagcgagaaagaaaagcagatgcttgccagcatgggccgtatgtacggcatcgatgtcacccgcgaacccttcattaacggacgcggagtgtgcaagctggtcgggttcaacacgcgcgcaccgaaaaacccgtggatcgtggtgcatggggacggcaaacagtacaaatacccgaccgatgaagtgtcccgtcattggatggcgaacttcaccctcaagaccgagtag

SEQ ID NO: 346790 - DNA, 675 bp, Pseudomonas aeruginosa
atggtaagagacgctgagtgggaactcgcagtgaaacgtgccggcgcttctactgtgttgcactacatagtgtgtccacactccccgcccagattaggaacactgctcaaccggtatggacagccagtgctgaccaagtacgaacaagttgactggaaagctctggcctccgccgccaagtctgctcttgttggtgttgttccaaagaaaatgagcgcctacgtggccaatgatggtgtttgcgtaatggacgtgctgcacgtttcaacactaaacggcaggacattcacccatgcaccacagttcgaagataatgtccgagcggcactatctaagctcaccatgaaggacatgagagccggtataaccaaaatttccgaagtgaaacccggcttacacaacaacaccactgatgatggcatgaggcccccacttggagcgttgatcatgtcaatcaaataccagaacggaatgcagattcttgactatgccgatacagcaacaaatgccctgttcggagcccctgttgtaaggccaccgtttccaggttccagactaaagccggtaacagccaagatgcctcattacctcaagtcgtggcttgaggaccaattcggcgtcgtttatggcgacaagtgcaccatgtcaatcatgggaaagaccttctccttctga

SEQ ID NO: 346791 - DNA, 909 bp, Pseudomonas aeruginosa
atgcagaacgaagttaggctggctcgggccgagatgacgaaagcactggtggctatgtgcgccaggctcgacgaatccggtgtaagccatgctcagtacacgcacgagtacgcaggcgatgtcatctctctcttcacgcctgccaggctctgggtcttcggttcctatgccagaggcgctacggagtgtggtgacctggatgtactgatcgaactcgactaccaagccggcccatgccctccggcagaagtggtggccaatgtcctgttcggtgaggtcggccggctatctctattcctgggaacgccagagcagaacaaagctgggttcgacattaccgacgctgtgctgatctggtcagggaagggtagcgattggcggggtgccattgactcgatcaatgtcgatacggatgccgggcgctttgagcgtgaacatgaccagttgccactccggccacaacagtttgctgccggtatggatacgcggtccctcgtgtcgtgggggattcgcaacggagtattcgacagtcagttcatcccgctggaaagcctcgatacctcagcgttcgaacctgaagccgggaatgaagcggtccttgcaacgctggcccactgtcccgaccagcaaacccaagcgctgataccggcgatctacaaagccattgagccgttggaacccaacgcccctgtggtgccaggcggggaggcagacttcgcgtgcggtgcaatcgtgatcggagtagggaagccgtacctgatgccctggcatctggagagtgatgccgtgagccatctgctcctggtcccgcatatctctgaacgggggccaaacgggatctggattctcagccgaggccctgagtacaaacgccatcaggaaacataccgagaaatcgaattcttctag

SEQ ID NO: 346792 - DNA, 639 bp, Pseudomonas aeruginosa
atgaagctttgcgccctgcaactggcaacccagctggtcgatacgctgccggtcggtaggccggggctgtttaacccttggcggcaaagctgcccacatgacctgcccatcaacaccatagagaacaagatcgcccgtctggccgctcacctcgattgcgatgccaagctgatcctcgtaggtgaagctcctggctatcaggggtgtcggtacagtggcgttgcattcacctccgagcggctactgcttgaagggaagattccgcggatgccggagttgcagggccggctcactgatcgagggaagccattcagcgaaccttcagccactatcgtgtgggggaaactcagtgagctgggggtcgccggcgacgtgattctctggaactcagttcaactccaccctcatcaccctggccagccacacaccaatcgcacaccgtccgatgaagaggttctgcttggccttccagcgctcaacctgctccggctgcattacccgactgctacctttgtggcggttggcaacaaggcagacgacatcctccgggcagcgggtatttccgcgaccaaagttaggcacccagctaatggtggggccaacaagttccgtgatggtcttgaggccatcatccactaa

SEQ ID NO: 346793 - DNA, 741 bp, Pseudomonas aeruginosa
atgaaccacaacacagtcggcatggccatgtgccggattaccgaagacctcctgtggaaaccacggattggctgggccttaaaacacaaccccaatgccagtcttacggtgcgtcttgggagtggccgcaagacctgcctcacccatgctcgggatgtgcggcgcaatgctgatatgaccctgacctatgggatcaagatgatcgccagcaagtcggacccggagaacatttgcaaatggctgaccgcaaaagaggtgcatcagcgcaaatacttccagggagagatcaacctcctgaatgtcctgacgcacaccatggcccacgagttcggccacttcgtccaggtcatcctcggccgcagatacgacggctcggtacacaatcccgagttctataccatcctcgatcggattcaccagagcagtgaggcggataaactccgcgacgccctccatcgacattgcttgaacagagggatcgaccttaccaagtttgccgccagtacggccgcactcaatgagctcaaaggcctgcgggaagatgggcaaaaacacctgaacattcgtcagctgcgcagacgccagttggtcatgttccgtgacccggctatgaagcatgtcggactgctgcgcgtcgtggaaaccaagcgaacccgcgttatcgtcgagcaagtttcaccaccaaacggcaagtggagtacctatccgcaaagcctcgttattgctgaggaagagttttga

SEQ ID NO: 346794 - DNA, 225 bp, Pseudomonas aeruginosa
atggagaggactggaatgcttagcacccgtgtgatgcgtcccaccgcgctggctgttgccgttgctgtgggcctgagtggctgtgccacgattgatcgtaccgtcgccgagaacgacagctgggttagctgcgtgggtggcggcctgatgggcgcactggctggtgcagcggttggtgctgcgacaaaggggagcccgcagaattcggaaaaaatcgtacgctaa

SEQ ID NO: 346795 - DNA, 489 bp, Pseudomonas aeruginosa
atgacgatccttgaacgcttctacgcttctggcgggaaagaatgcgcgattgcaacggtcgagctgacttgccctatctggactgctcctatcttggtgtgccagggcttcgaggatcagacctgcgttactgaggatgggcgtacgctgacctttttggcttctggcatcgatgtatcaatccctaagcgagataacagcgggaaccagtctgtcgggttcgccatcgacaacgtgatgggtatcgcccagcagcgtatcaacgaggctattgatgccggagagacgattacgttggtgctgcggatctatctcgacaccgacctatcagcgccggctgagcgcccataccgaatgcgcgtgaagggcgcagatttcgaaggtgtaactgtccaggtcgaggccggatattacgacctaatcaacactgcggcttgccggctgatctatgacgtactgaatttccctggactgaagtactggccctaa

SEQ ID NO: 346796 - DNA, 465 bp, Pseudomonas aeruginosa
atgattcagtacccgaacatttgtccgccattgcgcgagggctatgggttcaacccagtaagcccgctggctcgtactgagcttcaaagcgggcgtgccaggcagcggcgtagattcaccagcgttccaactatggcgtctgtccgttggcggctaacagataccgaggcgatgctcttcgaggcatggtttcgtgatcagttggttgatggctcgcagtggtttgaatgccctctcaagacgccagaaacgccgaatggtttgcggacatacatagcgcgattcacggatatctacgacggccctgacctggtgagcgggagcctttcgctttgggacttcacggcgaccctagagttgcgtgagcgcccgatccttgatccaggttggaccatccttccggaattcatcctgcatccagacatcttcgatatcgcgatgaaccgggaatggcctgaagcatga

SEQ ID NO: 346797 - DNA, 1401 bp, Pseudomonas aeruginosa
atgccgcatgagcgtcctctggtagcgatggaagctgagcagggtgtgcttggcgcgctgatgaagaaaccggaactgtgcgaggttgttggggctttcctttccccgaccgacttcagccatgccgacaactcggtgatctacagcctgatccttgcctgtcattcgaaggccatcgtgcctgacccgctttctctggcggaggctaggtcggagcttccaagtggcgcctttacgcttgcatacgccaacgatctatggcgcgaggttgcaagcacagctagcgccgaaaacttcgccaggattgtcgtcgagcgtgcaaaggctcgggagctgtacgaagcgggcgaacggatcatgaacatcgcccttcagagagggaaaatcccggaccaggtggctgaagcgcagagcatcgttctcgatctcaacgcccaggacgagactcctgatgtggtgacactgcgcgaggcaatgctcccagtcttcgacgaaatggaagttcgctggaagggaactcagtcggtcggactgaagttcaacctgccagacctcgatgccgttatccagggattgcgtcccggcaacctggcaatcatcgctggtcggcctggcacgggtaagacggttctcggggtggggattgctgacgaaattgccgttcgcaaccggggcgccgcgttgatcttctcgctggagatgtctcaagccgaacttgcaaagcgctcgctcgcatcgctttctggtgtttcgcaagcggcgatcgactcaggcaaagcgctggagtgccaggactctattgcgcgcatgactgccgcagtggaccaagtctccaggggtgatgtgcgaatttgcgacaagggaggactgactttcagtcggatctgctccatcgcccgattccagcatcgagcaaagccgctgagcctgatcgtcatcgactatctcgggcttatcacctcagatccgagtcaccgtcatcagaaccgaaaccaagaacttggcgccataagccgagggctcaaggctctcgccaaagagcttggcattccaattgtcgcgcttgctcagctcaatcggagcatcgaaacccgggccgacgccaagccaaaaatgagcgacctgcgcgattccggcgagatcgaacaagacgccgacgtgatcatcatggctcaccgggatatgagcactgagcgtggacagaacggtatcaccgagcttgatgtcgtgaagtgtcgacacgcaaagccgggcttctgcctgttgcagttccagggtgagttcgcgcgcttcgtcagttgcgcccaggaccgggaagagcagcaggagcagacggttcgtccgcagcgtccttccgcgcgatcaatggtagctgacttcaagccgcgaggtgcccaatga

SEQ ID NO: 346798 - DNA, 600 bp, Pseudomonas aeruginosa
atgaagaaaggcctgattcgaggcgtaggaagaaatgacgccgactacaacgtttaccagttcatcgacggggaacggcacatgtgcccgttctacagccgttggaaaggaatgctggaacgttgttatgggaagagatacgaaaacagttctgcctatgtggactgcaaggtcgatgagcgttggctttcattcatggcgttccgcgagtggatgcaagaacgtccatggaaaggaaaccatctggacaaagaccttctccggccgggagacaagatgtatagcccggacacctcggtcttcattcctgcctggctaaacaaccttttgcatgacggtcacggatcgtttcgaggattaccgactggcgtttcgatcatgcgccacaaagaacggccgtacatggtgcggatttggaccatggaaggccgaagagcattcataggttcgtacccaactacggatgatgctcatgcagcctggaaggaggccaagtcaagagtcgtacttgaggcagtcgacaggtatcgccttaccgaacaacacgatgagcgcgtatgtgatgcactcatcgagatatcgcagagattcgcggcctaa

SEQ ID NO: 346799 - DNA, 693 bp, Pseudomonas aeruginosa
atggcggagagaaagaccctgttgctgaccggggcgagccgcggtatcgggcatgccacggtgaagtacttcaatgccgcgggttggcgggtgttcaccgcgtcgcggcagagctgggccagcgaatgtccctgggcggacggcgaggaaaaccacatccatctggacctggaggacattcccggcgtcgaggccagcctggaactgatccgcgagaagcttggcgacggccggctccacgcgctggtggacaatgccggcatctcgcccaagggcgaaggcggcgagcgcctcggtgtgctggaaaccgactacgccacctggctgcgggtgttcaacgtcaacctgttctccaccgcgctgctggcgcgcggactgttcgccgagctgaaggcggcgcagggaacggtgatcaacgtgacctccatcgccggctcgaaggtgcatccgttcgccggggtggcctacgccacttccaaggcggcgttgtccgcgctgacccgcgagatggcccacgacttcggcccgcatggggtgcgggtgaacgccatcgcgccgggggagatcgacacctcgatcctgtcgccgggcaccgaggagatcgtcgagcgcagcatcccgctgcaccgcctcggccggccggaggagatcgcttcgctgatctacttcctctgcaccagcggcgcatcctag

SEQ ID NO: 346800 - DNA, 147 bp, Pseudomonas aeruginosa
atgggaaagatcgagcgtggcgagcatgtccccacgctccccctcattctcaaaatcgcccgtgcgctgaaatgcagttctgcccacttgatggcgctgactgaagccaagctggcagagacggctccgcctaaatcagcggactga

SEQ ID NO: 346801 - DNA, 618 bp, Pseudomonas aeruginosa
atgggcaacccgcccgcacatgcgcttcgtgccggtgaagacgccggcgcagacgctgctgaccacccatcagctgcgcaaacctcccgattcactcacgcagctgattcctgcttgcctagggacgaccatgtaagccgcagatggtcggagtcctttgcgaccagcacctacgtgagcagcccggaggtggggatgcccttggcgatgatctccgccgggactggcgcctgggtcagcgttcggcacctgtgcgcaggtccacttgccgcggatatggcactctaccgtgaatacgcccggtgtgttgtccagcttctcgctgatgcgcttgagcgcacagccgcacgcgcagcgagtgttctcgggctcgtggtggcagtccacgcgcggcaggtccgccggcaaggcggtgcgcttaggcatcgcgccaggcgtagccggcggcttcttcttgcccagcagttcctggagctgcgcctcagccgcggcaaggtcggcgtccagagcctcgtcgaacagcgcgcgttgttcggcatcgagctgctcgctcttcttgccgaacttcaggcgtcgcagctgggcgatctcgaacgagagcttcgccgtaggcgctga

SEQ ID NO: 346802 - DNA, 501 bp, Pseudomonas aeruginosa; identical to SEQ ID NO: 341455

SEQ ID NO: 346803 - DNA, 534 bp, Pseudomonas aeruginosa
atgcgaactgagccgatcggcatggccgtggccgtgctcttcctcctcgcgtccggccaggcctgcgccggcaccgttggcgaactggcggagatccaggcccaggccatcctcaccgaggccaaggtgcgtctggccacggcgcagcggcaactggagggcaaaggcgaaaccggccagatcgtcagcgcccaggggcagacgttcgccatgccggtgccggcggcgccgccgacgatcacgcagccggttccgccggtggtgcggaccatctacggcgccggcggcaagatgactgccacattcttgttcccgggcgggtacgagattgacgccgccagcggcgcggagctgccgggcaactaccgcgtcgagtcgatctccctggaccaggtcgtactcaccgacaaggacggcaaccgcgtgcccgtgggcttctccagcgttgcccccacccaagccgcctcctcggcccaaggcgcctccgttccgccggcgctgcccggggcggtaccgcagccgttcatccagtag

SEQ ID NO: 346804 - DNA, 777 bp, Pseudomonas aeruginosa; identical to SEQ ID NO: 342029

SEQ ID NO: 346805 - DNA, 210 bp, Pseudomonas aeruginosa
atgcccttcgacgacaacgccgcataccgccgcataaacgccctctgctcaacccctgcgccagcccgctacctccacctaccaacaggcatccactgggtcgtcatcgacagcctgggcaatgtcctgcaactcgaaaacatcgagcgccggcgccgactgataaccgtttctgacctcgaaaccgaggcctggagaaagctcccatga

SEQ ID NO: 346806 - DNA, 300 bp, Pseudomonas aeruginosa; identical to SEQ ID NO: 324438

SEQ ID NO: 346807 - DNA, 291 bp, Pseudomonas aeruginosa; identical to SEQ ID NO: 324439

SEQ ID NO: 346808 - DNA, 1977 bp, Pseudomonas aeruginosa
atgagccgtccacgtctggtcaaccgtacctccgcgactccttcgacgcttctgcagcgggctatcttcgacggctacgacttcggcttgaagatcccctacatcgcaggcagcaaccgcgcgctgctggaactgtccggcttcttcatcagcgcccgggagcatccgttgcaccgctactggcgggtccccaagggcaagttgctgcccgaactggactcgctgtacaaccgactcgccgagctcgctggaggcctccactcacagtcctggcgggacttcagcggcatggtcgaatctgcacaggcctcgcttgaccgacaggccttcacctggggtttgctgctgcgcatcgcgccgctggccgagggcggcgtcttgctgtcaggcgagttccatcccggtgtggtggcggtggctcggcggatgcgcggggtgttcctgcgcccatcgagctcctggcgcatcgacgccacacctgagctgctccgcagcaacctgatcctggagcttggcctcgccgaggaacaattcgagatactggataccgtccaggagctgctcagcgacggtagcttcgcgccggcgaccgagctgcccagcatgagcatcggcggtccacagcaggaaccggcagcgccatccctggaggacgagtcagcttgtgacatctacctcgccgcggtgccagagatcgagcgcaccgagtacagctcggctgatatcgaggcggcgcttcagggctactcgctactggcccaccagcctgccggcatcgctcacctgctgcagagaaccagcgccctgttggccgacgacatgggattgggcaagacccgccaggcggtcatcgccgcttcgatccgagcggcgggcaggccaattctggtcatcaccctggccaccctgttgatcaattggcagcgcgaaatccaggaggtctatccctcggccaccgtggccatccagcaggacaacccagaggcgcagtggatcctggtcaactacgagcagttgagccccttcgtcgccaacgcttcgcgcttcgccgtgatggtcatcgacgaggcgcagcggatgaaggaaccgacggcgcaatgcacgcggcacggtttcgacattgccgcccaagtgccgaaccgctacctgcttaccggcacgccggtgctcaaccgtgaaaccgagctgcacaccctgcttcgcctctcaggccaccccatcggccaactgccgctgaaagagttctgcgaccgtttcgccggcaacccggagttccgccagagtctgcgggcggagctgggtgactggatgctgcgcaggcgcaaggatgtgctgcccagcctcaagggcaagcagcggcagttgctgaaggtggccctctccaccgaggaacggcagcagtacgacgtgctgcgcctcgaggaccgaccggtcttcgcgcgactcggcgcgctgcggcgttacctggaaacggtgaaggttcgcgtggcgatggacctgctgagcgagctcgacgccgaggacaaggtgatcctgttctgcgagttcaagccgaccgtggctgcgctgaaggaactctgcgagcaggccgggctcggctgcgtcacgctggtgggcaatgattcgctcaccaagcggcagaaggcgatcgatcgcttccagcaggatcccgactgccgggtgttcatctgcacaacggcggccgccgggacgggcaacaacctcactgcggcgaactacgtgtttttcctcggtctgccctggactcccggtcagcaggaacaagccgaggaccgcgcgtaccgcaacggccagctccgcatggtcgtggtgaagatcccactggtcgagggcacgatcgacgagcagctgtggcaactgctcaacgcgaaacgccaggttgcccaggacctcatcgagcccgagcaggtcgacggaaaccgtgcgcttttggccgcaagccttgccgaacgctga

SEQ ID NO: 346809 - DNA, 273 bp, Pseudomonas aeruginosa; identical to SEQ ID NO: 324362

SEQ ID NO: 346810 - DNA, 1512 bp, Pseudomonas aeruginosa
atgaccttcatgaccaatgactacctggagtattacctcaccctcctcggttggatcatcaacaacgggatctggaacatgatctcggatacagggctgttcgcggtgcccttcgtggccattgtgatgcgtgagtggctgaaagttcgcggggaaggcgccgacgagggcaacaagggcgtgctgtctctggcccgcatcgagacgcatatctacgtcggctatattgtggtcgcccttgcgggcatcccggtcgtcaacgtgagcttcgacaccatcgagttcgaccaggcccgcgcccagcagtgccagtacaacctgccggcgccggcagacaccggctggtcgacctctttcagcagcctggccggcaagagtgcgcagatgccgctctggtgggcgatgatgcacgccctgtccaagggcttcaccgccggcgcggtcgcggccattccgtgcggcacggatctgcggcagatgcgaatggaagtggacaatacgcgcgtgaacaacccgctgctggcacaagaaatcgctgacttttccagggactgctacggaccttcccgtgcgcggctgttcatgcggcaacccgatctgggctccgtcggcgaggacaacaaggcgctgcaggacctgaactggatcggctcccgattcctgttgaacaccccggggtactacgacaccgactactcgaagagtccccgtcagtcgtggccctacaacgccacccgcgacgccgggctgccccaggtgggcggtggtggtggctacccaacctgcaagcagtggtgggctgactcagggatcggcttgcgtgatcggatcaagggccaggtggatccggacctgatgaccagcttcctcaagtgggcgaaatggctgaaccaggacgaggtaaccgaggcagtcattcgccaggtgatctccccctccagccaggtcaagggcaacgtctacaccgattacggcgggcaggttggcggcaccgtctggaacggcatcgcgagaaccgcaggaaccttcggcgttgccctgggcagcctggcctatttcccggcgatggatatggtccgccaagcgctgccgatggtgatgtcgttcctcaagatggccatggtcatctgcattccgatggtcctggtcatcggcacctatcaactgaaagttgccatgacgatgacggtcgtcttctttgcgatgatgttcgtcgacttctggtttcagttagccagatatatcgatagcacgatacttgatgctttctatggttcgggatcaccacatctttcatttgacccagtcatgggactgaatacggcgactcaagatgcaatcttgaacttcgtgatgggggcaatgtttattatattaccgctattatggattactgcagtaggatggtccggcatacaaaccggagcaattcttaatgggcttgcagacggaaccagaggggttcaagaggcaggtgggaaagctggagagagaatcgaacgtagcgtgtaa

SEQ ID NO: 346811 - DNA, 159 bp, Pseudomonas aeruginosa
ttgagcaatatccaaatcgtagatctgcccgccctgccggaagtagaggaagtttgcctctctgacatcgaggacgagttgctgctcagcaggcatttctgcaacttcgcctggctgttcctagccagcaacaatgcccaggtatctgccctggcctaa

SEQ ID NO: 346812 - DNA, 222 bp, Pseudomonas aeruginosa; identical to SEQ ID NO: 327126

SEQ ID NO: 346813 - DNA, 384 bp, Pseudomonas aeruginosa
gtggagatcgccgagatcagccaagacagtgaaatgctgcgctctatcaagatcatctcgacctaccctgatctaccggcgcggatcctcgagcttcgctcactgacccttgacgatgagctggacgcaacaatcaccttgaccaccgcacacaaggccaaggggctggaatgggatttcgtctgcctgtacgacgacttcaacgcggacccgctggcccccgacaccgacccaggcaagcgcgacgatgagttgaacctgatctacgtcgcagtgacccgcgcgatgaagatcctcgccatcaacagcctggtgctgtcgatcatgcagcggtacgtggacgacagaaagctgaaggagcagatagctagctgtgaaaaatga

SEQ ID NO: 346814 - DNA, 867 bp, Pseudomonas aeruginosa
atgaatgcgaaagcgacttcggttgtatccaccaagggtggtgtagggaaatccaccaccgccgccaacctcggtgcattttgcgccgatgctggcctgaagaccctcctcatcgacctggaccccgtccagccctccctatcttcgtactacgagctacctgaagtcgcccagggcggcatctacgacctgctcgccgccaacataactgacccagcgaggatcatctccaggacgattatccccaacctggacgtcgtgatttccaacgaccagaacaaccagctcaacaacctactgctccaggcgcccgatggccggctccggctggcaaacctcatgccgtccctgaaacagggctacgacctggtgctgatcgacacccaaggtgcgcgctccgctttactcgaaatggtcgtgctcgcatcggatctggttgtttcccccctgcagcccaacatgcttaccgcccgtgagttcaaccgcggcaccatgcaaatgctcgacggcctacgcccctacgagcgcctcggcatgcggatccccaaggttcagatcgtcatcaactgcctggaccagaccaatgactcccgtgcgattcacgagaatgtgcgtgccatcttcgatgagcatcaggacatttctgtgctcgaaacgactgtcccggatgccgtcgtgtttcgcaacgcagcatcgcgcgggctaccagcgcaccgcctcgaaacgcggcaaccctcgaatcgcacatcagcgcccgcgctggaaatcatccgtaacctggccatcgaggtctttcccgagtggactgaccgtttcctcgcgctgacgccggaggcggtagcagcactggtcaagggagggcgctga

SEQ ID NO: 346815 - DNA, 933 bp, Pseudomonas aeruginosa
atgattgcggaccagctgcagggcattctcgatgacgccgataacggtgcggtgaatgaaagtgcggtgaggaaggtccgccgggagggactttttcaccagcgtctgcgggcccaatccttgaagtttccgtgtctcgcccttgtaggagaggatgatgttggccacgtgcgcaatcgcggggccgaaccgccagctctgggtcaggtagtgctcctcggcgccgaccatccagtcgctgttcagggcatcttccgcgcccctgaaccggtagagctgctgatggggatcgccgacgatagccattctgatgcgctgccaatgggcaatgtccgcgatcactgggttgatgtcctgtccctcgtccaggagcatgcagtcgaagcgctggctcaaatcgggcttgctcagttgatacagcttcaggtagccgtcatggggcatcagcatgccggtgtcctggagatctaccatgcgcctccagactactcgcgccatgtccaggccctgcttgaggaagcgttcctgggcactggtgaggaacgccttgtcgcggaagcgcgggaagtgcggtcggccgagttccgcgtcggcgctggccatgtagttgttcagcgtggccagcacgtcacgtaccaactcccagtcttgggtatcgagtccgcgggcgatatcggtcagacgcaggttcttcgtcttcttgtgggcgtactggatgccgtacaccgcatgagccaggctgtgggcggtcttgcagactacgttgcggggaaacttgcccttcgcggctttctccaccgagctgttgtagcagagatagaggattctcagggtagggttcgccttggcaaagcccaccagggtggtcgtcttgccagtgccggcgaaggcccgcaccaggatcttcgatgccttcgactggatgatcggtga

SEQ ID NO: 346816 - DNA, 177 bp, Pseudomonas aeruginosa; identical to SEQ ID NO: 335283

SEQ ID NO: 346817 - DNA, 723 bp, Pseudomonas aeruginosa
atgcctatcaaacacgccatcgtccacctgatcgagaagaagcccgacggcaccccggccgtgctccacgcgcgcgacgccgaactgggcgactcccaggccaccgagaacctgctggccgacctcaacgaaagctacaacgccaagaacaaggcctggggcttcttctacggcgagtccggcgcctacccgttcagcggctggctcggcgagtacctggagggcggccgcgacttcgtcggcttcagccgcgaagcggtggagcacctgcagaagctgatggaagagtccaacctctccaccggcggccacgtcctgttcgcccactaccagcagggcatgaccgactacctggcgatcgccctgctgcaccacagcgaaggcgtggcggtgaacaaatcgctggaggtcaccccgtcgcgtcacctggacctcggccagttgcggccgcgcggatcaacatttccgagtggcgcaacaacaagcagtcgatgcagtacatctcgttcatcaagggcaagggcgggaagaaggtcaccgactacttccgcgatttcatcggctgccaggagggcatcgactcaccgggcgaaacccgcgccctgctcaaggccttcagcgacttcgtggagagcgagggcatggccgagcagcaggcccgcgagaaaaccgagacgctggtcgactacgccacctcccaggcgcgcatcggcgagccgatga

SEQ ID NO: 346818 - DNA, 210 bp, Pseudomonas aeruginosa; identical to SEQ ID NO: 324442

SEQ ID NO: 346819 - DNA, 381 bp, Pseudomonas aeruginosa
atgaacgcacacgccaacaaaggttttgcttcccgggtcggttatgctctgggtatgcttgtgcgcttctgcttgcatgatcgtcggcctgtcgtgcgctgggtcaagcgaacctgcttggtcgtggtgctgttcgttatctttgctcagaactttacctggttggccagcgctttcatgactttgatgtcgtttgggttgtttggattgctgctagtgaagggtggctcaaaccactcaaatagtggaatcaccagggaaaataataatttccttggtagtcgcggctatcgagacggtgactttggttatggttactacgtggatggagtgcgcgtagatagcctttttgaagatgaagagcctcaccatcgctggtag

SEQ ID NO: 346820 - DNA, 624 bp, Pseudomonas aeruginosa
atgagcatcctgaccaataccccggtttcttgggtagacgtcagagtgaacatcgacgtcatggagaaaatcctggccacagccgagcgcagcgcgcaggaagagctgcagatcgaacgcgcactgaagctgggagccaccacaacgatgattcagagctttttcggtctgtcgccggaggacaccgccaccaagcgcttgatcctggagatccacccgcgccgcggtcgctggcggcaacttgacgaacagaccgaacgccagatttggttccgctgggagcacctgatgcaggaaaaccaggtccgcctcgaggacagcatggagttgctggacatcgcgatgatcctcaccgaggaagtcaacgccggagtcgaacaagacagtccagagttcatcagcctcgccatcgtttggtctctcatccagagctggttgaaagacagcctctaccaaccaaacaggaaagagcaggccaagcccgccaccctttacctggccaacgtcagcgctcacctcccctcgcctacggctcacccgccacagagcccccgcttggagattgagtctgcgcagcagcaactcctcaacctggttcagtccgaaggcgatacgacaccatga

SEQ ID NO: 346821 - DNA, 528 bp, Pseudomonas aeruginosa
atgaacactgaagcccgctttccgagtatccacgcctcggccgcgttcaccgactcggcggtggttcatgccaatcaagttggggtcaatccgatcgaactggacgccctcagccaagtgatctcgcgcctttcgcgggacgagagcacggtcgcacccagttcgatggagcgagagcttcgtgagctggaggaactggggtacatcgaaatctcgaccacccaggccggaaccctggtggtcactacgcgcgctccggggcaactgctttcggcctacttctggtcggtatggatccctcgccacctgttcagttgctcgctgaaagtgagcctggtgccgcacctctgctgcggcactcaggactcacagcacctcaccgccgtgttccgcattgcaggcagcaaggacgccgcgcgtgagttcctgcatcagttggccaacaactatcccgggcatgagccggagttgcccgaactggtggccgttcaggtcggtgatgcactcagcaaggaggccgaatcatga

SEQ ID NO: 346822 - DNA, 558 bp, Pseudomonas aeruginosa
  misc_feature (34)..(34): n is a, c, g, or t
atgggcgacgcctacgacggacgccaggagttcntcatcctcggccgcgtgcggatgcggatgggtttccactggcggctcgcctgctggaagaaacgcgccgccggcggccaactgctcgctgcgtgcccggattgcggccaggtcctcgaggacctggaaggcaacctggtcacggtggaggagttcgagcgtggtgatcgtcgacgtacctgctcctcctgccgtggggcgctctggacgctgatccggccaggcaagcccgacggcggaaaccggcgcgcaacgatcctcaagtcgatgtgccggataccaaccatcggcccggtcagggcggagcgcctgctgaacgacttcggcgaggacttcctggccacgatgttggtggacaacgtctcggagttcatcaacctgatggacgccaagggcaacttcgtcttcagtgatcggcaggccaaacgcatggagcgatcgatggcgaacatcgagttcggcttcggtgaaggcggctaccaaccgactgagttcataaaaagggtgcgacgtgaagtcgtctga

SEQ ID NO: 346823 - DNA, 234 bp, Pseudomonas aeruginosa; identical to SEQ ID NO: 330735

SEQ ID NO: 346824 - DNA, 174 bp, Pseudomonas aeruginosa
atgctgcgttccgcgcatgacgacctggcctgcagccgacagaacgatcgtcgctgccttcaggaactggtgaaacgcctcctgactgctgctgccaccgacagccttccccgctccctggcagagatggagacctggctgcagctcaacagcgaggagaccactgatgcgtag

SEQ ID NO: 346825 - DNA, 303 bp, Pseudomonas aeruginosa
atgaagaattcgatgtactggacattcaatcttccgctccaaatctggccgatccacaaagacgaggatgacgagtctagcccaatcattgactacagagtcctcaactacatgccacgcaatgagtggattagcgagacatttctttctgaactgatctccgatattgatcaggatcgagaagagtttcttgaaacagcggctcttcatttcgagaaccttgctcgtctcttcagatcatcgaagctcgatcctgggaaacatatctattaccacgatgatggtatggagaagaagtcatga

SEQ ID NO: 346826 - DNA, 258 bp, Pseudomonas aeruginosa
atgaaaatcactgaacagactgagattgatgtctggagagcgcccgtgagaaaagtaatggtgttacgctggagcgacgatgaaacaaatcctgtgaagattgattatatcgaagcaatttttcacagattcacaattgacagttgcatagatgaggggcaagtgctgacctacccggcagcgataattgaatggccggacggaagggtaaatagtctctacgtggagttcattagattcttggattcttcgaattag

SEQ ID NO: 346827 - DNA, 990 bp, Pseudomonas aeruginosa
atggatgcgaaaaatcttgcagttctgatgcaactgaagaaggcgatggagcaagaggagcctgtagggaggctcaagaaaacggatgtaccagagcagggcttcagtggagagtcggaacaatggttcgcagagcctgctcagcagatatccagtgatctctcaggcaatatacttgctcctcaagcagagactttgggcgaacaggtaattgatagtattacctaccagcttcgtcaggagttctccaggctaaatcgcagcgccaattcgattgactccctcaggcatggcgagactctcattaaaggccagtatgaatgtcgtgccgctaaggaaaaggagggagataagttacccgtcacgaaacctgctagtaagaagccgccattaagtccaccaaagtctgccgatttgagggtttctggcatacgaagcggtaaatgcttttttagagatgtatacgttagtcgagcccagtacaaggctctaaaagaatctatggatctaatgatttacggaaatgataatggagccctgattaagaagtttgatgctctgaccttctatctatcccaagtcagggacgaccatgaggcgatggctgtatacgaaaaaatcttctccatactggagtctgtcaagaatgaccgggcaggaaaggcgggtaagccagctctgagtccggatagagtgcgtcgatttactcgtattcgagaagaggttgcaaagcttgccaagccttctaaggagcttcagggcagcaatgatactcctgactggattgcccgttcttgtctctggtgtaattcgaagttcttcgtccacaaggagtgggtaaagccgccaacaaggtgtaagaactgtcgcgaaaaattgcataacagacaatggtccaagggggcgaagaaagctaagagtacaaagactgtgtacagtcattacgtaatctacagcggtggatctccagggctcggaaagcggcactaa

SEQ ID NO: 346828 - DNA, 219 bp, Pseudomonas aeruginosa
gtggaagtctgcgacgcgatggtccacggcggcccgtacccggccacttcggacgcccgcggcacctcggtgggcaccctggccatcgaccgtttcctgcgcccggtgtgctaccagaactacccggacgcgtggctgccggaagcgctgaaggatggcaacccattggggattgcgcggttggtggacgggatcgtgacgcgggcggcggttgcttga

SEQ ID NO: 346829 - DNA, 366 bp, Pseudomonas aeruginosa
atgttcgataacgatcggctgttgcttcgcgtgctgctgttcggtctgctcggtgccagtctctgggtgctggcgccattctggtcggcgctgttctgggccgcggtgctggctttcgccagttggccgctgatgcgcatgctcacgcgcctgctcggtggccgcgagtcgctggcggcgggcctgctgaccctgggctggatcgtcctggtggcattgccgctgatctggctcggcttcggcctggcggacaacgttcgctcgctgatggagctgctgaagaatctccaggtcgagggcctgccgccgccgccttcgtggatggccggcgtaccgctgatcggcgaccgcctgatcggctggtag

SEQ ID NO: 346830 - DNA, 1074 bp, Pseudomonas aeruginosa
atgcgccgcctccagcacgatgcgttcgcgcgccgccaggctctgccggttgaccagttcctccgcgctgcggatctcggcgctgccgccggcgtaggtcttgccattcagctccacggcctgggccgcgatcttcaggtcgccctggctggaggcctgggccagactcagcttgccgctggcgtcgatgcggatgtcgccgccgctggcggccatgtcgccggccagccgcacccccacgccctgctcggtgccgaccaggcggatcgccccggcgtacatcccgcccagcgccgagctgtcgatcgccagctgcggcttctcgctgccatcggcggcgcgcggcgtggcctgcaggctgtcggcctggacgtcgttgcggccggtgacgatgttgaggttcttcgcgtagagcttggcgttgagcttggcgctgcgggtgatcaggtcgaactgttcgaggttgccgacgttcagttcggcgccttcgacgacgatgtcgccgccgtccacctggaagcgctccaggcgctggccgtccatgatcggcttgccggtggtgagggtcgcgcgcggcgtgttgatgaagccgcagccctggcaggtgatgccgtgcgggttggcgacgatcacccgcgccgactgcccggccacctcggtgtagccggccagggtgctgcggttgccgccggtgacctggttgaggatcacctgcgccgcctggcccttgaggttggggttgccgaggatgatcccgccgagctgggtaccctgggtcttgccggtagcgttgttgaggatcagcccgttggcgccgacgttgtagtcgcggaaatggttgttcgacagcccggcgtcgttgggcgtggcgatattgacgatgggcacgccgttgcccgcctggcccaggccggtgttgccgccggcggccttgtccagcgccagccccgccgccgcggcgacgatcgggttgaggaacaagatgccggccagggacagggcgatgcactggttcagcgggctgcggatgtccatatcgttactccttggcgggtaggggcccggcgaggttaa

SEQ ID NO: 346831 - DNA, 702 bp, Pseudomonas aeruginosa
atgcctaggcaagggcgagtggttttaccgaattatccgcttcacgtggtccagcggggacacaatcggcaagtggtattcgccgaggacgaggactaccagcgttacctctccgatctacgggacctcaaggatgcctttggtatcaaggtctacgcattttgcctgatgaccaaccatgtccatctgctcttggcgcctggtgattcgctgtctggcttggcgcaactgatgaaaacgctggcggcgcgcacgacacgatatcggaatcgcttggagggccgttccggaacgttgtgggaaagtcgctataaatcgagtgtcgtacagagcgatgcctacctgctggcgtgttgccggtacatcgaactgaaccctgttcgggcgcggatggtggacgatgtggcggcctatccctggtcaagttatgggctgcgggcggattggttgaaggagccaaactggttggatatggatccctgcttcattgagctaggtcagacggccgaagagagatatcggcgatacgtaacgttcatgaaagaggcgataccggccgaggaattgaggctgattcgcgaggcggttcagcgtggacaactgacgggcaatcaacggttcgtggacgagatcgagcgggtagccggggtgagaatagagcggcgtgggcaagggcggccgagattagagcaggaaaaataa

SEQ ID NO: 346832 - DNA, 516 bp, Pseudomonas aeruginosa
atgaggttttcccgaaacggtttttcccgcgttctgcggcagcggcagacagaggcggagcgggcgctatggcagtgcttgcgcgggcatcgattgctcgggctgaagtttcgtcggcagaaggttctcgggccgtacatcgtcgatttcgtctgccgtgagcggatgctggtgatcgaacgggatggcgggcagcatgtgggttcgccggccgatgcctggctggagagccgggggtcattctggaacgacaacgtgctggcgcgcagggaggtggtgctggaggtcattctgagggctgtggagtcgtggggagagggcggcacgaaggaaccttctcgtgttgtcggaggtttctgtcgcgaaaccgctttgccgagtccaagcctagattttcctgctctgcctcaatcccaatgtaaccactccgtgacaaacccggatcgcttcgttacccgcgacgcggaacgcttgaatagactcggagcattgcaagcgcagacttgctccgaataa

SEQ ID NO: 346833 - DNA, 579 bp, Pseudomonas aeruginosa
atggaacactcgcgtttccacgccgcctccctcggggctcccgcccacccaaccctgctgcaggccctgagccactggcaggacgaaccggggctggcgctggacctcggttgcggcagcggccgggacagcctggagctgctgcgcaatggctgggccgttcaggccatcgaccgcgacgcggacgcattgcgcctgctcagggatcaggctccggaagcccaccgggcacgcctggaaacccggcaggccggtttcgaaagcctggtcctgccgacggcgcaactggtcaacgccagcttcgccctgcccttctgcgcagcgcccgtcttctctcggctgtggcgagaaatcgaaagcacgctggccgccgggggcctgttcgccgggcacctgttcggcgagcgcgaccagtggcgcgagcgcggcctgaccctgcatagccgggagcaggctcaagcgctgctgggcgactggcaggtactgcaattcgaggaactggagtggcaggggcgcaccgccctgggccgcgacaagcactggcacctgttcgccatcgtcgcccgccggcacgactag

SEQ ID NO: 346834 - DNA, 297 bp, Pseudomonas aeruginosa
atggccgaggacccggagtcggcgcgcaaggtgatggacatcctcgccgacatcaaccgccacgacggcaagaccgtggtggtgaccctgcatcaggtcgactacgcgttgcgctattgcccgcgcgcggtggccctgaagggcggccggatcctcttcgacggcagcagcgagcatctttccgaaggcttcctcaacgaactctacggcgccgaaggggataccccgctgctgttttccgaccgtgcccggcgcggggcggagagccagccggaactgaccctcgcgcgcgcctga

SEQ ID NO: 346835 - DNA, 1086 bp, Pseudomonas aeruginosa
atggagaaggaattcaacttggccgaagagttggccaagcagccacacctgctggagatgcccggcaacctgctgatgaaaggcggccccgaggactatatcggcgccgtgctctgcctgcgcggcacgctctatttcaaggaggcccatacccctctggtgcgcgaggcgttgtgtcagtgtttcgacgagttcaagcacttggccgagccgtacctgacttggctatggcgcgaggagccagcagaaggaaagccgctgactgcatacagtgatgcaaagccactgcgcgaaatgctggccagcatggatgaggattaccctctgagcttttactacaccagtggcaggcagtctaacgacgccggcgcttggtacttcgagatttttggccaggcggcttgggaagcaaagatgggagacgacctaagcgttctggagttctccgtgccgctgctgtatcaggagcagaacccattgagtttcctacacctacttctcgacttcgcacgtcgattggttcccgagcaaggctatgccggacatgccttcaatctgtccgtgacgaacagggatgacaaccagcctaccgaagcctttatggcagcacgtatgcctgggctggatgttggtaccgctggactgcttgctcatcgcccgacgttcaaaccgaccaggatcaagaccgtcagttggctgaccgtactcgatcagcagcgtctggagctgctcggcggcctggatgccctgcgcagccaactgccatccagccatttcgccttctacgactacggcgccggcgtggtgatccaggccggcgcctatccgtcagggggcgacggtgaggacccgagaccggccgcctacgtattgctcaaccaggtgctcaagggcatccgctacgaaaccgtcggttcgctgcacggtggttcgcacgacggcgaactgcgcctggtcggctggtccgccgaccagtggctcaagcgcctggatgtggatgagagcgacatccccgcctggcgggccaggctgctcggcgacgaagcatatctggacgcgacgaataccctgccggaacgcctgtag

SEQ ID NO: 346836 - DNA, 708 bp, Pseudomonas aeruginosa
atgagcgatcagcccagcctcgctcagggcggcatgagccccgaaggcaagaccaaccccgtcggcatcctggagcccaagctcgatccgcaggacaagcaagtgctgtgctcggcgatctgccattgcagcagcacgcccaacgtcagccaggatggcaggaacctcaagcaggcctgcgtggcccagcgcctcggcgaactggacgagattctccgggggcgcagcccgtacaagcccgaagtcagttacgacatgaccaagagcccgccgcagccgatcctcgacagccagaccggcagcagcgcgcatggctggataccgggctggatcagcaaatactggaatgaagacccggaacatccgccattcaagccgggtcgaggcatgattcgtcggcctgacgtggtgattgtcaaagacccgatcaaaccgccgacccaggacaatatcaagcaggtggtggagatgaagtttccgcctgacccaccggatagtaagcaggtaaaagcgtacgaaaagatcgctggcgatgagcgtaaaatcgtcgaaatgaaatccaccgaatgcgactgtagccaggaaaaccagcaatccaaggtaccggtagaacagctcggatgggctgcaactatcgcaggggcggtgatgtttatcgtgacacgtggtcgatctccgcgaccgtccatcccagtcccagcctattga

SEQ ID NO: 346837 - DNA, 519 bp, Pseudomonas aeruginosa
atgagtggaaaacccgccgcccgcgccaccgatcccacggcctgctctctgccgggtcacggcaccaaccccatcgttcaaggctctcccgatgtcattttcgatggcctgcccgccgcacgacaaggcgacgcctcggcatgcggaagtccgattgcctcggccgtttcatcgacggtcttcatcaacggccaacccgccgccaccctgggcagcgtgggtgcccacggcaacgtgatcatcggcggctcggcgacggtgctcatcggtgatgtattcacacccgctcccttcactccagccaccccgcgacccaacgtcactgcaccctattccggacgcttccagctcattgaccaggaaaccggcaagcccgttgccgggcgcagggtgaaggtctggtcgagtggcggttggagcgcgctcgataccacagatgccgaaggcctgacctcgtggatcaaccacgaggcatcggagtcgatccagatcgatctgatgccgggaggtgaagcatga

SEQ ID NO: 346838 - DNA, 1227 bp, Pseudomonas aeruginosa
atgaacaggacgaaattccacggctggtacatggtgggcgccgtgcatcttctgctggcactgaccttcggcgctgcctactccttcggcgcgttcttcaccagcctgcaggcgaacttcgacgccggccgcttttcgaccgcgtcgatcttctcgttgacggcgttgatctactacgtggtggggggcttctccggcgcctggagcgataggacctcggtgcgcaccgtggccagtatcggcatcgtgttgctctcgctgggcttcctggccagcagcttgctgtcgttctcgctggccctgttcctgggaaccttctgcagcctggtcgggctgggagtggggctggtctacgtgccggcggtctcgaccatccagcgctggttcgtcgtccatcgcagctcggcatcgggccttgcgctggcggggacggggctgggtacgctcgtcggcccgatggccgcgggcttgttgatgcagcacctgccctggcagagcaccatgcagatctacgccgccgccatcgcggtgctgggactggccgccgcagcctacctgcgggggaagcccgaagacctgggacagcaccccgacggcctcttgcccaccgacactgtcgataccacgccctgcaagccggcggcgcagcaccacagcatcagcctgcgcgaggcggcgcggcggccccggttctggtggttcttcgtggcgatcttcttcggctctatcggcctgttcctcgcgcttgtccacatcaacccctacgcgcagcagcaggggctggatgccaggcaggcaaacctgctcatcggtctgatcggcgtgggcaacatcggcgggaggcttgtgctcgggcgcatcggcgaccgcatgggcgcgcagcgtttcctgatcgtggtcaccctcagtctggtcgtcctgtgcggcggatggagcatggcccacggtttcgctgcgctggccatttttgcgctgctgttcggcgcggccaatggcggttgcattgcgctgtatccggcagtcgccagcacctggttcggcacggccaacctgggtgcggtcctgggcgccctgtacatcgccgtgggtatcgcggccgtggccggcggaagcgtcgccgggctcctttacgacctctaccagagctatacgctgtccattgccctggcgggcacttcggccttgctgtcggcggtgggcattgtcctggcggcgcgctccgcgtga

SEQ ID NO: 346839 - DNA, 141 bp, Pseudomonas aeruginosa
atgaagaaagccgcccccatgagccatgagcgccagtggaatcttcgcggcgagagatcgctgccccggctcgccatcagggggttctctgtaggcactgtgtccatggagttgcttcgccctgcctgcgtgtacgggtaa

SEQ ID NO: 346840 - DNA, 192 bp, Pseudomonas aeruginosa
atgctactgcgtttgctcagccgtttcagggccgaatccgacacatcgagtctaccgagccgatctgacgagattggcgactacctcgaaaacttcgtgaatgcggtccgcttcacgcgctcttgtggcttcaatgtggctgagcccaactgggctgtacgggatctcctggacgcggacggcgccttgtga

SEQ ID NO: 346841 - DNA, 396 bp, Pseudomonas aeruginosa
atggatacgaacaacaacgacaaagacctacgcgcactcgtgagtgccgccgacagaatcttgcaagccgccgaagaagacagaaatacagcggccaaggccatggggcaattgaggggcattgaggctcaggcacggcagagcctgggcttgatccccgacgtactttccaagtcggtcgaccgcctggccgatgccagttcggaaaaagctgcgaaactgctgggcgagaaattcagagaggcagatgccgccgcttcccgggcggctgctcattatgctagagcgacggagaacgcaagaccgacgttgaatcggatcttgatcatgcaatgtgtggtgtccttgctccagttggccatgttcattgcgttgatggtcatctggctgaagtga

SEQ ID NO: 346842 - DNA, 723 bp, Pseudomonas aeruginosa
atgaaggtctacgaaaacgtaattatcggcaacttcctctatggcctgggattcacagtaggcggtttccttcgaggccaagatgccctgccagccatagttaatcagttgcagcaaacgccagtcgacaccgaactaggggatgttctattgacgttcccgggtctggttcgtctgattgagttcaagatgaaaggcggcgacatcaagaaggagcggctgcgccaacgcaagctcgcgctggcactctcaacccctgaaaatgctcatctcctggctgtctctcgcagcgttcattggtacgtggaagtggccgcaaagctctccgacacgccactggtttgccgggcagaaccttatgtggatgccttgagcgacggccatgaccggaaggctcctggcacattcgagcacctgatagagcacactgcccgcgaagcggttggcgaactggacccacacgaacgagccctggcacaactctatctccggttggttaggatgacgctgggcaaggactccgcgggtgctggtggcctgctcttggtcgtagggggaggcggcactatgcactttgctcacctacaggatgtcagcgacctgaatctcccggaccgacagtggctgacgcaggccctgcaggtcagagagcctcagttgacacaatctggcccgcggctcgaaccccaggaaccgcagcatggcctcaccttgagcatgtaa

SEQ ID NO: 346843 - DNA, 642 bp, Pseudomonas aeruginosa
atgagttctatcaaccgccgccgtcgcggcgtggcgagcagcgactccgcggactcgggacgcagccagcctggcggaggcatggcttctgcaagcggcaaaggtgcaacggtgggagcgactggcgccgcccttttgcgctggaacaacctgagcatgaagactccggtagcgaggtggggcggccttttccgggtagagcctttgcccttgcccccattcccttcccccttgtggccttttgagcccttttgtataggctcgctaccagggtcgggccagcatcaatgcggcaatcgttccagccgattccgccagcacccgcactctggtgtcgcgctcttcctgggtgctaccaggcagtgtcccggcggcggtcggtctctggtcagaacgggaccgggagcgcgcgtggccaaaggggttgtgtcagcgacctgcgttgacggcggacggcgatggccgagcggcttcttttctatcaaccgagcatccagcaactggcgactgcgggccgcttcagatgctcatcgagctctaccaggagccgttcgttgccggcaaaagcgaggctgtaggaaggagaaattatcgtttttacatgaaaccgtgatttcagtagtgatttggagtcaagattaa

SEQ ID NO: 346844 - DNA, 1545 bp, Pseudomonas aeruginosa
atgcaggttggattcaaggctctcgccgcacagtacggcatcgcgctggcgcaacccctgcgcgtcgactccacgctcggcacaagtcgcatgagccgcgacaccggggacctggttgagaaccggtatccggcgcactaccgtcctaacgacgacttcgccggccatttcgagttcggcctcaagtatgaagagatccatctggagttcttcgcacgcttgttcgccgtggtcggtccacagccgatcgaggcttggtgcaggcgcgagccgttcgggcagtacgctcgccgcacgggtttcttctacgagtggttgaccgggcagcagttggacgtgccagacgtcaccaacggcggctatgtcgatgccattgcagcagacaaatacctcacccggacggagtcgacgcgagcgcgccgctggcgcatcaacaacaacctgccgggaacagtcgaattttgccctatggttcgccgcacgccggcagttcaggaggtgcttcaattcgacctcggcgccgcgctcgacgagctggaccgcacttatggcgccgacattctccaacgcacagccagttggttgaccttcaaggaatcacgcgcgagcttcctgatcgaaaaagaggcagaccagactggtcgcatccaacggttcgcccacgtcatcgcccagcactgcggccatattcaggacccgctgagcgaccagagtctgcacaccctgcaggccgagatcctgggccatgatgcgttcgggctcggactgcgacgctcgcccgtcttcgtcggccaggccacgatgcgggagaacatcgtgcactacattgccccgcatttcgatgacctggcgccgatgctcgcaggcctgaatgacttcgagcaggcgactcgaggcgcagagccccttgcgcgcgccgcggtgctggcgttcggtttcgtctacatccacccgatgcgcgacggcaacggccgcatccaccggttcctgatcaacgacacactcgtacgggacaaggccgtgccggaaggcgtgatcttgcccgtgtcggctaccatcacgagttcggccgagttccgctcgggctacgaccgagcactggaggtgttctcccgtccgttcatgcgcaggtatgcgacctcctaccgctttggcgaactggtgacctatgaggacggtacgccaagcaatctcgtcttcgacgactacgtcgatgcgcgattcgcctggcgttacccggacctcaccgagcacgtgctgtataccgctcgcgtcgtcgcacacacggtccgggaggagatggctgaagaagccaaggtcctgatggtcttccagcttgcgctggagcgactcaaggaagtcgtcgagatgccggatccggacgcgaatcgcatcatccgctccgtcaaggagaacggctggaaaatctccggaaagctcaagaagcagtacccgcagctcgaagacgaacaccgggcggcccgtatcctggaagccgtccaatccgcatttgatgacggcgaaaccagcggtgccgaagagtga

SEQ ID NO: 346845 - DNA, 525 bp, Pseudomonas aeruginosa
atggtggacactgggtggaccggcgcgggcacgccgtccatgccctatctgctgagcacactggacaccgtggcgtggagatataacgttcccgaagcggtgtttcctgaagccctcgtgccgggcatgcgcgagatcggtgcccgtaccaccatgaacctatggggtaacgtgtacccgcgcggtggcctgttgcaccagagcgacgaccacaaagccgctgccgtggcggcccaacgtgccggggatattgtcacccgtcgcggccaactgcatgtctatcaacccctactcgccaactcccaacccggctactggccagccggggcgctgctggagggacgtggctcgaccggtaagtggcaggagttggctcctcaactgtccaccagttgcgaggtattcccgaacaaccgcttcctccgccaggctcagcggggcgactacgcgtgggcgctgtggcgtccctacagctgctgcaagcgccgcggccaggtgttcctgggctcgacggctttccagtag

SEQ ID NO: 346846 - DNA, 3582 bp, Pseudomonas aeruginosa
ttgagcaagggttccgcagccccacatgctggcggcatccttcgcaccctggggctgctggcactctgcgccatcctggcactgatccctcgaccggcgccggccgatgccggtgcggcgaacgcgccccccagcaaccttgcgcaactgtcgcggatgcgccagaacctgcctgagcgccccttgcgcgtcgcccgggtgctgcgagatgcatcgcaccaggaaagcaagggcggccagatactcaacggtatcaccgacgactacctgcaactgatcagcgaatttctcgaccttcccctggaaagggtcggctattcctcggtggaagccagcctggccggcctgcgtaacggcgaggtcgacctgctgccgcgtgccagcgatttcgagcggcacctgcccggactgatctatagcagcccttatctgaacaatgcgccgatcatcatcggccgcagcgacgatcggagcctgccccccgatcttcatggcaagcacgtgctgctgctcaaccactatctgcatcccgataccgtccgccaggcctacccgggcgccctgctggagagcgtcaccgggaccgccgcgggcctgcagcggctggcagatggcaaggcggacgcattcatcggcgacaagacacgggcgaacttccatatgctgcaacggcctgacctgaagctgcagaacaagttcgccgccaacctctccagccagggcttcgcctttgccgccctggcatctcgccaggaactgatcgcccttatcgatcatgtactggaaaccactccagcctctcgcaagcaggagttcctccagcgctggacaccggcccggcagttgttcgccccgaccgacgccttcgctctcagccctggcgaacgcgaatggctgaagcagaagcgggttctgagcctgatcgtcgaacccacgcctccctatttcttccgggatagccgagggcaatggagcgggctcggcctggacgtcctccgctcactctccgatacctaccagttaccgttggagattctcgacagccaatcccctgcgcaagaccaacggcgcctgcaaaacggcgaagcactgctcgccaacagccttctccccactccggagcatcgccggcaactggcattcagcatgccgttcggggtccagggctggaccttcgtcatccgccagcactccagctcgcccagttcgttggaagccatgagcggcagacgcctggccatcgcccgcaaccatccgctgcgcggctacctggagcgtcactatcctggaatacaactggtcctggccaacagtggccatgaggccttttccctggtcgagagcggaagagtggacgccactctccagggaatacacaaccctccccattggctgcacgagcacggtctgcgccagggcgaacgcatcgatgccacgccgaccccacaggtgttcgccgtctcggcgcagaacaccgaactgctgagcatcctcaacaaactcctgggcaacctcgctcaggaaggtggctccggctctggcctgcgcctcatggccagctcgcttcagggggacaatctctggcagcacctgccggatggcttctggcacgcgatgctcctggccggcgtgatcatcctgctgtcgctgctatggaactggcgactgaagaatcaagtgcatcagaaacttctcgcacagaaccagttgcgcgaccaactggccttccagttttcgctgctcaacggcctgcccacgccactctacgtgcgcaacctggagggtcgcctgagtacctgcaaccgcgcctacgaacaattcttcggcagatcgctggaagaactgatcggcaccacgccgaccgaacagggcatctgtccgccaggcctggcccataccctggaactcgaataccgcgagctgctgcatcatcgccagccgcgctatctcgattgctgcatcgaggtggacggcgagacgcaccagatctatcagtggctgatgcccttctacaacgctcgcggcgaactccagggcctgctcggcggctggatcgatatcagcgaccgccaacgcctggaaacggaactgcgcgaagcccgccagacggcgatggctgccagcgccgccaagggcgagttcctcgccaccatgagccacgaactacgaaccccgctgaatgccctggtcggcctgctggaactggaggggcagcgcgccccctcggaaaacctgcgcatcgcccagcaatcggcgggtgcgatgatcgacctgatcggcaacatcctcgatatggacaagatcgagaccggccagatgctcctggctccacagcctacagaccttggcgcgctgctgcgggaaagcctcgaactgttcaccggccaggcccggcaacgcaacctggccctggagctgaattgctcgctgactgctggacgcctgcaccgcgttgaccccctgcgcttgcgtcaactgctacataacctgctgggcaacgcactgaagttcaccgaggtcggccgggtgcgcctgagcgtcgaggagcgtccgggggacgctggccacagcctgctgatattccgcgtcagcgataccggcataggtattcctcgggaagcgcagccgcacctcctggagcgttaccggcaggccagcgccgatacggcacagcgctacggcggttccggcctgggcctgagcatctgcagccagttggttcggttgatgggcggacgcatatggatcgatagcgaaccaggccagggctgcgaagtaggtttcgaactatcgctggcctgtctggaaagggtcgacgaagcgcctcggggcgctctcgccgccggcaacgaaagggtaggatcgttgaagatactgatcgtcgatgatgtctccaccaacggcctggtactgagtcagcagctcaaacgcctgggacatgtagctaccgcagtgcacagcggcgaggcggccctggaggcctgggaccggcagcattacgacatcctgatcagcgactgcaacatgcccggcatggacggctacgggctggcccgacgcatccgccagcgcgaagcgcagcgggggcagccacgacgcatgatcattggctacaccgccagcgcgctggcaggagaagccgaacgctgccgggcagcgggcatggacgaattgatgatcaaacccgtcaccctcggtcgcctgcgcgaagtgctcgcctgcgcgcaaccggtaagcaccgctatcgctccctccggtggcgccggattcgacatcagccacgtggacggcctgaccggcgccgacccgaccctgctgaaccgtctgctgaccgagttgcgcagcaatctccagcaagaactggcagccctccgacaacccatggcagccaccgaggccgaacaactggttcatcgcctgagcggacttgcctgcaccatcgatgctccaggtctgatccgtgcctgcctggaactcgaaaaggccgcccggcgggacgacggcacattgcagcggcagcaagagcggcttctggccgtcatcggcggcctgctgacggacgtcgagcggcagctttcctga

SEQ ID NO: 346847 - DNA, 1497 bp, Pseudomonas aeruginosa
atgatccactccaagcgctcgcgtgtcatgagcaaacttcccctcgccctggctatcggcctggctgccctgagttcgcagcaggcgttcgcccacggctatatcgaaagcccgaagtcccgtgccttcatgtgctccgccaaaggcggcaacctcaacgccaactgcggctcggtcacctatgaaccgcagagcatcgagtatgcgccgggcgtcaaccatcactacccgagcagctactgccccggcgacttcacccagtgcggcccggccgacggcaccattgcggccggcggcatcgccaacttcgcaccgctgaacgagcagaccgctacccgctggcagaaaaccaccatcaggcccggcgtcaacgagttcaagtggcgctacaccgctggccacgcctcggcctactaccagttctacatcaccaagaaggactggaacccgaaccagccgctgacccgcgattcgttcgaactcaagccgctgctgcaccaggacgcaggtggcgtccgtccgcagtccggccagacctcctcctataacgtcaacatccccagcgaccgcagcggctatcacgtgatcctggccacctggaagatcgccgacaccgccgcgaccttctaccaggtcgtcgacgtgaacatcgacaacaacgccgtgccgccgagcgagtggaccagcatcggcgccgtacagcccgagcaactgcagatcggcgacaaggtgatgacccgtgtcttcaccaaggccggtgaacaggccaatcgccagaccgtactggacatcaccggcgccaccgaagcccaggccaacacctggccgttcctgctcgcgcagaaggccaacaaggccaacgccggctaccagatgggcatgttgaacgcagacggcgaagtcgtcccgaactatggcgtcaacaacgtctacaccaaggccggcagcgacgtggtccgcgtggagattcagaaagagcagccgaccgttccgggtgaactgagcctctccggtctgcaaccgagctacaccctgaagggtggtgccgcggacctgcatttcaccgcgatcgcccagggcggcacttacaccatcgacgccaccgtgttcaacggcaagggcgagagcatcgctcaccagcaggccgaagccggcaacaacgcgccgcacttcagcatcccgctgcgcaacgccagcgccggtgactacgacctggtagtgaaggccaagcccgagaaaggcgaaatgctgcaggaaagccaccgcttcagcctgaaggccgaagacaacggtaatggcaacggcaagtacgacttcgtcttcccggacggcctgtccaagtacaccgccggcaccaccgtcctggcgaaggacggcaagacctacgagtgcaagccgttcccgtacagcggcttctgcaagcagtggaacgctggctccaaccagttcgagccgggtgtcggctccaactggcagacggcctggactcgcaagtaa

SEQ ID NO: 346848 - DNA, 516 bp, Pseudomonas aeruginosa
atgacttccgaaaaatactcacggccacgaatgctgctgcattggtgctttgctgcgatcatcgtatgggccagtctcagcggattcgccaacacgctgctgaacctgccggaagcgatttcgcacggcatatccttcatcaacgtctcgctcaccaccttgctgattccgctgttcggtgcgcgcctgtacttcgctctcgcgcaccccgtcgccgaagagcccgcacaagctctacacggcgcggcactgctggccaaagtcggacacctggctctctacatggccatcggcctggtgctgctgagcggcgtgctgatgatggagcaccccatcgacttcttcggcctgctggttcttccgcaacccttgcacgaaccgctcctcaccgcattcttcaaccgcgtccatcgctatgcgtgcgtggccctgaccctgttggtggtcggccacatcggcgcggtcctgatccatcaatggcgtgggcacccggtgctacgccgcatgctgccctga

SEQ ID NO: 346849 - DNA, 513 bp, Pseudomonas aeruginosa
atgtcacgccgccttccgcacctgccgctcgaccgggcgcccctgcccatcgccgccgcccttctctgcagttggctcggctggctgggtctggagagctggcaatacagcgactccctcgccgagcaggcatccgtgtccgtaccgagcgccgtaccgccgcgtcccgcgccgacaccgctggatgcccacaacatcaaccgcctgttcggcgccgtaccgccggaacagcaactgcacgccgtcccgctggtgctcctggccagcctggccgacacccgcgcggagcgctcccgtgcgctgatccaatcaccggaaggtagcgccttctacggtctcggcgcgcgcctgccgggtggcgcgcttctcaaagccatcgccaccgaccgcgtactgatcctctcgggcggacgcgagcaggtactcccccttcccggccatacgacccgcctgctggcaccgctggccgtcggcgacgccaagtcctccgccgaggcagagaacacaccatga

SEQ ID NO: 346850 - DNA, 507 bp, Pseudomonas aeruginosa
atgcatccgcgcggcctcacgcaacgagccgggcagcggggcttcaccctgctcgaagtgctggtggtgatcctgctgatcggcctgctcgccgggctggtcggtgtcacccaggtcgacggcggcggtcagcaggcacggcgcgaaaccgaacgcctgcgcagcctggtcgggctgttgcgccaggacgccatgctcagccagcgtgactatggcctgcgcatcgaccagcagggttactcggtacaggtactcgacctcgatggcgagtggcggctggcgcccggctaccggccgcagacgctgccggacagcctgcgcctggacctgcagattggcgaaaacggcgccacgctcggccgcgcgcggcaaaatcgcgccccgcagttgctggtgttgtccaacgacgaagtcacgcccttcacattgcgtctggagtatcgccagaagccgctgtatgcgctgtccagcgacggtctcgaggaggtccgcgttgaagccctgtga

SEQ ID NO: 346851 - DNA, 384 bp, Pseudomonas aeruginosa
ttgaagccctgtgaaatccggcggcaacggggattcaccctgctcgaggtgatggtcgccctggccatcttcgccatcctctcggtcgcgctctacagcgccgcccagcacatcgccggcaacagcaccgggctgaccgagcgcagtctcgcccaatggctggcggacaaccggctcaacgagttgcgtgccggcatgcgcccgctcgacaacggccgcagccaggaaaccctcgccttcggcggccgcgactggctgctggcctgcaacgtcgaggccgcgcccgacccacgcctgcgcaaggtcagcgtcgaggtctcgctcagcggagcgcaccccatacggcgcgcggtgctggtcggcttcgtcgcggcgcagccatga

SEQ ID NO: 346852 - DNA, 879 bp, Pseudomonas aeruginosa
atgagtgagtcccgccgccagcgcggagtggccctgatcagcgtgctgctgatcactgccctggtcaccctgatcgtcagcgacatgctcgcccgccaacgcctgaacctggccagcagcgccaaccagttcgcccagcagcagctctggcaattggccctgagcggcgaggcctgggcgcgccagcaactgctcgccgatctccgcgacaaggacggcctgacccgcgtacacctgggccagcgctgggcccagggcgtgcatgaattcgagatcgaaggcgggcgcattcgcatccgcctggaagacctcggcgcgcgcttcaacctcgaccgcctgcgcaacggccgcgaccgtatcagccgcgcccgctaccaacgcctgctggccctgctcggcctggccccgcacgatccggcacggctagcggcgccgctcggccacgacggcaagccgctgccgttcgccgacaccagcgagctctggcgcctggaaaccctcgaccccgccagcatgcgccggctgcgtccgtggctcgcgacgagcggcgacgccggcctcaacctgaacaccgcgccggccgagcaactggcctgtctcgaaggtctcgacctgggcatcgcccaggccctggtgcaagcacgcccggccgacggctatcccagcgtgcaggcctttatcgaacagccgctgctttccggccgcgaggtcgagcagtacggcctcaccgtggccagcgaacgcttccgcgccgtgctcgacgtccaactgggcgagcgccagctgcgcctggtcagcgacctgcaaacccgcagtgacggcctggtgcgggtcctgcgccggcaacttgcggcgcccgatcttccctttccggagtaa

SEQ ID NO: 346853 - DNA, 1080 bp, Pseudomonas aeruginosa
gtgcaagcctggctctacctcacctccaccgccgacgacgcgccgctgacctggtggcgcgccgacggcgacgtccgccacggcaacctcgagcaggccgccggcgaactggctggcgccgaactggtcctgttgctgccggccgaagccaccagccaccacgaggtcgaggtgccggcccgcagcggccgctggctgcgccaggcactccactcggcgctggaggagcgcctgctggaggatctcgacgagctgcacctggcgcgcagcggcctgcgcgacgggcgcttctgccgcctgttcgccgtgcgcgcagactggctacgcgaacgtctcgcgcaactggcggcggcacgcctgcagccacggcggatccacgtcgatgccgactgcctgccgggtgacccgccgctggccctgcgctgcgccggtcgctggctggtcgccgccggcagcagccagcggctggccttggacgacgcccatctggaagacctcgaaagcctgctaccgcaaggcttgcggcgtagcgaggaaagcccctggccactgctcgccgagggtacgcaacacgccatcgacctgtgccaggaaaccttcgccgcacgcagcgcgaaacgcatccgctggccgctcctggccctgctggcaatagtcgcctgcgcggcgcagttgggccaggacatcgctcaccgcttgctgctggaacagcgcagcacggagctccgtcaagagaacctggcactctggcagcaacacttccccaacgaaggccgggtcgtcgatctcgcccgccaggtgcagtcgcacctgcgcgaggacggccagttgccggtcgacctggctcgccgcctggaccgcctggcgaacgactggagcgccggcggcggtgccaccgccacggtccgccggctcgactaccaggccggcgagggctggagcctgcaggttggcgcgccggccttcgccgatctcgaacgcttgcgcgaaggcctgacccgccagggcctggacgtgcaggccgactcctcggtgcgcgacgtcgaaggcgtcagcgcccgcctgcagataaaggactga

SEQ ID NO: 346854 - DNA, 468 bp, Pseudomonas aeruginosa
atgccccgtatccccccgtcactgcaggcccgctggctgcgcctacctccccgcgaacgccgggcgctgctcggcatgagcctgttcctcggcctggtcctggtctgggttctgctctggcagccacagcgccaggccctgctcgacgccgaacgacactatcaggacgagctgcgcctgcacgccgacctccagcgcctgccgggcgacacggaggacggcccacgcaccgacgccgcgaccctgcccggattgctggcacgcagcagcgcggcagcgcgactgaacgtggaacgcatggacagcgaaggcagcgggcggatgaacctcagcctggaaggccaactcgccgacctgctcaactggttcgaactgctcggccgcagtggcgtggaaatcagcagcctgagcctggaggtgagcccggacacgctcgccaaggcacgcctggcggtggatgtgcgctga

SEQ ID NO: 346855 - DNA, 2232 bp, Pseudomonas aeruginosa
atgcctttcgttcctgcccgcgccatgccccttgccctcggcctttgcggcacgctgctgagttcgcaaccatcagccgcggccgccgagtcggagcatgcccccctggaactggacagcacggaagtcctcgccgaaaacctggggacgcggaccgaaggtaccggcgcctataccaccggtgccatgagcaccgccacccgcctgccgctgacgatccgggaaacgccgcaatcggtctcggtggtaacccgccaacagatggatgacttcaagctgggcacgctctccgaggccctgcagcaaagccccggagtcgtcgtccagcgcctcgactccgagcgggtgggctacaccgcgcgcggctactcgatcgagaacttccaatacgacggcatgctcaacaccttctcccgcctgaagccggacagcgataccatcatctacgaccgcatcgaagtggttcgtggcgccaccggtctgaccaccggagcgggcaacccttcggcgacggtgaatatggtgcgcaagcgccccactcaggtcctgcaggccaaggccggtgtcagcggcggcagctacgacaactactacagctacctcgatgcgggcggccccctgggcctggagggacgcctgcgcggacgcggcgtgctggcttaccgggatagccagtcgatccgcgaccactatgcgcagcagcgcgaggtggcttatggggtactcgaggcagatctgaccgacgataccctgctggcggtcggcttcgactaccagaacaaacacgtacagggctcaacctggggcaccctgccctactggaacgtcgacggcagcaaggctcgcctgccgcgctcggcgaacctgagcgcgccctggagttcctggccagtggagagccggaccaccttcgtcacgctcgatcaggagctgggtcgaggctggaaactcaagggcgcctatacccaccggcacgaccataccgacggcaagacctactacggcggctctggctaccccgccgccgacggcaccggcatgagcgcctggtacagccatttcatcggcgacaaccgaatggaggacttcgacctcaacctgaacggcccctatccgctcttcggccaaacacatgaactgatgatcggctatggcaaggcgcagtatcgcagcagcgagcccttgacccgcgatgctgcgttgcctcccgactacgccacgatacagaactggcgcgacatgagcggtataccgaagttttccgatacggtttccgacctgcctgcctacaaaagccaaacccgccagaaggccggctacctggccactcgcctggccttgcgtgacgacctccatgccgtcctcggcggtcgctacggcagctggaaatccgaacagtcggaaatgacctacaccgacgactacaccctcgcgcagcgcgatcgcagcagccagacccagaacgaccagtggacaccctacgccggactgctctacgacctgactccggaactgacgctgtatgccagctataccaatatcttcaggccacagaacgtccgcgacgtgaaccgtcgctatctcgatccggtcattggcaagcactacgaactgggcttcaaggccgcaccggcggacggacgcctgaacctttccagcgcggtgttccgcagcaagcaggacaatctggccgaaatagacgattcgatcccgcaggatccggccaccggcgagtcgttctacaaatccggcggtaagggcaacgtcatacaaggcttcgagatggaactgggcggagcgctgctgcccgactggaacatcaatgccagctatacctacacccactcacgcaatggcgagaagcagcgcctcaacaccaatcagccgctgaacctgatgcgcctgtccagcacctatcgcctgccaggcgagtggcgcaacctgaccgtcggcggcggcatcagttggcagagcgacatcttccgtaccggacggcgtccggtgggggtggaccggaacggcaagctcatcacccgccccacaccgatccggcaggattcctacgcgctgttcaagctcatggcccgctacgacatcgactcgcacctgacggcctcgctgaatgtggataacctgctcgacaagaagtactacgacaatgtcggcttctataacggtgtctactggggcgacccacgcaccctcactctgagcctcgactggcggctctga

SEQ ID NO: 346856 - DNA, 228 bp, Pseudomonas aeruginosa
atgaaagcacccaatgccactctggatcagtggagaaccctgtatgccgtcatcgaacacggcagcctggaaaaggccgcagatgcgctgtatcgctcgcagtcggcggtcagctacaccctgagcagattgcagagccagcttggcgtttcgctgctgcgcaaatccggacggcgtaccgtgctcaccgaggcgggctggccctgctgccccacgcgcacaagctga

SEQ ID NO: 346857 - DNA, 273 bp, Pseudomonas aeruginosa
atggcctatccgcgcgcgcagttgttgcagatcctgttcgacttcctggccgatcgcttcgtctacgacctgctgctccatgagagaatgccggcatcggtcgccaaggccctgaacctggggcaagccagcatcgccatcagcagccgggcgatccccggccgcaccggcctcgccttcgacagcatcgaacagaccgccgtggcgcccccgcccatccattgcttcagctcgggcggccgccggcacgacaggacctggacgcgcacctga

SEQ ID NO: 346858 - DNA, 537 bp, Pseudomonas aeruginosa
atgggacgcctggacgactcctcgctggtcgcccggatcatcaccgacaaccatcacctgatctgcgccagccccggctacctcgaacgccacggcgtgccccggcatccggaagacctgcaactgcatgacggcctgatgtactacaaccgggaagccaacggtttctggaaactgccgtacaacggtcgccaggagtcgttccgcatgcgcatccgcaccgattccggccatcacttgctggaaagcgccaaggccggcatcggcatcgcgatcctgcccacctttctcgcctccgacgccctgctcgccggcgaactggtgcccatcctgctgccctgctcgccctccggcggacacatctcggtggtctaccgcaagacgatcaggacgccgcagaagatcctcgccctgagcagcttcctcgaagaggaaatcggccattccgcccctgggaccgggccctggcgcagcgagggctactttactgcacccggaagatcgggaaagcagaacccccggttcccttttccgtga

SEQ ID NO: 346859 - DNA, 795 bp, Pseudomonas aeruginosa
atgccaagcgtctcaagaggcgacatagaactcgttttcgatatccagggccaaggccccgacctgctgctgatcgccggtaccgcttcggaccggagcctgtgggcgcaagtacgcagcgaactgtcgcggcacttccggaccatcgccttcgataaccgcgatgccgggcaaagcagcatctgcagcggcgcctacacccttcaggacctcgccgaagatgcgcggaccgtgctgtcggcggcgggcgctgcgcaagcgcacgtcatggggcactcgctgggcggcatgatcgcccaggaactggccctgctggcccccgagcgggtcgccagcctgaccctggtcgacaccacgtcgcgcctgggtacctacatgcaggcggtgatctcgatggcgctggactggtgtcatgccatcgaggaccacgaactgctggtccgctcgctgtatttcctcgccctcggcgaagaggcgatccacaacgacgcactcggccagatcgccgccagcctcgccgacggcgcgccggggcagccgaaggaagccctgatccgccagtgggaagtcgacctgaccgtcgatacctatgaccggctggagcagatccgcgtgccgacccacgtggtctggggcgtgcaggacaagatcattcccgaggtccatcagttcgagttgctggacaagatcgtcggctcgaaatacacccgtctcaagcactcgggacactgcccgatgatcgagaccccggttgccttcaccgagaaagtactgcagttcttccacgagcagtga

SEQ ID NO: 346860 - DNA, 1371 bp, Pseudomonas aeruginosa
atgcagattcaatctcatcagcagagtccgtctttcgtcgctgaattgccccaggctgccagtgggcgcctggggcagatcgaggcccgccaggtagccacccccagcgacgtgcagcaactggcccagcgtcaggatgtgccgaagggtgagggactgcttgctcgcctgggggccgcgctcgcccgtcctttcctggccatcatcgaatgggtgggcaagctgctgggctcccctgcccatactgcgacccaggtgccgcagcccagccaggatgcgcagcctgcgctcatgtcctcgcccgtcgtgttcaagcagatggtgctgcaacaggcattgcccatgaccttgaagggactcgacaaggcgagcgaactggcgaccctgacagcggaaggactgacccgggaccactcccgcctggccagcggcgatggggcgctgcgttcgctgaccaccgccctggccggcattcgcgccggcagccagatcgaggactcccgtacccaggccgcccgcctgctcgagcggaatgtcggtgggatcgcgctgcagcagtggggcaccaccggcggtgccgcgagtcaactagtgctcgacgcaagcccggaactgcggcgcgaaattaccgaccagttgcatcaggtaatgagcgaggtcgcactgttgcgccaagcggtagagagcgaggtcagcagagtatcggccgacaagacgctggcggatgacctggtgaagcggttcggggcggatgcggaaaagtacctgggcagacagcctggcggtatccatagcgacgccgaagtgatggcgctcggcctctataccggcattcactacgcggaactgaatcgcgctctgcgtcaggggcaggagctggatgcggggcagaagctgattgatcagggcatgtccgcggccttcgaaaagagcggagaggcggaacaggtcgtgaagactttccgtggcacccgtggcggggatgccttcaacaccgtggaagagggccaggttggccacgacaacggctatctctccacctccctgaaccccggtgtcgccaggagcttcgggcagggcacgatatccaccgtgttcggcaggtccggaatcgatgtcagcgagatatcgaactacaagaatgaaaaagaaatcctctacaacaaagagaccgacatgcgcgtgctgctgagcgccagcgatgagcagggagtgacccgtcgggtcctcgaagaggcggctctgggagagcagagtggccacagtcaggggttgctcgatgctctcgacctggcaacccagccggaacgttcaggcgaggcccaagagcaggatgtgcgcctgaggatgcgcggcctcgatctggcctga

SEQ ID NO: 346861 - DNA, 381 bp, Pseudomonas aeruginosa
atggccgccttcagcaactcggaagacgacatgaacccactctaccgcgccgccattcaccagctttttctcgccctcgatattccagccccgaacgacgaagaagaggtagtcagcctgcaggtaggccgacacctctgtcacctggccgagcatccgaccgatcacctgctgatgttcacccggctggaagggcagcaggaggccgagatcacggcacagaacctgttcagccaggatccctgcaagccggtactggggcgtgacccggagagcggcgaactggtgctgtggaaccgccagcccctgcaactgctggaccgggcgcaaatccaccaccaactggagcaactggtcgccgcggccgacgaacagcgctga

SEQ ID NO: 346862 - DNA, 1254 bp, Pseudomonas aeruginosa
atgtcgccactcatgcttcgcggggctgcctgcggcctgctgtgcgcctggctgcccgctgccggcgccgccgggttcatcgaagagagcagactcaagctgcaactgcgcaatgtctatttcaacgaaaacttccgtgacgagcacggcatgcccccacgcgccgccgccaatgccaggagcgagcgggtcgagtgggcgcagggcttgctgatcgactaccagtccggctacaccgaaggctcgctggggctggggatcgacgccctgggtctgttgggcgtgcgcctggattccgggcggggccgcgctggcaccggcttgctgccggtacacgacgacggacgtgcggcggacgagttcggcagtcttggcgcgaccctcaaggcgcggctcgggcagacggtggtcaggcatggcaccctgctgccgaagaatccccttctggtctacaacgatgcgcgcctgctgccgcagacgtaccgaggcacccagctgaccagcagccccatcgatggcctcagcctggccgcgggctatctggaccgtttcaaactgcgtgattcctccgatagcaccggcttgtatgccggcgctcatgcaggccgtggaagcggtagcttcgcctacgccggcatggatcgttccgtcagcgagcgcctgcgctggagctacttccgtggccagctggagcatttctaccggcaggatttcgtcggcatacagcacgacctgccagtggccggcggtgtgctgaccacggacctgcgttatttcagcagccatgacacgggcgcggcccatgccgggcgcatcgacaatgagatgttcagcgggcaactggccttcaggcgttccgggcacgccttcggcgcgggataccagtggctcgatggcgaagcggggttgccttatgtcagcggagctacagtgtattcgttcagcaatgtcggtatcggcaagttcatcgaagaggaggaaaagacctggatggccagctattcctatgacttcgcggttgcgggcgtgccagggctgggcttcatggtgcgttatctggacggggacaacggccgttcgggtgaacgcggcgtgaaggagtgggaacgtgacgcggaggtggcctacgtggtgcagtcggggcttgcgaaggggctgggagtgaagctgcgcaactatgtctaccgttcggacttttctcgcgggcgcgacagcaaccgaatctacctgacctacgatatcgccctctggtag

SEQ ID NO: 346863 - DNA, 1080 bp, Pseudomonas aeruginosa
atgcaacgaatcccttgtgtgctcatgcgtggcggtacttccaaaggtccgttcttccatgcgcgggacctgcctggcaacgtggccgagcgcgatgagcttctgatcagcctgatgggctcgggccatgaactggaaatcgatggaatcggcggtggcagtccgcagaccagcaaggtcgccatcatcagtccctcgacgcatcccgatgccgatgtcgactacctgttcgtccaggtgatggtcgcccagcgccgtgtcgataccgcgcccaactgcggcaacatgctttgcgccgtgggtccgttcgccatcgaacaggggctggtggaggcccagcagggcaagacacgggtgcgtatccgcaacctcaataccaacaccttcgtcgattcgctggtcgagacccccggagggatcgtccgctacgagggacgcacggcgatcgatggcgtgccgggcactgccgccccggtgctgctgaccttcctcgatgcggtcggcagcaagacgggcaggttgttccccaccggtcgcgagcgggatgtgatcgacggggtgacgatgacctgcatcgacatggcgatgccgatgatgctcgtcgaagccagccagttgggttgccgcggctcggaaagcccggcccggctggatgccgatacgcgcctgttgcgccgtctcgaggcgctgcgcctgcaggcgggcagggcgatgggcctgggcgacgtgaatggcatggtcattcccaagccggtgctgatttccccgccgcagcacggcggcactctccaggtgcgctacttcatgccgcacaactgccaccggtcgctcgccatcaccggtgccatcggcctggcgactgcctgcgtcagccccggcaccgtggccatggacatgctgggtgacagggcccgggaactgacggaggttcacctggagcatcccagtggcgcgatcgacgtggcgctttcacgcagcggcgcggagggccggacgatacaggcgtcggtcgtacgtaccgcgcgacgcctcttctcgggcttcgtctatgtgccgagttggcgaaagcttgccggctga

SEQ ID NO: 346864 - DNA, 138 bp, Pseudomonas aeruginosa
atggacacctggacttccctgacgcttttccagctcacctgcctcctcggcttcaccctgtggctgagcctcgccctgatcgacaacctgcacgggttcgccagctcgcgcgcggcgatcggcgatgggcgcttttga

SEQ ID NO: 346865 - DNA, 135 bp, Pseudomonas aeruginosa
atgccctatcccgtaagccctttcgtccagtctcgcttcaagcccgcgcaatacgagggcttcccgtccatcggggctacccccctcaacttcatgcccctcgctctccttgcccgctctccaccggcctcctaa

SEQ ID NO: 346866 - DNA, 207 bp, Pseudomonas aeruginosa
atgaccaccctcgaactcttcgacgaagccatcgcccaccagaacgccgcccgtgacctgttgcgcctgttgtccggcgccgaaaacctcggcacgccagcgccggagatactctccggcgcactgtgcgggatcgaatacctgctggacgaggcgcaggcacgctacgaggaggcgtgggagaaacagcgaacgattgcgggatga

SEQ ID NO: 346867 - DNA, 972 bp, Pseudomonas aeruginosa
atgaggatcagtatcctgggggcgggagccatgggctcgctgttcggtggcttgctcgcggaaagtgggcaggacgtggtgttgctggatatcgacgaggcgcatctggagacgattcgccagcggggcctgcgcttgcagaccgacagcggcgaccggcggatcggcgggctgcgggcctgccgtccggagcaggcgccgggccggcccgacctgctgctggtgttcaccaagaccttgcataccgacaaggcgctggaaagcgtcgccgggctggtcgacggacggaccctggtcctgtccctgcagaacggcctgggtaacgccgagcggttgtgccggcacttctccccggagcaggtgatgatcggcatgaccacctggcccgctgatcgcgtggggccgggacacgttcgctcccacgggcagggcgtggtgcggatgctgtcggctgatgccgtggagcgtgccgcggctgccgaggtcgcggccgtgctcgacgccgcagggctgcgttgcgcggtggaccgggaggtctggacctcgatctgggaaaaggtcgcgttcaacgccgccctgaacagtttgtgtgcggttaccggctgccgggtggggcaattgactgcgctaccggcgggcgccgaactggcccgtggcatagtagaggaagtcgtcggcgtggcccacgcggaaggcgtagcggcggatgcgcgacgttgcctggccagtgtcgccgaagccatggcccagcatcgcgcgcaccagccgtcgatgctgcaggacgtgctggccggacggcccacggaaatcggctcgatcaacggcgaagtgctggccagggcgcgtcgtgcgggtctcgcggtacctcattgcgaaatgctgcttggcctggtgcgcctgatcgaggcgcgcatggccgacgagcgacaagccgcggcgacgccagccgtcgccagcagtcatcacccatga

SEQ ID NO: 346868 - DNA, 1461 bp, Pseudomonas aeruginosa
atgaacacgatttccgttcgcgcggcgcttggcgccgcttccccggtcgagcctggcggcgatcgcgtcgccgatatcggcagcctgctcgacgacggacctttcacccgcatgcaaaagctggtggtcctgctggccgcgctttccatcgtgctggacggtttcgacggccagctcatcggttttgccatcccgttgatgatccaggaatgggggatcagtcgcgaagccttcgccccggcggtggccgccgggctgatcgggatggggatcggcagtgcttgcgccggcctgttcgctgaccgcttcggcagacgtacagcggtggtcgccagtgtcttcctgttcggttccgcgacctgtgccatcggcctggcgccggacgcgctgacggtggcgctgctgcgcttcgtcgccgggctggggatcggcggcgccttgcccagcgccaccaccatgacggcggagttcacaccggcacgccggcgcaccgtggcggtgacggcgaccatcgtctgcgtacctctgggcgggatgctggctggtctgttttccgcccacatcctgcccttgtatggctggcgcatgctgttcttcctgggaggggcgctaccgctggcgctgggtttcctgttgctggtggcgttgccggagtcgcctcgtttcctggcgcgccggcccgggcgctggaaggagctggggcggctgctcggacgcatggagcggcccatggccagtgggatgcgctacatcgatgcgctggaacaggcgaaagaaaaacaggatggcttccgtgcattgttcgcccctggctacggacgcgacactctcgccatatgggtagcgttcttcatgtgcctgaccgccgtctacagtgccttcagttggctaccgaccatgctcctgtccgaagggctgccgctcgcagtcgccggttccggcctgaccgcctacaacctgggcggcgtgatcggcgcgctggtctgcgccagcgtcatgacccgctggggttcgttctggccgctgctcgtctgttgcgccgcgggggctgccagcgccttcgccatgttggcgctcgacgccgaccggcagagcgcgttgttgatcttcggcttcggcgtgcatggactgttcgtcaacgccgtgcagtccaccttgtatgcgctgtgcgcctacatctacccgaccagcgttcgggccaccggcactgcctcggcgttggccttcggtcggctgggggcgatcctgagcgcattcgccggtgccggcgtgatcagcctgagtggcgcgcagggctatctgatcctgctggggacggtaatgctgctggccctgctggccctgacccaggtgcgacgccacattcccgtggcctgggggcggcaggttccggcgggtggcacggatggccgcgcaggagagcggttgctggcaaccggagtgagagaggaggagcgatga

SEQ ID NO: 346869 - DNA, 351 bp, Pseudomonas aeruginosa
gtgaaaacgtcggaattgctcattttttgtgctatattccgcgcccgcgtttacgcgacccccccattcctagagatacccctggtgcccgtgatgcaagccgccaagccgctgttcgactatcccaagtactgggccgagtgtttcggtccggcgcccttcctgcctatgagtagggaagagatggatcagctcggctgggactcctgcgacatcatcatcgtcaccggcgatgcctacgtcgaccacccgtccttcggcatggccatcatcggccgcctgctggaggccaggggttccgcgtcggcatcatcgcccagccggactggcagtcgaaggacgacttcatga

SEQ ID NO: 346870 - DNA, 351 bp, Pseudomonas aeruginosa
atgaacacattgggccgactggctttgttcagtcttcttgtaggaatttccagtcatctttccgctggcaccatcagcggtgtcattcgcttcaccggtgccatcgtcgaaccaccctgctcgatgaacgcatcgcagcaagatgagtcgaggagaggtttccgcctgagcggctgcccgatgcatgcgcgcaccgccgaggtcagcatccgctccatgcggaccggtgaagtccgcaaactgcaacccaacgatctgagcctgggtacccgggacttctcggcacgctatgacctcgccaagaactttcgccgccccggcagctacctggtgaccgtcagctacccctga

SEQ ID NO: 346871 - DNA, 567 bp, Pseudomonas aeruginosa
atggcgacacccattcttcatgctcggcagtggctgctgtcgctcggcgtcctgtgcgccgcctccacggccttcgccgaagcctcgggcgactactggatcgtctacggcaagggcgaacgctaccagaacgaagtgttcgtcgccgacgccgccggcatcctgcaaaaacccaagggcgtgcaatccgcccagatcatgcagatcttcgaagaccgctcgatgccggtgctggcggcctatgagatccagtacaagtgcaccgagcgcaaggttcgcttcgacaaagcacatgccatgagccgcctcgactatgtcgtgaagaaggtggaaaccgttcagggctggatcaatccggaaaagtacgatgactggctgcagcgctcgttcaccttcatctgcgcgccggccaaccgcagcaacaaccagatgctgtcgctgggcaagatgaccagcgcgaacatggtgcggaccgtgcaggcgatgttcgtcgagctgcaaggcgtgcaggccaaaagccagaccatgcgcgacctggacgcgatgctcggcaacaagccgaaatga

SEQ ID NO: 346872 - DNA, 177 bp, Pseudomonas aeruginosa
atgatagacctgaccgtgaatgaccgggcgttgagcttcgacggctatcccgaaatgccgctgctctggtatctgcgcgacgaagccggcctgaccggcagcaagttcggtgcggtatcgccctgtgtggcgcctgcaccgttcacctcgacggtgtcgcggtacgctcctgcgtga

SEQ ID NO: 346873 - DNA, 255 bp, Pseudomonas aeruginosa
ttgagcgtgacgtttccgtacagggccctgccagttcgccgcctcggcgactgcccggagaacgccggccgcgcgtggggcctcgcgcatctcggcgtgccgatggccggcctcgcctgctggggggtgacctaccagtgcagcatcagcttcgagggtcgcgccgggctggtcgtcgactacgtgacccgcggcggccaggaaatccttgatgcgcattcgcactgcagccgggtgttcggcacgttcgagtga

SEQ ID NO: 346874 - DNA, 2847 bp, Pseudomonas aeruginosa
atgagggtaacggttcggcgcgcactcgccttccttgtcatgttccttgccagcactacggcaagccaggctcagcagccagccatcaacctgttcggacgaatagcctcgaccacccgtccctggctgaccgacatggaccggcaatggctagccaagcgaggcccactgaggttcggggtttccgcccccgactacccgccactggaactgctgagcgccaatcatctgcaaggcatcacggcggactatctggaactcctgttcgaccagtccgtccagatcgtccggcttccatcgagagaggctgccctacaggcgctacgccagggcgagatcgacctgctgggctccagcactcccgtggaggccgccgatagcaagatggtcctcagcgaactgtacctgcccgaccagccagtcctggtttccacgctcgaggcaccattcacccagcgtcaagccggcatcagactggccattcctccaggctacctgaaggaatcccaggtcaccgccgcctacccgggcagtcggctgttcctctacgaatcgaccaagagggcactggaagcactggccctcgacgaagtggatgcggcgttgggggacgtggtctcgagtaattacctcatcaataccaactactgggtcaatctcaagatcaggagcttcgcccccatcgaaagccgcggcttcggatttcttctcaggcccggggacacatggctgcgggactatctcgccagggccgttcctgccgtctccgcgcagtatggcgacagcatcctgcgcagttggagcggtggccgaagcatccgcctgagcgacagccggatcgccctcactccgagagagaacggctggctggccgagcaccccagcgtacgggttgtgctcaatggctcgctgggagccctcgggcagttcacacagaacggcaaggcggtgggcatcggcccagactacctggagctcatcagccaacgcagcgggcttcggttcgagtatcttcaggcgcggaactatgcggagctcgacgaagcgatggccaagggaagcgccctgctctcaccggtcatgtccccgtcttcggggctaccccgctccatcgaactgcttcccccctatctgcagtcatcggtcatcgtcctttccgcgaaaagcgcctcgatcacggacagagaggagcaggttcaccatcttgccgaactggaaggcaagaaagtggcggtcgtttccggttatttcctggaaaaagagatacgcacgcatcatccgcgcatcaagctggccgtctaccccaccctcctcagggccctgcgcagcgtcgacgaaggcaccagcgacgtcttcgtcggcagtgactatgcagcccgcttcgtggtgacccagcggctcgagaatcgcctgaaagtgaccggtgtgctggacgcctacaaccgccctgtcagcctggcggtccaggccagggagcaggagctgcgcagcatcctggaaaaggcccagctctcgatcaccccggaggaaatctccgagctcatcaggaaatgggagccccgctacatcaccatcaggggaagcttctggagggaccatttacacacgatcctccagattggcgcgatcgccctggtgctcgtgctcttctctctggtatggggactctacctgacccgccagatccacaggacccgcctggcggagcaaaaggcggatgcggccaaccaggccaagagcacgttcctctccaccatgagccacgagatccggacgcccctgagcgcggtgatcgggcttcaggagctcgcgctacaacgagcggaacagggcacgatggacaaggaatcgctgctcgcggcgcaaagcgcggcacagggattgctgctgttgatcggcaacgtcctggatctcagccgaatcgagtccgggcacatcgactcgacgcccaggccggtcgcgctgaaagccatgatggaggaaatcgccgaactggcaaccagcctggctcgacagaagaagctgaccctcgacagcgaataccatggcgacgtcgaacaatgggtgaccgtcgatccgctgcatctgaagcagatcacattcaatctcctgagcaatgccatcaaattcaccgagcagggcggcgtgacgatgcgcctgagcggaaaccagacgccacgacacctccatgtgcaactggacgtcatcgatacagggatcggtatttcagcggaagactgctccaggttgttccagcccttctcccaggtggagtccgcccagcgcgggcaggcctatggcagcgggctggggttgaacataacccagcgcctggtggaacacctgaaagggcatatcacgctgcaaagcgagcccggcaaaggttcgcacttcagcgtgacgctggagctgcccttggccacacctccggaggcactgccggaaccgccggctccccaggaacgctcgtcggacgagactccgctgaagatcctcgtcgcggatgaccaccccttcaatcgcatcgttctggaaggacaactggcgcagctcggacatgccgtgacgctttcggaagacggactcgaggcctgggagcaatggaagacaggccgattcgacctgctcgtcacggatggccacatgccgaaaatgaacggtttcgacctggtcgcccacatccgtgcggaggaacgcgcctccgggcgtaagccctgcaggatcatcgccctgacggccagcgcggaggaggctatggtcgaacgcttcaggaaagcgggggcggacgaagtcctgttcaagcctgtctccctggaaatactgggtcgcacccttcggaacggatga

SEQ ID NO: 346875 - DNA, 390 bp, Pseudomonas aeruginosa
atgaaagatgaactgagtacgcagcagccgatggagaacctgttcgacagccgatccctgaagtccatcacggggggtgagccgaccgcgttgcggcgtttgctcgacacactgctggctagcagccgcagtgatcgcgcccgcttgctgcacttgctcgagcacaacgacctgcaggggctggcggaactcgcgcacagaataaaaggcgccgccagggtggtgggaagcactgtattggtcgaatcctgcgtgttgcttgaggaggcatgctcaagtcaaaggcattctgcggaacaggtgaccgagtatgcactttcattgagtcgcaaggtcgagatgttcgagagtaatgtcgtggccgaattggccaggcttccgaaaagctag

SEQ ID NO: 346876 - DNA, 597 bp, Pseudomonas aeruginosa
gtgtccatctccatgaaaagtcttctggctgctgcggtagccagcctggttgtcggcaacgctatggcggcagacggcaccatcaacttcaccggtgaaatcaccgctgcatcctgcaacattaccggtggtgccggtaccaacgttggtggcagcaagggcaaccagaccatcgacgtcaacctcggtaaggtcagtatcgacgcgctgggcggcaccgctggtggtggtatcgctggcggcaccaatatcaacctggagctggattgcggcgacaccggcaccggcctgaccaccgtcaaggtcaagttcgacccgcgctccggctccggcatcgacacccaaaacgtcagcctgctgaagaccaccggcaccgccaccggcgttggcatcggcatctacgacaccagcggcaacctgctgaacctgtcggccaacgaaaccttcgatgcaccgctggtcaaggaaggcaccgatccgaagttcacctatagcgccaagctggatctgcgcgccggttacgtgaagtccggttcggacgcgccccaagccggtaccgccaacggcaccctgccgttcaccctgacttacaactaa

SEQ ID NO: 346877 - DNA, 765 bp, Pseudomonas aeruginosa
atgcccctcctttccgtctttccttccagagaagaactcatcatgaaacatgtactttcttccagaattctctgggctggtgttcttttgctttcctctgggttggccagtgcaggtattaccctgggtggtactcgagtggtactgcaagcccccagtaaggaagcttccatacttgtaaagaaccaagccgcccaggatgtcatgatccagtcctggatggaggccgagagtgacagtcactcccaagacgttcctttcgccatcactcctcctctcagtcgcttgggggccaacaagcagcagacgttacgcattctctaccagggccagggcctgcagaacgatagagagagcgtgtttcgcttgagcgttcaggaaattccgcagaagtccaagtcggataataccctgcagattgcgcttcgtcagagaatcaaggtgttctatcgccctgtcggtctccagggaacgccagatgaagcggcaaagaacctgacatggcgcctggttcgtcaaggtggacggtctgtggtggaggctaccaataacgccgcttttcatgtgtcctttgccagtgtgaagttgaaaagtgccggtcagtcttatgccgtaacggcagatatgctcgcgccgaagtcgagcaagagattcgatgtaaaagatattccggctagcgcttcggcggcagccatgaaggtcgagtttcaaagcgtgaatgactatggcggtcttgatcagcatgtatcccctttgggggagtag

SEQ ID NO: 346878 - DNA, 2508 bp, Pseudomonas aeruginosa
gtggccattttcagggaaaatttcaacttcaagatagccgtttattccggggcttcctatttcatggctttggggatgaccctgccaggggtggctggcgcagtcgagttcaacgaagatttcttgcagaagaacggcagtcccgtcgagttgagttatttcgagaagggcagttcggttctgcctggctcctatagcgtcgatatctatctgaaccagacgatggtcaagcggcaggatatcaacttcagtgccagcccggaaaccggcgaagttaaaccggtgatccaggttggcctgctgagggacctgggggtcgatgttccccgcctgatgcgggataacctgatagcgagcaatctcgagaacaacatgccgctggatgtgccgggcctcattccgggcgcctcggtggagttcgatgtcaacaatctggccctgctggtcagtattcctcaggcatatgtacagcggcattcccgcggttacgtcgatccttcgctctgggatgatggcgtcaccgcttttttcagtaactaccaagccaacttcagccgcaataccactcatggacagagcagcgactatcgctaccttggtttgcgcaacggtttcaacctgttcggttggcgtttgcgcaacgactcctctttcagtggtggcaccggcatgcgcaacaagttcaccagcagccgcacctacgtcgaacgcgatatccggcccctgaaagggaccctgtccttcggggagctatatacccagggtgagattttcgacagcgtccggatgcgtggggcgcagttgaagtccgatatcggcatgttgcctgacaacgagatcggctatgcaccggtggttcgtggtatcgccgagaccaatgcgacggttgaggtcagccagaacggctatgtgatctactccaccagcgtttcgccaggtgctttcgagatcaccgacatctatcccagtggctcgaatggtgacctggagatcaagatcatcgagtccgatggacgcgagcggaccttcaaacaatcctattcctatctgccggtgatgacccgcaagggcaacctgcgttatgccctggctgccggtgagtaccgcacggatggccagccttcgcccaagctgctgcagggaacggcggtttatggcatgtcggacaacatcaccggctacggcggcctgctttctgcggaaaagtacaacgcattcaacgttggtatcggccttaacacgcccttcggcggcgtctccggagacatcacccacagccagtccgatacccggcgagcggggcggaaccaggggcagagcttgcgttttctctattcgaaaaccatcaacgccaccgataccaacttcaccatggtgggctatcgctactccacggaaggttatcggacgctcagccagcatgtggaagacatgtccagcgaggattatctgaacggcatcagctatggacggcagaagagccgtatcgatctcaccgtgaaccagactctgttccggcgcagttcggtctacctcagcgccggcgaaaccacatactggaaccgccagggcagtacgcgccgctggcagtttggctacagtggcagcgtccgcgacgcaagctacagcctggcggtatcccgcacccaggacaccgggccggtagggcaatcggacacccaattcaccgcttccatcagcattccattgggcagcagcagccgttcgcatcgggtctatgccagtgcgatatcgtcgcagcatggcgattccagcctgaatacgggcgtatccggttatctggacgagaagaacacgctcaactacagcgcccaggccaactacagcaaggatgccggaaactccggcagcgttggcctgggatgggataccaccacagccaagctcactaccaactacagccagggacgcgacaacaagcacttggacgtgggagccagcggctccatggtcgttcacaagggcggtgtgaccttcggacagccggtgggcgagacgttcggcctggtggaggtgcctgacgtcggtggagtgggcatcgatggctacaacacggtgcgcaccgacaagcgtggctacgccgtggttccctacatgcagccctaccgctacaactgggtaaacctggacaccaatacgctcggcagcgataccgaaattgccgagaactcgcagatgcttgtgcctactcgaggagcggtggtgaccaagcgcttcgacgccgagtccggtcggcgcgtccagtttgagctgaccctgagcagcggagagaagattcccttcggcgcccaggcctatgaccagtcggagaaagttgttggcatggtggacaacctgtcccgactgctggtgttcggcatcgaagaccaggggcgcctggaggttcgttggggcgagggaagcagctgcacagcgaattatcagttgccggccaaggacaagaacctttcttatgagcgcatggcattggtttgtagcaccaggtaa

SEQ ID NO: 346879 - DNA, 522 bp, Pseudomonas aeruginosa
atgccctaccgttacagaaagatggaatccccggtcggtagactgaccctggtcgccagggaccagacctcgctggtcgcgatcctctgggaacacgagcgacccaaccgggtcccgctcgacgatatgcagttcgcggaggccaatccgatcctggcggaaaccgagcaccaattgagcgagtacttcgccgggagtcgcacccgcttcgagctgccactcgacttccagggcacggaattccagaaaaaggtctggaacgccctgcttaccattcccttcggcgagacccgcagctattcggaaatcgcagcgcaaatcggtagtccgaaggccgttcgcgcagttggcgctgccaatgggaaaaatccgctttccatcgttgcaccttgccatagggtgatcggcgcctccggtggtctgaccggatttgccggagggctggcagccaagcaatggctactgcggctggaacagcgaccgactcgtcccgaactgttcgatacagcctgggaatgctga

SEQ ID NO: 346880 - DNA, 639 bp, Pseudomonas aeruginosa
atgcgcaagaagctgataatcgtcggcgccggggggttgggccgggtggtgtacaacgttctggtcaacgacgcggaattcgccgagcggtatgtgctggccggctttctcgatacccgtccagacctgaagctaccggacgatatcccggttcccttgctgggaagcccgctcgatcaccaggtccgctcggacgaggcgttcctccccgccgttggcgacccacaattgcgcgagcgcctgctggcgcctttgctcgaacagggtgccgagctcgccacctacgccgagcgggctttcatcggtgcgcggacccgcatcggcgcggggtccttcatcaccccgggcgcggtcctttcggtggacagcgaaatcgggcgttgcgtctacatcgatacctatgtggtgctggggcatgacgtgagcatcggcgaccacgccatgctgggggccatgactttcctggccggcggtgtccgtgtcgggcatggtgccagcattcatccgcgcgcgaccctcgccaaggacgtgatcattggcgagggtgccaccgtgggtatcggttcggtcgtcgtcaatgacgtgccggcgggtgtcacggtattcggcaatccggcgcgaatcatattttccaagtga

SEQ ID NO: 346881 - DNA, 1176 bp, Pseudomonas aeruginosa
gtgaaccgtgatcaggcactggcacgattcgaaacggatgtcatggctctgaacgccagctcgggcggcggacggcatccggaaatactcgggcgagcccggcgggtctatctgctcggacccacttcgttcctggggctcggcttcgcggcgagcatcgcgcagaagctgggcgcctcggggaccgaggtcgtctgcgtcgacgatggtctggccagtcgccggcaaccgttcggtgaatacagggtgctcgacaccaaggggttcgtcgaggacgcgcgtcgccatccgggagcgctttcggtgaacctcggcaattcggtatttgccgcctgctttttctcgcaggcttcgcagcgtgccggtgtgcaggagttggatatcataccggtgctggacttcctcgaactgccggtgatctaccagactgccgcctgcatgcgcgcggcgacgctggagcggctcgacgattaccgcgccttggcccggcgtttccaggatccgctgagcatccgtacgctcggcgccttgctggaactacgcctgacccttgagcgcagggcggtgctgccagtgctctgcagcttggaaaacgagtacttcgctccctatgccgcgggcgaggtcgatacgttccggctgggggagcgcgaagtgctggtcgatgttggcgcccatgtcggcacgactatcggcaaattcctgaccgctacccgctggaaataccaatctatccacgcgttcgagccggaccgggagaactatgcggcgcttgagcggggttacttcgccaccctcgatgacttccacgcatacaatatggcgctgtccgatacccgatcgacgcttcaattcgcccagaccggcacgatggggagccgcatcgaccagggcggcaatgtgcaggtccaggccttgccgctggatgaagtccttgatcatgcaaccttcatcaagatggatgtcgaggggcacgagaccagcgtactgcgaggcgcgcgcaaactgatcgcgacccatcgtccgcggctagcggtgacgggctatcactacgcggacgatttgctggatatcgtccgactgctcgatgaaatcgagccctcctacgatctgcgcttgcgccatcactcgtattattactacgacagtatcctatatgccgaggctcgctcatga

SEQ ID NO: 346882 - DNA, 132 bp, Pseudomonas aeruginosa
atgagcaaggggctgaacgcgaagaaggaaacccgcaagaaaccgctgaagagcgctcatgagaagcgtctggcgaaacgcgcgaagaagcacggaccacacgccctgcccggcacgccacagcagggctga

SEQ ID NO: 346883 - DNA, 363 bp, Pseudomonas aeruginosa
gtgcccgagacgcggattctttccatcctgctgcacgtcggagactggcgcgcggcgaccgactggtacgcccgggccttcccggcggcccgccggctccggccggccagcgacgactacggacacctggagatggacggcctggcgctggagatcgtcgaggccgacgaaaaggtcgccagcggcgcggcggggacggtggtgtactggcgggtggcggatctcgccgtcgaggtcgagcgcctgggcgggctcggcgcccggctctatcgcgggccgctggacatcggcggcggcgagctgatctgccagctgcgcgatccctggggcaactgcatcggcctgcgccaggcgaggccctag

SEQ ID NO: 346884 - DNA, 2610 bp, Pseudomonas aeruginosa
atgtcttcacgcaagatcgggctcaacctggtggtcatcgtcgccctggccgccctcttcaccggcatctgggccctgtacaaccgtccggtcagcgtaccggactggccggaaagcatctccggcttctccttctcgccgttccgcctcaaccagaacccgcagagcggccgctaccccagcgccgaacagatgcgcgccgacctggaactggtcgcccggcacacccacagcatccgcacctattcggtccagggcgcgctcggcgacatcccggcgctggccgaggcgttcggcctgcgcgtcagcctgggcatctggctcggcccggacccggccggcaacgaagccgagatcgcccgcgccatccgcatcgccaacgagtcgccgagcgtggtgcgggtgatagtcggcaacgaggcgctgttccgccgcgaggtgacggcggaacagttgatcgcctacctcgaccgggtccgcgcggcggtcaaggttccggtgaccaccgccgaacagtggcacgtctaccgcgaacacccggaactggcgcaacacgtcgacctgatcgcggcccacgtcctgccctactgggaggccacgccggtggccgacgcggtggacttcgtgctcgaacgcgcgcgcgaactcaaggccgccttcccgaggaagccgctgctgctcgccgaggtcggctggccgagcaacgggcgcatgcgcggcagcgccgaggcgacgcccgcggaccaggccatctacctgcggcgcctgaccaacgcgctcaacggcgaaggctacagctacttcgtcatcgaggccttcgaccagccctggaaggtcagcgccgaaggctcggtgggcgcctactggggcgtctacaacgccgaccgcaaggccaagttcaacttcaccgggccggtggtgccgattcccaagtggcgcgccctggccatcgcctcggcggtactcgcggtactcgccttcaccctgctgctgatcgacagttcctcgctgcgccagcgcgggaggaccttcctcgccgtggtctcgttcgcctgcgcctcggtgctggtgtggatcgcctacgactacagccagcagtacagcacctggttcagcctgaccgtcggcgcgttgctgggcgtcggcgcgctgggggtggtcatcgtgctgttcaccgaggcccacgagctggccgaggcggtctggacgcgcaagcggcgccggccattcctgccgatcaccgccgcgcaggcctatcggcccaaggtgtcgatccacgtgccctgctacaacgagccgccggaactgctgaagcagaccctcgacgccctcgcccgcctcgactacccggactacgaagtcctggtgatcgacaacaacacccgcgacccggccgtctggcagccggtcgaggcgcactgcgcgcgcctgggcgagcgcttccgcttcttccacgtcgccccgctggaaggcttcaaggccggcgcgctgaacttcgccctgggccacgtggcggcggacgtcggggtggtcgcggtgatcgacgccgactactgcgtcgaccccgactggctcaggcacatggtgccgcacttcggcgacccgcggatcgccgtggtgcagtcgccgcaggactaccgcgaccagcacgagagcgccttcaagcggctctgctacgccgagtacaagggcttcttccacatcggcatggtcacccgcaacgaccgcgacgcgatcatcgagcacggcaccatgaccatgatccggcgcagcgtgctggacgagctgagatggccggaatggtgcatcaccgaggacgccgagctgggcctgcgggtgttcgagaagggcctgtcggccgcctacttcgagcgcagctacggcaagggggtgatgcccgataccttcatcgacttcaagaagcagcgcttccgctgggcctacggcgcgatccagatcatgaaacggcataccgacgccctgctgcgcggccgcggtcccgacggcagccgcctgacccgcggccagcgctaccacttcgtggccggctggctgccgtggatcgccgacggcctgaacatcttcttcaccctcggcgcgctgctctggtcggcggcgatgatcatcgtgcccaagcgcgtcgacccgccgctgctgatcttcgcgatcctgccgctggccctgttcgccttcaaggtcggcaagatcctcttcctctaccggcgcaccgtcggcgtcgacctgcgcgacgcgttcttcgccgccctcgccggcctgtcactgtcgcacaccatcgccaaggcggtgctgtacggtttcgtcacccgcggcatcccgttcttccgcacgccgaagatgcgctccagccacggcctgctggtggccctggcggaggcccgcgaggaagtcttcgtgatgctcctgctgtggggcgcagcggccggcatcgtggcggttcagggcgtgccgagccgcgacctgctgatctgggtcgccatgctcctggtgcaatcgctgccctacctggcggcgctggtcatggccctgctctcgtcgctgccgaaaccgcgcgaggaactggccggcggcgccgagcggatcggcggttga

SEQ ID NO: 346885 - DNA, 672 bp, Pseudomonas aeruginosa
atgcctgacctgagtacctggaacctgaccattccccagggccgcccggccatcaccatctccaccagccaattgcagcgcgactaccgcagcgactatttccagcgcaccgccgacggcattcgcttctgggtgccggtcaacggcagccacacgcgcaacagcgagtttccgcgcagcgagttgcgcgagaccctgtccagcggcaggccctacaactggcgttacgccagggccgacaactggctggaggcgaccctgcgcatcgaggcggtgccctcgacccggcgcatgatcatcggccagatccacagcgatggcagcaatagcggccaggccgcgccgctggtgaagctgctctaccagttgcggctcgaccaggggcgggtccaggcgctggtccgcgagcggccggatgacagcgggaccagggtctacacgctgatggatgggattcccctgggccagtcgttcagctaccgcatcggcgtttcccgcgacgggctgctcagcgtgtcggtgaacggcagcgccctggagcagcggttggatccgcagtgggcctaccagggtttgtacttcaaggccgggctctatctgcaggacaaccgagggccgtccagcgagggtgggcgagcgacgttcagtgagctgcgcgctagccatcaatga

SEQ ID NO: 346886 - DNA, 987 bp, Pseudomonas aeruginosa
atgaagaacctcttgaagccattgttgctcctggctgtagcgattcacgccgggcccgccctctccaatacctgtgcctggaacggggcagctccagcagcttcctatgcagtgcccccgcttccatcgtccctgaacctcaacaaggttgcgattggcggggttcttgcgaaatccaccctttatgtgagcgcggtaaaggcaagcttctcgtgccagagaggcgcgaaaggtactttgaccgcgaaggtggacaatttcccttatgaaaatggaaatatcttcgcaaccaatgtggaaggcgtggggattcgtataggcataggcaccagcatcagcagtgccgaatggtatgcgccccatgaagcaatttggccttctggtggcatcatctacaacgtgcagaacgttctgcatatcgagttcgttcggacaggaatggcggtaggctccggagacgtcccgctgtccttcaccgcaaccacaacgtacgggaacctggcaccaatcgagtttcgttatgcggcccgcaccaccaagctcgtgaataaagtattcatcgagagctgccagcccaccaggaaagtagtcgatgtccccctgggcaaggtacccgcctcccaggtccgccggaatgacgcgctctggagcgagttctccgtagacatccagtgtaaaagcgaggagttcacgcagaagccgccggtaaaagcctacttcgaaggcaatgtatcgggcggattgctggccctctccggcactggcgatcctgaggtcgcatcgggagtaggcatacagctgaccgacgaacaaggaaaagcgcttccctttgcccgggcaaatgcaatggcgttgccatggatacgcagggatcccacggcggaggtctataagctctctggaaaagcgcgctatgcggcaaacggttctgaaatcaaacccggcaaggcggacgcgacactgacctatgtgctcgaatacaactga

SEQ ID NO: 346887 - DNA, 690 bp, Pseudomonas aeruginosa
atgtctcgtagccggcgcctgctcgagctgctgcagattctccgccggcaccgttacccggtggccgggcatgtgctggccggcgaactcggcatcagcctgcgtaccctctatcgcgatatcgccaccctgcagcaacagggcgcgcacatcgagggcggcgccgggctcggctacgtgctgcgcccggggttcgagctgccgccgctgatgttttccctggaggaggtcgaagccctggtgctgggcatgcgctgggtcggccggcgtggcgaccgacgcctgatgcaggccgcccgcgatgtactggccaaggtcggcgcggtgctgccggcggccctgcgcgaggaactggagagcagcaccctattgatcggcccagcgccggccagcgagatcgccgacgagctgctggcccgggtgcgcgacgccatccgcagcgaacatcgcctgcgcttcggctaccgcgacgctcaggggcaggcttcggaacgggtggtctggccgttcgccctgggctacttcgagcaggcccgcgtgctggtcgcctggtgcgagttgcgccaggcgccgcggcatttccgcctcgaccggatggacgcgctgctcgatctcggccagcgttacccgcgccgacgccaggcgctgctgcgcgagtggcgcgagcgggagggcatcgccgctcagtga

SEQ ID NO: 346888 - DNA, 369 bp, Pseudomonas aeruginosa
atgatcgcccccagcctgctcaacctgtacgtcgacgatcccgcgcgcagcgccgccttctaccggcgcctgctggcgcgcgagagcgtcgaacagtccaccgagttcgccctgttcgtctgcgccaacggcttcaagctcggcctctgggcccgcgccagcgtggcgccggcgagcgcggtgcgtggtggcggcgacgagctgtgcttccaggtcgatagcgacgacgaggtgcggcgcctgcaccagcgctggcacgaacagggtgtggagatcgtccaggcgccgcagtcgatggacttcggctacaccttctgcggcctcgatctcgacggccaccgcctgcgggtctactgcctggcgctgtag

SEQ ID NO: 346889 - DNA, 984 bp, Pseudomonas aeruginosa
  misc_feature (257)..(257): n is a, c, g, or t
atgagcaatgactacctcgcctggggctggaccccgggcgccggcctcgacggcctgcacctgctgcgcaagccgctgcccactcccggccccggcgaagtactggtggccaaccgtgccatcgccctcaacccggtggactggaagatcgtcgagtggggccatgcggcctggagccaggaccatgtcccgggcgtcgacggcgtcgggcgcgtcgtcgccaccggcgccggctgcgacctcgccctcggcagccnggtcgcctaccaccagtggctgggccgcgacggcagcttcgccgaatacaccctgctcgacgccgacgccctgctggcgctgccgggagggctcgatgaagcccgcgcggcggcactgccgtgcccggcgctgaccgcctggcaggcgctggaaaaagtgcccggcggcggctcccgcgacgtcctggtggtcggcgccggcggcgcggtcggcctgttcctcgcgcaactggcggtacggcgtggctggcgggtctgggccacggcagcgacggaacaccgcgaacccttgctcggcctgggcgtgctcgggatcttcgactatcgccgggcggactggcgcgacgccctggcgcagtgtctcggtgagcgttcgctgttcgccgtgttcgataccgtcagcggcgagcacgccgcgggcctggcctccctgctcggctacaacggccacctggtctgcatccaggaccgcctggaaagcgccccgctgccggccttcggcacggcgatctcgcagcacgaggtggctctcaacagcatccacagccatgccggcggtgccgaccgcgcggacctgcgccgcgccgccagccgcctgctccacgacctgcgcgacggcgacctgcgcctgccgccgttgctgtccttcgacttccaggccttgccgcaggctctgcgcgcactgcgggacggcagccgcaagggcaagtggatcgcccgcctgtaa

SEQ ID NO: 346890 - DNA, 933 bp, Pseudomonas aeruginosa
atgcatccccgtttccagcgcctgctcggcgacaagggtttttccatcggcctcgaactgccgctggacaacgactggtcgcgccacggccaatccttgtgcgaacgcgacgcgcgtccgttcggcgtccccgccctggcccgccacgccgagctcgcgcgcctcgccgaccgcggcggattccgcgccctctgggtgcgcgacgtgccgctgtacgacccagccttcggcgatgccgcccaggtcttcgagaccttcagctaccttggctacctggccggcatcaccgaacgcatcctgctcggcaccgccgcagtggtgctgccgctgcgccagccctggctgaccctgaaggcagccagttcgatcgaccggttgagcggcgaccgcctgctgctcggcgtggccagcggcgaccggccgatggaatacccgctgttcggggtcgactacgccagccgcggcgccgccttccgcaacagcgtcgaactgctccgcgaccagggccgcgcacgcctgccggaaggcgcgcggctgctgccggagcgcccgcagcgcccgccgctgctggtggccggtctggcccagcaatcgccgcagtgggtcggcgagcacatggacggctggctcagctatccgggcacccccgacgaacatcgcgggcgggtggcgctatggcgcgaggtcgccggcggcaagccctacgtcagcttcttccacctcgacctgctggccgacccgcaggcgcccctcgaacgcttccgcttcggcggccgctgcggccgcctggcgctgatcgacgagctgcaggcgctgcgcgacgcaggggtacagcacatcggcctgcacttgcgccgttgcgagcgcgacctgacggaagtcatcgaggaaatatccgaacacgtactaccgaggttccaccatgagcaatga

SEQ ID NO: 346891 - DNA, 1200 bp, Pseudomonas aeruginosa
atgcctctcgccctgctggcgctgaccctcagcgccttcgccatcggtacgacggagttcgtcatcgtcggcctgatccccaccatcgccggcgacctcggcgtcgacctgccgtcagccggtctgctggtcagcctctacgctctcagcgtggccatcggcgcgccgctgctcaccgccctcaccggccgggtgccgcgcaagctgctgctggtcggcctgatggcgctgttcaccgccggcaacctggtcgcctggcaggcgccgagctatgaagcgctgatcgtcgcacggatcctcaccggcctcgcccacggcgtgttcttctcggtcggctcgatcatcgccaccagcctggtgccgaaggaaaaggccgccagcgccatcgccagcatgttcagcggcatgaccgtggccttcgtcaccggcatcccgctgggcaccttcatcggccagcacttcggctggcggaccaccttcctggtggtctccgcgttcggcctggtggccctgctcggcagcctgctgttcgtgccgcgcaacatccgccacaccccgccggcgccgctgctgcgccaggcccgcgtactcctgcagccgcgcctgctgctggtctacgcgatgaccgcggtgggctacggcggttcgctgatcgcctttacctacctggcgccgatcctccaggacctggccggcttcagcccgaacatggtcggcctggtgctgctcgcctacggcgtctcggtcgccgtcggcaacatctggggcggccgcctggccgacgcgcggggaccggtcaaggcgctggaaaccatcttcctggcgctcgccgcggtgcttctggtgctcggcgtcaccgccggcaacccgtggctgctggtgctcaccgtgctggcctggggtgcggtggccttcggcaacgtgcccgggctgcaggtatacgtggtccggcaggccgagcgggtcgccccggaagcggtggacgtggcctctggcttcaacatcgccgccttcaacctcggcgtcgccggcggctcctgggctggcggcctggtggtggcccacctcggcctggcccatacgccgtggatcgccgccctggtggtgttcgccgccttcggcctgaccgtcctgagcggccgcctcgatcgccgcgacgcccagccgcaaggcgccggcgcggcgaccggcaacctctga

SEQ ID NO: 346892 - DNA, 1689 bp, Pseudomonas aeruginosa
atgctcacggatgattctttagagtttgctaaaaggcatattcaatctttttatgatactgatttttatcctaaaccatttgaatttcttgccttgtggcactcatgggatggtgttaagaatttccttttaaatacgcccttagatcagattcacacagcacagccttgtacagttccttgggctaaagctaaaggtggatatagggtggttcatcagctggagccacttgatgcaatagtttataccgctttagtttatctcgcggcgaatgacattgaacgggtgagaatggatcactctgttgcttgttcgtatcgaattgaaccagatagacaaagcttctttgctaaagggtctgggtttccgtcatatcgaaattcttgcgaacaactgtcggaagaatatgagttcgttttaacgacagatgttagtgatttttataatcaaatttatcttcatcgtgtagggaatattgttgagtcggtaagctctcctaggttagggaaggagatagagcaatttctctctaggcttaataataaggcctcgcagggaataccgataggtcctgctgcatctattgttttggctgaggctataatgatagatgttgatcagttcatttctaatcatcatgttcctcatgcgagatatgttgacgatatccgggttttttctgatagcaaagatgagttggttcaggttttagagaatcttgttatttatcttcatgagcatcatagattagggttggcttcagagaagaccagaattattgaaacttcaactttcttaaaggaagagttgcaaaatcaatatcagtttgagaagttggagatattaagcgatattgaggtggggaatcagtacggtgtttatcagggggatgaagaagattatgagactgtagaagacactgaactgggagatgtccaggaggagacggaggagacggaggatacggaggagacggaggagtggggggagtcagacagttccgaagaggaactaggtgatgaagatgatactgagtcggagcctgattttcgcagcctagatgagaagcttctagatgcgcttcttcgagcaaaagattttggatatgttgatctcgcagttctgcgtgcaattattaggagagcaaagattgctaaaactccggtattggcacaagtgctaattgaggatttggagttttttgcgcctatagtaaacgatgtttcactgtatttggcttcattggatttggaggacgtatctaatcttgtgccgcacttagtggcagcttatgagcgcggagatttctgtcgtcgtagtattaagatgtggatggagtggttgattacaaggaatgatgtcactctaaaagataagaagttgcgaaaatttgcattgaccggtacgcctcagtttgccgctaatgctgcaatgcttttgaagaatatggcctgggcaaaagagtcaaagacaaaaatactgacatctgctacttggaatagacgtgcatatattcattctttggtattgctttccaaggatgagagaagtaagtatatttctcttataaataagaatacatcgcttactcagactgagcgctgggtttgttcatgggttaaagaaggctgcccagatccagttcctgaggaagaagatccatttggcgaatgggatgatgttatttga

SEQ ID NO: 346893 - DNA, 285 bp, Pseudomonas aeruginosa
ttgtccgggcaaaccgtcaccgcacagtccccttccacctacatccccctgcgacgcacctcgcaatgcaaccagcatcccggctgcgccaccctctacctggactgcagcgcagccagcgaagacctgttcaacaccgcccgccgccggctggagtcggcgatcggaacgctgagcgtcctcgacctgctcgacgaaaccgaagaacccggtgaaagcatctgtcgcatcaccggctccttgctgtcgctgttcgaggcggaatacgcacgcagacaccgataa

SEQ ID NO: 346894 - DNA, 876 bp, Pseudomonas aeruginosa
atgcaatatgcattttgccacatcgaccagaaggtatgggaggcatataagttctccctcctacctgctgcggaaattgcggagaagcgaaatagcttaacgtgtgtggaatgtaaggctctggcgtggttccgcaaagagagtacacacggtcatcccgcgcatttctgcgcgcaccacgaaccgacgtgcgtattgaaagccgaatacgttgtcgttgatgcagatcagggcgatggtgctgaagtcgtcgatcaaataaaaagtagcggtgacatcgttgtccgcctagacaaagagcgtggcggcgatattgatgttgagcctgcctcacgtgttcctgggggccttccgggagaggggggccgcattcacctgactcggggccaaaataggttttctgaccaagagttcacgcttaaacgtattctccatcgcttggttcagagtcctgactttcgacaatcgaccgctcgtctcacattctatcggcgtgaaaacgagccgctgattgatggtcgggtatgtgatatcacgagagcgtttagcgaaatttcccgtggagatgaggagacccggaagttctattgggggccaatcactagtgccaagaggactccggacgggaaaatttggctgaactcagcgccgcagtatcaagctgtgagcgtagtgattttcaccgatatagcggaagacttccttcgctcattcaatattgatgatttggatgaccttgcgggtgctcacgtcttggtgtcagggactcttcagtttactggcgagcgaggaattaagccgatcatctggtgcggtgcgctctatcagatcgtcattcgacgttaccgtgcggctaacctgcaggttgcgggttag

SEQ ID NO: 346895 - DNA, 951 bp, Pseudomonas aeruginosa
atggttaaggattatataggattttattctaataatggtttttgggttgatcggcgctatgattggggtaataacttagatagaagcaagctggaaggtataattcagcatcaagcgatttggcatcattgtcctgagttttccgctgctgtatgtgtcgatggaatgattttgcttagagttgagcggctttttgaagtggttccctctatgtcaaatccagatgagatattggctgcatttcattggtgggatgatcatcttgattatgccaacgccctacagctatgcatcgtgtcagaggctcttcggtgttctaattcgtcaaatatagacgctatggagataactgttgaaagcacttgtcgggtaggcttttcaggtggtcgtgcagtcagaagtaaattctctgagtgtgtgagcttcatgtcggcgcgaaggcggatgtatcttgggttgacgcagaatgctgatgagatgggggatgttttatcaactttctctgtggttagtgaagagtctttgtacaaggcgttttgtttgtttgaagcggtttgccataacccggttcacgtggggtggttaagctttttggctagagctgggtatgcgtttagaaagaatgactttagagctgctctcgtatttatatggtttgtgattgagtcaattgtcaaggagttgtggggtggggggaggttttattcgaagtttcctagttctgctgtagtgttgcgtgaattgatgaggaatgaggtgatttcagatcggctttatcatgcgctggactttgttagggcgaggagaaattctttgatgcacgaaccaattgaaacgaccatctttccagatgattgtttaaaggctgcggattctgctttagagcttttttcgttgattggaaatgacagaggcttggttttggggtggaaatgtggtgtggagttttaa

SEQ ID NO: 346896 - DNA, 699 bp, Pseudomonas aeruginosa
atgcagccatgcatattcgtacctgccggtgtgacgcccaatatcgcgcagaaatctggcacggttgataggcacagagtcacccaatggatatttcagtgcctcatgcataatctgcatccacacgtcagcctgagactcgtccaactgctcgccccagtatgtaatgactgcatcagaacggctcaccagcacgacctccctgtgcgttttctttcatcccctggcaataggtgcaaacaagctggaacgcgcaatgtggttcggcattgcacgaccgagctcgcctactccaggaagaaaaagcggttggggagtttctacaatcgacgcacgcttttcgatggccaccgactgcagccgctcaaggcgcgacagcaacctcggagaggtctgcggtacgtcctgactcatggtgcagaacgtcgagatctggtgacttgctcagctttggttgggcgaccacgctttggcggcccaggggcaactaaaggcgaaatgtcagaagccgaggtcacgtgttcagccagccattgctcgacgtcctcaacccgccatagaagccgtttcgtgcccggtaaccggcaaatgggaggaagggactgcggattacgcgttgcatcactccggatgctggcgaccgatttctgcaggtattccgaaagctgttcgactgtgagcaaagcttgcatggactga

SEQ ID NO: 346897 - DNA, 504 bp, Pseudomonas aeruginosa
atgaaggccttgtcgtttgcgatgttagttgtcgaggccgctaaggatggaaagccaaagttctcgattggccgtacccgtgtgctgcatatgatcgatggattcgactacgacgatgagctggaggagtacagcgtgcgtattaatcctagatggcgtggcctttatgccaaccaggagtatgcgttgatcgactgggagaagcgcctgaggattcggcagggccaggacatggccaaggctctgcagcggctggtagccaccaccagtgatacggtgcagcggtttcagttgagctggctcaaggaaaaactgcagtacttcagcccaatgcgtaaattcaaggaagcgctgatcaatgccatgtgtgagcttgagcgagtggaggtcatcgcgggaggacgaatcgagctcagtaccaaggggaagcagcaagcgacctggcacaagattgttgatcccctgtctgggcgtcggggtagcgttccgccaatatcggggtag

SEQ ID NO: 346898 - DNA, 657 bp, Pseudomonas aeruginosa
atgccagcacgcaatacaaaagagcttcgtaaagaccagatccgcacaacagccctaatgcatgaactgatgcaccgaacgggaagcgaaaacccccatcagttcgccggctggtatgaccgcatcacacatagccatacccaggactccggaaaatggcgcgctaactttgcggggtctcggcccttatcaaagaggcagctaatcgagctggctcagatataccctgacactcacagctaccatcagaatggtcccaatggtctctggcgggctctctggggggaagccgcagatctcattgcctgcgtccgcagtcaccccaagtcatcacctcagataccttttcaggcaagtgagcatgccgtacagctatcaattcttgcggcactggatgatcagatcgactttgacgactttgttcgcgtcattgcgctgtaccgtcttcgcgtgaacacggaaccaagcgcacgagtcgatggcattggtctgaacctgagcggttgcgcttggcgtaacgtagaaacgtgcctgaatgacgccaaggtgcgcgccgatctcgataggctgggaatacgggcgttgataacccaagagctggcacaactggaagccgagcgcatcaaggctaatcccaaagccctgattttcgactaa

SEQ ID NO: 346899 - DNA, 1431 bp, Pseudomonas aeruginosa
atggaccccaataaagccccgctagaatacttgcacacagacgaaataacatttgacgccgatattacgccaaccataaacaaatatttcagcgagctaagcgattactccattataaaacaggagaatttagaaaatatttctgaaataaccttttactgcaaagactctatcagaagagagcgatgtgaatttttacttgcaataacgatatcgcacaataaagacaaacaatgcaagattactgggaccgaaataaaaatccaacaccccacttcagatataaatgaatacgatctagaagcatacatacaaaatctttactacaaaatacttctcaaaaaaaacgaaggatcaaacaataattacacagtaagaatctactcaaaaatctacaattcgcaccctataaaagggcaatatctactcaacttcaaatacagaacgctgatttcctcggtagctgcccctcacaagcacgagcccaacaccgaacaaataataactttcgatgttgaaatgaccgcagcaagtattgagcatgcgcgatcactagcctttgagcacgtatcaaacatccaatcctatctatccgtattagttgatgtgggttttgagttcattgactcagaattcagaactttcatattcaagccttcgcctcctgaagcactgagcttttcaacccaaagatttaggactggctactttgaccccgacctaaatctagttgtaagggacaaccttaacttcctaagccatattgatgacgaggaggacttcacaaacctattccaaggaaaggtcagtgtatcgctcgacgatcccttcacatgcaaaaacataaaatataactacactgccacaagaaaagagcaccttgaaaaaacattcctcaatagaaaactccccgaaataaaccagaacccagcagatttttatcgagaagagatatccaaagagcaccacctccccaacttagaaataaaattcccgagagagctgagagcctatttcaagggaataaacagacttcctaccgaaaaaagagaagcatttctttcttgctctagaatgtataacctcgctataaaactgcatagaacagagcctacagcctgcctttcctacctgatttgcgcggtggagtctctgacaactccgaagcaaggattctctgcttttttaaacgcatttgccccaaataattatgataaaaaactctgcgattactattattcgataagaagctctcactttcatgctggcaaattccactttcgagaattgaaccctagcctgatgatcgagaccgacattctctttgctagacaacataggaatttctttgagttttacgataccatgcgggcgactattgtgaattgggtggaaacgcacattatccaaaactgcaaaagccgcgaataa

SEQ ID NO: 346900 - DNA, 1125 bp, Pseudomonas aeruginosa
ttgacgccaacagaactcgaacaagagcactataaagcccaccttcgagcagataccaatattaatacaatacagatcaacgccgaagatgaagaacttttggtagttaacggcttcatcgctcaaaaggtacacgctacaaacaagcacattgcagaggattcggtatttgacataccgatagttctaaacggccaggaaattggaatactttgtctaatgactcagattccgccatctccggaaaccctcgcttcccttacggatgctcagtacgccgcatacataacaatggtggacgccaccgcgctctcttcgggagcatggccttcatttccttatgactgcgtagttatagaagagcaatatctagaaagttatcaaagaaatctttcatcatcccctctctggggaggttttactcatgtgggggaaagcctggagattgctaaccagaaaataagcagcaaatcctcacaaatagaaatctacgagaactgtgcagctcgtacaaaacgtcatcaagaatgcttggagttggcggctcgcgccgcacactcgactgaacgctttctacacttctaccactatcttgaacttgactacgactacgaagtagtaaaagggataaaatcaatagacgaaaatgacccacaaaaactatgggacgtactgaaattatcgagagatgacattgatagaattcaacatatacttcgagaatatgacagcatccccacaattgaaagcttacttacaaaactacgaaatcatgaaagcgcagccatgcgcatattttatgattacggaaaagactcaaacccactaaaagacaaaactgcatttagagagcaatttatactatcagcctgtatcaacagaacagaattagacagcataaagaaatccaaaaatctatcagacaatttctgcgcaacagaagacagctaccaaacaaagatcataaagctagcttgctattggatttaccgaatcagatgtagcgttgcccacaacaagctcggtgaatattatctaaatcaatctgacgacatgcattttctggttgactttgcagaacctctccttgtggaaatggtaagatttagaatgtcaaaaccttaa

SEQ ID NO: 346901 - DNA, 1110 bp, Pseudomonas aeruginosa
atgccattagagatcctgggagaagcaacagacgtcagaacaggcactcgtgtcatatacgcaaaatcagacattagaagctatatagacctagtaggaaatgactttgacgagttcaatattcaacgtcgccgcgtcaagcacaaggcctactctcggatgcgagaagacatcattgcaggagcgctattaccaaccataagccttgccattaaagaggaattcattcaagtaattgaagacgcgaacggtgataaagaagctatagccgcagcgctatccatcccaaatcgcgtcaatattcttgacggactacaaagaacacacaccctattcgatataatccacgaaggaatagaactaaaggaaaatcaaacaatacttctagaattttggcttgaaggaaatattaaaaatctcatatatagaattatcgtacttaatgccggccagaaaccgatgtcaatgcgacatcaaatagaacttctattttctgcaaccaaagataccttagaaaacagtatagccgggctagaggttttctctgagcgagatgacgccagacgcacacgcccagggaagtactcactcgaacgactctcactagcttattactcctacataacaaaatcgccagaaatcgacaaagaaaacattatcgcccaacaacttcaagaagatgaaatactttcagagggcgaagagaaatttggtgaaaaatttgatcgcttcaccgaacttctccgatcattcttagatattgatacaaaaatattcgctcaatatcgtgccgatggtttaacttggattggctctgagaacgtaatgctttccttcttttccgcagctgctaactttgatgcaagggctgacggcgcccacagagttaacacaggaataaacacactaatcgaactcttaacaccaccaattgaaacaccagacccgttagctttagaagttcttcgcggcgtaacccaaggattcaactcaagaaaagtaaacgttggctttgcgacacggaaattgctgttcaactccttcagggaatatttcagagccgaaggtacagtaccacttcgcgatctgtggttgcaggaggctgagtaa

SEQ ID NO: 346902 - DNA, 981 bp, Pseudomonas aeruginosa
atggatgccggcgtgttcctcagccgcaacgaagcggaatcgacctccttctccaaggccctggagatgtacgccgagcaggtcactagcaaaaagcgcagtagcgactctgagctatcccgcatccaggccctgcaacgccacccactagccctaaggtcgctggccagcatccgtggcgccgacatggccagctaccgcgaccaacgcctcgctgaaggcctcgcagcggcgaccgtgcgacgagaactggctcttatctcacacgtattcaccatcgcccgcaaagagtggcgtatggagtcactgaacaaccccgtcgagttgattcgccagccaagcgtcgatgacgcccgcgaacgccgaatcctcagcgcagatgtctggacgcgaaaggacgggaagctggtatgcgagcatctggacgagatagatatgatctgccgctactcccgctcagccgaactgccaaagatcgtcgtctttgccgtggaaacggcaatgcgccgcagcgagataacggacttgcttcgcgccaacgtcaatctggaaaagcgggtcgccctacttcccgtgaccaagaacggctccgcccgtggcgtccccctttccggtaaagcagtggagatactgcacagtctcactgagcgagacgatggccgatgctttaagagccgaccggactcaatcaccaaagccctcgcagaagctatcgggaacgcacgtaacgtctatgcagaaggtctatccctatacctcaaacagaaaaaaatctcccaggagaagatcgacaagcgcatcagtactgatccattcctgatggatttgcgcttccacgacctgcgccatgaggccacttctcgtttagctgatatctttcctctccatgagctaaccaagattacaggccatcaagacaccagaatgttaatgcgctactaccaccccagaaccgaagacctagcgaaaaaatttatatag

SEQ ID NO: 346903 - DNA, 534 bp, Pseudomonas aeruginosa
atgtccagcgcacctacgcgcctggatcacgccgccctgcgtgaaaccctgcggcagttgttcgacctgcccgccggcggcgtcgtcgacgccgaccaggcgctggcgccgccggctaccccctatgtgagcctgcgcctggaaacctcgaatctgcttggcaacgtgcgccgggagttttccgccgccagcgagcaggaatccctgctggccagttgcgaaagcatctttcgcctgacctggcatggccccgaggcgcaccagcgcctgcaggacgcccgctgcctgctgcagtcgagcgccaccatcgatgccctgcgtgagctgaaggccagtctgctgcgcctgacgccggtggagaacctctccgccgcgacgggcggccagacgctcggacaggctcgtttcgacctggtcatcggccacgagcacgtgttggtcgtcgacctcaagcgcatcgccctggcgacgttgcaggcccacggcagttcgggcctgtccgccgccgttaccgttcaatcctcggagacctga

SEQ ID NO: 346904 - DNA, 1875 bp, Pseudomonas aeruginosa
atggagtcgactaatcaaccgaccgccggacaggccaaggccttgcaggaataccttcgggagttccgcgaggcgctgggccaggtccagtcggtcgccaggaccgtgcagggaacggtggctgccctgctgggggggctgaccggctacctcgacgactcgctgaaggggctggaggacctcgaggagggtgaagacgcgctggggccgatcggtcccgacgcgatccgttccgcgcaggactatcgccaggcggtgcaggacgtcgatgcgctggtcgaggcgctgaacctccgcgtcgccctggggctggcaccgaccatcggcaacctcgcggagcgcttcgagcgcttcgtgcaaggcaaccgcgaggcgctgctcgaaggggtggggaaggcgctggaagtgatcgcccaggccatcgacgcgctgggtaacttcgtctgggcgctggacgaggtggtgggcgcgaccctcggttggcgcaccaccctgaccctgctcggcggcaccttgctgtggctgggacgcacggcactgctagcgttcgccagcaatcccttctctctggtgatcgccgccctggcggtgctgatcctgctggtggacgacttcgtcacctatctgcgcggtggcgactcgctgttcggcggcttctggggagcgctgcgtgacgcggtggccggcgtcagcgccttcatcgaggaaaacctgcaaggcgtgctggcggtggcgaccttcgtcggcaccgccctgctcacggcggttccgctttccagctggggagcgggtctggccaggctgctccttggcgcgaacctggccatcggcggcctgctgggcggcatcgggcgcttcggcgcggcgttgcgcggtgtcgtgacggtcatcggcctgctcggcaatgcgttgcgcatcgccttcctggccaacccggtagggctgctgatcgccgcggtggtcaccctggcggtactggtggcgttgaacttcgagcggatcaaggccgtcgccgctgccgcctgggatttcatcgtggccaaggcggtcgctgtattcgttgccttgcaggaactcttcgcgccgctgctgcagtggtacggcaacctgttcggcctggtcggcgacctgctcggtggcaatttcagcgccgcgctggagcgcgtccgggcgttgtgggagcaggtactgggcttcttccagagcggtatcgaggcgatcgccggcctgttcggcgggctgggcgattacctgagcctcgacctgcccgacctcgacccgcgctcctggctggaggcgttgggagaggccgccgcggcgatggctgcgctgctccaggcggccctcggcgcggcctgggacgcgttgctggccaaggccggcgaagtgctggacgggctgcgtgggctgttcggctccttgggtgattggctctccgggctgttcggcagcgtcggcgaaacgatagtgcaggcgcttggcggcgtcttcggcaagctgctgcagctctggggcgacagcctggcgagtgcctccggcctgctcggcaaggccctggacgcgtttggcgggttgttcccggcaagcggggagggcgtgtcgcaggaggttccgcgcagcctgcgggcggtcgccgcgcagacgctcgtgcgggtcgatgccgcgcaggtcggcgccagtccctacgtcagcccgccgtcggcctgggcgccgggtatcgatccggtcgccggggtcagcccggtgagcaaccagaacgtgcggatcgacatcgtcaccagcgatccggtgcaggccggacagaccgccgccgcggaaatccagcgcctcaatcagcgcgccacccgcaattacgccaatcgtttcaaacagtga

SEQ ID NO: 346905 - DNA, 744 bp, Pseudomonas aeruginosa
atggtcatgctgatcaatcgccatgtcggtaccgtgcgtctggacgcggtgatttccgaaaaccacgtgtctacgttgaagactaccgccaacccggtggagtcgggagcgcaggtgatcgaccatgcggtgctcgaaccgaagacgatcactatcaccgggaccctggtggatcacgcgccacccggagaaccgctgccttccctgttggcggccggggctcgccgcgcgccggactttctcgaccaggtggcgccggccggcgctcccggttcgctcaccgaacaggcccggcgctatgccgcccgccagttgcaaagttggctggcgcccaccggccgtcgcgcggccgaggaactcgcggcctggctaccgagcctggcgccgccgtcgatcggcgacctgtcgctgagcagccagcgggtccagcagatccattccagcctgctggacttgcagaagtcgggggaaccgctggacatacagaccggtttccatctctaccgcaacatgctgctgaccagcatcagcgcggaacaggtggtggacggcgcgttgaagctgaccatcgccgcccgcgagttgcatctggtggaaacccgcaccatgcgcgtgcccagtgccggccgcagcggctccggccgcgcggcgcggcaggcggcgccacgccaggcgcgcggggcgacgcggccggagccggcggacaagagcctgctgaagagcatcgcggggctgttcaaatga

SEQ ID NO: 346906 - DNA, 354 bp, Pseudomonas aeruginosa
atgagagtcagacgaatagacgaagagggcgactggctgttcggtcagggccgcaacaactacgccgataccggcgagtcggtgatgcagcgggtctgcacccgcctgcgctcgttcgagggcgactggtttctcgacctcgagcacggtctgccctggttcgagcgcatggcgcggcccgccgacctggccggcctggaggccgacctgaagcgttgcatcctgttgaccgatggggtcagcgagatcctcgacttccaactggccgtcgatccgcgggaccgtcggctgaaaatcgccatcagcctgcgcgatcgctacggcggcacgcaggcggcggaaatccttcgctag

SEQ ID NO: 346907 - DNA, 1146 bp, Pseudomonas aeruginosa
atgggacaactgactgacaagggctatgtcgggcagcgcctggacagcatcctcgaggagctggaccggggtttccgcgctatctacggcaacgatatcgaccttgcgccggatagcccggacgggcagatgctcggactgatcgcgcagattcgcgccgatctcgaagagctgggcgaggtgatctaccgcgccctcgacccggaccacgccagcggtgcctggctcgaacagcgcgccgcgtatgccggactgctgcgccgccgggcgcgctacagctacctgcgcggggtgctcctgagcgggcgcccgggggcggtgctgccggctggcgcggtagtgcgtgatatcaaccagggccgttggcaactgatcggcgaaaccctgctgggcggcgacggctccgctcgcggcgacttccgcagcctggagctgggcgcctttcctttgccggcggacagtccgctgacgctggaaacgctggcgccgggctggagcgcggcgcgcaaccggcagccggccgaggtcggtgtggaggaggagaccgacgccgaactgcgcgcacgcttcttccgcagccgcgcccgaccggcgcagaacagcctggacgggatggtcgccgaaatcctgcagttggcggacgtgcgcgaggtggtcggcctggaaaataccggcaaccaggccgacgccaacggcgtgccggcgcacagcctcaacctgatcgtcgatggcggcgacgagcaggccatcgccaccgtgattttccagcgcaagaccgccggtaccggcttgcatggcgatgtcgaggtgacgctcgcggacagccagggcatcgcccgcaggctgcgtttcgaccgcccgcaagtcatcgcttgccgggcactgatcgaagtgcagcgggatgcggagttcagcgcggtggatggcgcggcgatcaagtccgcgctggccgccagtgatttcggcatcggccaggatgtacagctttcgcggctctacagtccggtgaacacggtccagggcttctgggtcagccaactgaagatcgcccgcgtcgggcagaccccggtcgccgccaatatcgagatcggcgttcgccagcgggcacgcttcgatcccgccgatatcgaagtggtggtgctatga

SEQ ID NO: 346908 - DNA, 510 bp, Pseudomonas aeruginosa
atgcgttccctgccccttctcctcgccctgtcgctcgcccccgccggcgaggccgccacggtattccgctgcgaagacgccagcggccatgtcaccttcacccagctcggttgtccgaacgcgcaggccggcgaacgcatcgaggcagacaacccgccgccgggcggaaccagcgtcacgccgatggccacacccgcgcccctcaggcgggaggctccgtcggtggtggtcgtgggggaaggaaaagagaagtgtggcgctcgcctgggcgagcaggaacggcgcaaggccatcgtggagcaacggatagtcgcgggcatgacccgtgccgacgtggaacgcgcgttgggcaagccggaccaggtgagcgggaacaatgcagaggtgacctatcggtacaaggccgacaagcgacggggagcgagaagcgtgagcttcgatcaggaggggtgtgtgaagggcaaagcggattccggaagcagccgtccgaaaagacggccatccaattaa

SEQ ID NO: 346909 - DNA, 753 bp, Pseudomonas aeruginosa
atgctcggctggtcggcggataaccgcgttgcggttatgcgccctacgtggcggttctgcgcggggtacggtagggcgaataacgccaggggcgttatccgccgatgcgcggctgggccggcggataaccgcgttgcggttatgcgccctacgtggcggttctgcgcggggtacggtagggcgaataacgcgcggggcgttatccgccgatgcgcggctgggccggcggataaccgcgttgcggttatgcgccctacgtggcggttctgcgcggggtacggtagggcgaataacgcgcggggcgttatccgccgatgcgcggctgggccggcggataaccgcgttgcggttatgcgccctacgtggcggttctgcgcggggtacggtagggcgaataacgcgcggggcgttatccgccgatgcgcggctgggccggcggataaccgcgttgcggttatgcgccctacgtggcggttctgcgcggggtacggtagggcgaataacgcgcggggcgttatccgccgatgcgcggctgggccggcggataaccgcgttgcggttatgcgccctacgtggcggttctgcgcggggtacggtagggcgaataacgcgcggggcgttatccgccgatgcgcggctggccggcggataaccgcgttgcggttatgcgccctacgtggtgctgcgcggggtacggtagggcgaataacgccaagggcgttatccgccgatgcgcggctggccggcggataa

SEQ ID NO: 346910 - DNA, 753 bp, Pseudomonas aeruginosa
atgaacaagcttccgcagatcaccctggccttctgggtgatgaaaatctgtgccaccaccctcggcgaaacggcaggtgacctgttgtcgatgaccctcgacgtcggctacgccctcagctcgctgatccttctcggcgcattcctcgccaccctgctcgcccagctgcgcagcgaacgctacaacccctggctgtactggctggtgattctttccaccagtaccgccgggaccaccgtttccgacttcatggatcgcagcctcggcctcggctatgccaccggttcggcaatcctcctgggtctgctggcgctggtcttcgtctcctggcgcttgtccggggaaccgctggcggtggagcgcatccgttcgcgccgggtcgagttgctgtactgggtggcgatcctttgttccaacaccctgggcaccgccctcggcgacttcctcgccgacgactccggccttggcttcgccggcggcgccctgttgatcggaggcctgctcgccctggtgtcgctggcccactggttcacgcggatttccggggtgttgttgttctggatcgccttcgtcctgacccggccgttcggcgcgacccttggcgacgtcctgaccaagccgcacgagaaaggcggcttggatttcggcacggtcggttcatcgctggtgctgctgagcatcctggcgctcttcgtcgcttatgccgcctatgacggcagtcgcagcagcgaccgggtcggcgcgaccagctaa

SEQ ID NO: 346911 - DNA, 1038 bp, Pseudomonas aeruginosa
atggattgcggtgagctcataatactcgacgttggacatggaaactgcaccatcatcaaacatggtgatgaggcgatcattatagacgccccaggccgccccgttgtagccaaagtactagacgaactgaagataaaatcagttcacgcacttctcctatcacatgcggatagtgaccatctatcaggtgcaattcccatattaatgaaccctgatcgcccagtcaggcaagtctatgtcaatcccgatctcagaaaaaccaaatcatggtttcaatttagaattgcagcaggcgacgccaggaaaaatcggggaacggccatttatccgtcattaaacattgaccagccgcagaatctagcattatccaatacgacactcagaatccttcaccccacgccggaaatgtgtttggcgacaaacgaaggagaacatactgatggagtcaagctggacccaaacagtatgtctgcggtcataatagttgagcataacggggagtcagtctgcctattagctgctgattcgggccggcacagtcttgatatgatgcttgtcgaaaaaatagatttacgcgcccacgttttggtctttccacaccatggaggccatcttggaggaactgccgacaacagaactttcgcaagagatttagtttcggcggttcaacctaagcttgtgctgttttctttaggcagaggttcacacggtacccctcgaccagaaataattgcaggaactagagaggccatttcaactcagcccccttatatcgcatgcactcagctatcgaaaaattgctcagatgcgctgcctagtcaggctaatcgaaaacttgtcaagcattcagagggcttcttgaagaatcaatgctgcgcgggaaccttggttttcccgttgagtgataacggtattgaagtcatgatgggagagctaagtaatcaccacggcaaatttgtggcctccgagctccccaaagctctttgcagacgtaagcttgcacaagctgcaccacatataatcgctacgactaattaa

SEQ ID NO: 346912 - DNA, 1185 bp, Pseudomonas aeruginosa
atgaacgggcacgcaactgatttcatttacaatacattgtcgctgtctgatcgtcgccggcatggagttttcttttcaggctcttcgtgggccaagaagattttagcaggccaagacctaacacaatggcaacgttttatcgatccaagcgtgggcgttggcgatctactgcttgaggtatgtagctctctaccattacaaaagaccgccaccgaaactattgatcagtgggggaatattttgattgcagtagatttaagaaagtctttcttggacatagcctggatgagaatccaagcactcgcctttcatcgccacgcgactgaaaaagggcaatcaaacaaaattgtgttcaaagagctccctgaaagctttctagttggagatgcgctggagattgaacttaaactcaatagcaacgattgcatcataatgaacccaccctaccagagaatccaggcacctgaaaatagttttacagggaagggaaaacggtctgctgctgcgcttcatctggagtatattgtgcgccaggcgccacccggagtaggtatttttgcactaatcccggacgtattaagaagtggcagctcttacaccaactttcgacgtgagctcaaaaaattaatccaagtcaattcgttcgagccttttggagctttcggccctcaagctgatattgatgtggctatccttgtggctgcttcaaaggcacaggaaaaagaccatacggaacttgaatcggaaaagcctcactcgctatgcgtagaaaattttttctcagtatccgttggccctgtcgtgcctcatagaactcccaccgatggcaagctctatggttatctaacagccaagaatgcagttgtaggtgaggaaattaaagctccctcggtgttcgccaactataactgccgcgttgaacgcggtccttttgttatagtacggcgcacctctagcccctcagacagaaagagagcgcgaagcactttattttcctcaagagaagaagtcttagtagagaatcatcttttgatactcaagcccaaggacaagaaaatatcaacatgtcgcctactactcaaagtattggaggacaatcgcaccaatgaatggctaaatcactgcatcagatgcagacacctgaccgtcggtgcaataaaacgcttaccctggcttgaatattga

SEQ ID NO: 346913 - DNA, 810 bp, Pseudomonas aeruginosa
atgccagcgcgcgacttcagcctgttgcccgcctgcctggcaggcgtggaggcggtcgtcgcggacagcctgcagcgcttcccccgacattcccacgcacagtacggcatcggcctggtcgaggccggcgctcagaagtccctgagcgggcgcggtatggtcgaggccgaggccggtgacctgatcaccgtcaaccccggcgaagtgcatgacggcgctccgctgggcggtcgcgcgcggcgctggcggatgctctacctggagccggagctgctggccgccgccttcgccgggatcgacgagcgctcggcgagcctgccggagttcaccctcccggtgctgcgcgcgccggcgctggcggcgccgttccgccaactgttcgcggcgctgaccgtccccctgggcgaggcccgggcgctggccgtcgaggaatccctgctcggactgttggccgagctggccataccctcgcaccggccgctccaggctccggcggacagccgtatccagcttctgcgccaacggatcgacgacgacccgctggcaccgctgagcctcgccgagctggccgacgccgccggcctcagccgctaccaggtgctccgcgccttctcccgcgcgaccggcctgacgccttacgcctacctgctgcaacgccgcctggagcgcgcccgcgccctgctcggcggtagccagccgctggcggaaatcgccctggcctgcggcttcgccgaccagagccacctgacccggctgttcacccgtctctatggtgtctcgccggggcgctacgcccggacccggcgctga

SEQ ID NO: 346914 - DNA, 888 bp, Pseudomonas aeruginosa
atgcactcccgttacctcgcctatgcctgcctcgcactggccatgctgctggtcggcagcacagtggtggtcagcaagctgctcgcccacgtcctcgaccccttcctcaccaccgcgctgcggctggccctcgccctgccctgcttcctcgtcctgctgcgtctgtccggccagcgctggccgcgcctgacgcggcgcgacgggtacctgctgctggcgcaggccgcagccggcagcgtcggctacacggtgttgctgatcgtcggcctcaggtacaccagcgccgccgacgccggggtgatcctcggcgccctgccactggtggcggctgcgctatcgatcctgctgctcggcgaacgtccttcgcgtcgtttgctggcggccctggcgctggcttcggccgggctggcgacgatcaccctgcagcccggtggcgcgcgcggcgcctggttgggcaacctgctggtgctgctggcggtgagctgcgaagccctgttcatcctgctcaacaaggcgctgcgcacggccatgacgccgctggcgctgtccaccgcgctgagcaccctcggcctgctgctgagcctgccgctggcgctgcccgccctgcccgagctggccacgctgtcgctgccggcactgctcgccctgctctactacgcgctgctgccgacggtggccggcttcctgctctggtacaccggcgccagccgggtcagcgccagcgaagcctcgctgttcaccacgctgctgccggtcagcgcgctgctgctggcggtgacgctgctcgacgaggagctgacgacgcgccagttgctcggcctcggcggtgtgctgctcggcctgctgggcgtcctgctgccggagcggcggcgcgcggagcctggctga

SEQ ID NO: 346915 - DNA, 1137 bp, Pseudomonas aeruginosa
atgtcgaagaaaaacggacacgctgcaccaaataaagcatggatgctgaatcaggtgccgatgatcacgttcctggccggatccgcagaccgtcccgccccattgctgcccctatggcaagccactggccggatcctgagaagggcaacgctcgccctgctggcctggcagctctcctgctcagccatggcggagtgcaagctcggctccggcggggtctacagggccacgctgaccctgccggccagcctctcggtacctcgcgacgcagcgcctggcagcgtcatcgccagcgcccgcttcaactacagcttcaaccagagtgccccggtcggcgtccattgcgacaccgccacgattgccgactggatcgccggcaacggacaatcggcaaacgccgagggggtgatcccgacgggcactcccggcatcggctaccgtctgacagccccgccggatgggacagccctcaagccgggttccctgccggttccgctctcggtcttcaacacgccgtcgcaatgcggctatcccgctagcggcaaatgctatgtgtacctgggcgccccgatcactctggagctggtcaagaccggcgatgtgcaaccgggagcccagatctccggactggagacgctccttacccagaagatcggcggggtcaccggctcgaccatcaccctgagcacgcccctggtgcaggtcacgccacaaagctgcacggtcagcacccgcccccccaaaagtttcgacaaggtggggctcagcgagatgaaggaggtcaatagcagatcgcccgctcgcagctttgcgctgatcatcgactgccgcggaaccagcgccaaggtcgcggtgaccttcaccgacgcgtcgtcgccctcgaaccggagcgatctcctgtcgcttagccaggagtccaaggccaacggcttcggcatccagatacttttcggcaaccagaaggttcgcttcggcgccgactcccgggccgcgggcaaccccaaccagttggtcctcggcgacgtcagcaatcggatccatgaagcgcagttcaccgcccaatacgtgcggacctcggccaacgccaccgcgggcatcgccaacggcagcgcgaccttcaccatgtcgtaccaatga

SEQ ID NO: 346916 - DNA, 1203 bp, Pseudomonas aeruginosa
ttgactctacaagcaggaaaactgccacgcttcaccgatgtgccatggcgctggatcgcctattgcgcctccaccacggtgctgatcgccgtggccttcgccttcattcaggaaatcgagctgaaacgcgatgtcccctgtgaaatcgtctcgccatccgaactcaagatcaccggccatggcggcctggtaaccagcgtcctggtaacgccggggcaagtggtacgggaaggccagccgctgttcaggctgacccgcgacctgtcgctttccagcgacgagagcccgcgggcgcgcttcgacgaacgcatgcgcgacgcgcagatcgccgcaatagatgcccagattggtgaccggcgcgcagctctttccgcccgtatccaggccaccgaactcagcgcagaggcacgtgcgcacgagctgcaggctttgcaacggcagcgtcttcgcgcccagcgactggtcgacgacgcgcgccagagtctgcagcgcctgcggggcctggtcgactacgtcaccgccgaacgcctggaacaggcccgcgcacgccttcaccagagcgaggcggacgaggcccagggagacgcccgccgcctggcgctgcaggcggagatcgaggcgctgcgcggcaatcgccgcgagttccaggcccaactgggtgaactggatgcgcaacgcacccgcgacatccaggacatccggcaacgcttcgaagacgcccgccgggaccttgtcatcgccgcgccccgggacggtaccgtcaccttctccagcctggtggccgggcacatgctgctggaggacgaggtcagcctggtgctggataccgactcgtcccagcccctctcggcgatgctccgcatcccgtcgcgccagcgcggcttcgtccgcgaagggcaaacggtcaggatcaagctcgatgcctatccgtacgcccgcttcggcacgctcgaggcgcggatccgctcgatttccgacgcaaccatgggcaagatcgaagcggccgcaccgcaagcgcctcgcgccggcgcgcaacagagcgactacatggcctgggcactcctgcccaacgcccgcttcggcccggcgcgccagccgctgcgcatactgcctggcatgcaaggaaccgcgagcatcgtcgtcgagcgcagaaccatcgccgaatgggtgttcgagccgctgttccaactggtgcgaggctga

SEQ ID NO: 346917 - DNA, 2100 bp, Pseudomonas aeruginosa
gtgcgggtcatctaccagaacgaagtggccgattgcggctacgcctgcctcgccatggtgctttgccacctgggacgcgccacggaagtccgcgagatcgccgccctgagaccgatctcctcccatggcctgaccctgatggacctgtacgatgtcgccatcgagttcgggctcgccgtgcaggcatatcgcttcgacgccgaagacctcggcgagatcaagcccggcgcgatcatccacttcggtggcgcccatttcgtggtcttcgagaaatatcgccgcggctacgtccaggtactcgacccggcgctgggccggcggcgaatcgccctcgacatgttcctgacgaatgtctcgggatatctcctcgattgctcgccgaccccgcgaatgccgcggataaaggcccgttcccgggtaccggcggcgctcgcccgggtacgcggcctcaacccgcagttgcgcgggcagatcggcaagctgttgttcgtcgcgatcgctgcgcagttcgccatcctggcgatgccctacttcggcaacctggtcctcgaccaggtcgtcaccagcgacaaccgcaatctcctgcacatcctggccttcaccttcgccagcatattcctggtcggcaccttcagcaccatcgtccagtcctacctgtccgcgctggtcagcgcgcgggtcagcgtcaacgtcacccaggggctggtcggccagttgctgcgcaaccctattccgtacttcgaaaagcgcaacgtcggcgacctgttttcccgtctcaaggcccatgacgagatcaacgactacgtggtgcataccgccatctcgctgcgtatcgacctgctggtcggccttgccgcgctggcgctgatgctggtgcagagcccgctgctgaccgccgtcgcgctgggtatcttcgcgctctacctggccaccgccttcgccttgtacatgcccatgcgcgatgcccacatgcgggtgctggagcactccgcggaatgcgacgacaccctgatcgagaccatccgcggcgccagcctggtcaagctggcctccggcgaagtgcgacgcaccgcgatctacatgggcaggttcaaggcctatgcagtcgccacgctggacagcgccaggctcaccgcgctacgcgacggggtgctgaagttcgtcgactacatggacgtcatcgccatcacctggctctcggccgggctgatgctcgacggcaagttgtccgtcggggtcttctattccttcatgatctacaaatccctggcctcggagcggctggcccaggcgatcaacgccctgttcggtcgcctcatgctcagtgtcccggtggaacgcgtagccgacatcgtggaaaacacccccgagcgctataccgatgccgaacagacgaccgccagcgaactgcagcgcttcgagtcgatcggaatccgcaacctggccttcagctacggcgtatccgatcgctacgtactcaaggacgtcgatctggaaatccgccgtggcgacaagatcgccatcgtcggcccctccggcagtggcaaatcgaccctgttcaagctgctctgcgcggccgaaccgttgcagcagggcgagctccgcctgaacggggtggattatgccaacctgacggtggatgaaatccgccgccacatgacccagatgcgccagggtgacctgatcctgcgcggcagcatcgccgacaacgtctcgctgttcagcgcccatgccgaccagggacgcatcaaccgattgctcgaacaggtcggactgctggaggacgtgatgcggctgccgatgcgcacacgtaccatcatcagcgactcggtcgccaacatctccgccggacagcgccaacgcctgctgctggccaggtctctgtaccaacccgccgaggtgctgctgctcgacgaacccacctccaacctcgatccggcgtccgtggagcgcatcgccaccttgctgatgacgctggagcgtaccgtggtggtgatcacccacgatcgctccctggccgccaggttcgagcgctgctaccagttgcgcgatggcgccctgctgccgtccgcacaaccgcaggggacgccgcacccgtga

SEQ ID NO: 346918 - DNA, 1302 bp, Pseudomonas aeruginosa
gtgaaatggctgcccgtacttctgctggcgactcttgccccccctaccgccatggccggcggcgtgctgcaggtcgtcaatgacgccctcgcccacgacgccggcctcgccggcgcgcgcgcccgcatcgagatcggcctacaggaagcgccgcgcgcccgcgccgccctgctgccgcgcctggacgccggctggggcagggcctacaaccggatcgaaaccgaggacctgccgtcgatcagctatcggcagaacggctggacggtctccctgacccagccgctgttcgactgggagcgctggatcgcgctgaaacaggccgacaccgccagcgctcgcgcccggatcgaatacgcccaggcctggcaggaactcgtcctgcgcagcgcacgcagctatttcgaggcacttctggcgcagaacgaactggaactggcgacacgctatctgcaggcggtccaggaccagcagacgctggttctccatcagcgccggggcggcgaggcgacgctggtcgatctgcgcgaggcgcaggtgcgcctggacagcgccctcctgcagcagcgctccgcccgccacagactcgagtcgcggcgacgagaggtcgagcgcctgagtggcaggccgttgcaactgcccgcaaaaggtatcgccgacgggccagccttgtggctcgagcccgggggcgtcgaacaatgggcacggcaggcggaaaccaagaactatgcggttcagcttggggaactggaggtccgcgatgcgcacgatgacgccgacaagagtcgtgcccagcgctatccggtcgtcagtctcagcggcactcactcaccatcgggcgccgcctccggctacgccaggccgaccaccaccaccaccgccatgctgacggtaagcgtaccgctcttcaccggtggcgaaatccgtgcgcgggtacgccaggcgctggccgccgaggacctggcgcgcagcaagctgctggatgcgacgcgccaggccggcgccgacagtcgcgaggccttccagaacttcctctgggcgcaggagcgcagcgaagcgctggtggcgattgtccgcgcccagcaggacaccctggatgcgacacggaaaggctacctggccggcagccgcggcaacctggacgtcctgcgcgcccacgaagccctccatgaaagcaggaaggaactggccaaggcacactacgagatgctcatcacctacctgtccctgaaggccgacgtggccgccctcgacctgggcgacatcgcccgcctggatcactggttggccgacgatgggggttag

SEQ ID NO: 346919 - DNA, 846 bp, Pseudomonas aeruginosa
atggaacggtatgcacggctaacctggtgtctgcgtgccctgttcgactcgcgcgctcgctggagcggctggctgcgccacgaatggggcagaacgaccctcggtctcggtcgggagaccctgtggcgcactcttgctgccgaacgcttcgaacacctgctcgaccggcgcctgttgctggagcggctccatggccggcatacccgctggcccgggctcgaggaggcggcccaggccctgcacgaccgtctcgagcggcttcggcgagaaacaccgggccagccggtgatcctctcgcctttccactacgtgtcgcaatacgcgaacatctgcctgatggacctgttgcgcgcgcgactggggctggatgaactggcggtggtctccggcgtgccgcgggaggactacggccaccaggaacaggcgctgactccgggattgcgcatcctgcacacctacgacgaaggcaaccgcaacgcgctcggcctgaagtttctgcaggcgctgcgccgggacggcttcgcggtgttgttcgccgacgtcccgccccacctgatgcaacgctatccgatggaaaccgtcgccgtctcgatcctggggcgacccgcgcggatccaccatggcgtctttcgcatcggcgcacggctggacgcgctgctgctaccgttccatctgagcttcgccaacgggtgcttcgggtacacattgttcgagccgatcaggctcgcgcgggacgacgcaccgcaacgcctggccgattgcatcgaactggcctgccggagcgcctatccggactggatcatcgccggccatccgtcccagtatggtttcgcaccgagcaaatga

SEQ ID NO: 346920 - DNA, 3453 bp, Pseudomonas aeruginosa
ttgcccgtgtccgtactgcgtcttcccagcctgccggccagcgccggcaagcaacactggggcaacctccccggtgccgcgctgagcctggctgtcgccgaggccgccagttccgccaagcgcttcaccctgctgctgaccgccgacagccagaatgccgaacgcctggaacaggaactgcggttcttcgcccccgacctgccggtactgcatttccccgattgggaaaccctgccctacgacgtcttttcgccgcaccaggacatcatttcccagcgcatcgccgccctctaccagttgccgcagctcaagcacggcgtgctggtggtgccgatctccaccgccctgcaccgcctggcgccgacccgcttcctgctcggcagcagcctggtcctcgacgtcggccagaaactcgatgtcgagcggatgcgcttgcgcctggaaggcgccggctaccgctgcgtcgacacggtctacgagcacggcgagttcgccgtccgcggcgcgctgatcgacctgttcccgatgggcagcgagttgcccttccgtatcgacctgttcgacgacgagatcgagaccctgcgcaccttcgacccggagacccaacgctccatcgacaaggtcgagtcgatccgcctgctgccggcgcgcgaattccccctgaacaaggaagcggtcaccggtttccgcggccgcttccgcgagcgcttcgacgtcgactaccggcgctgcccgatctaccaggacctcgccagcggtttgacaccctcgggaatcgagtactacctgccgctgttcttcgaggaaaccgcgacgctcttcgactacctgccgcaagacacccaggtgttctccctgcccggcatcgaacaggccgccgagcagttctggaacgacgtacgcagccgctacgaggaccgccgggtcgatccggaacgaccattgctgccgccggcggaagtgttccttccggtggaagactgcttcgcccggctgaagagctggccccgggtggtcgccagccaggaggacgtcgagccgggcgtcgggcgcgagcgcttcccggccctgccgctgccgaacctggcgatcgaagccaaggccgccgagccgctggccgcgctgcgccggttcgtcgaagagttccccggccgcgtactgttctgcgccgaatcggccggacgccgggaagtcctgctggaactgctggcccgactgaagctgcgccctgaggaagtcgacggctggccggccttcctcgccagccaggcacgcctggcgatcagcatcgcgccgctggacgagggcctgctgctggaccacccggcactcgccctggtcgccgaaagcccgctgttcggccagcgcgtcatgcagcgccggcgccgggaaaagacccgcgacggcggcgacgcggtgatcaagaacctcaccgagctgcgcgaaggcgcgccggtggtgcacatcgaccatggcgtcggccgctacctgggcctgatcaccctcgaggtggacaaccagcaggcggaattcctcatgctgcaatacgccgaggacgccaaactctatgtgccggtcgccaacctgcacctgatcgcccgctacaccggcgccgacgacgccctggcgccgctgcaccgactcggctcggaaacctggcagaaggccaagcgcaaggccgccgaacaggttcgcgacgtcgccgccgaactgctcgacatctacgcccgccgagccgcccgcgaaggcttcgcgttcaaggatccgcaggccgactacgcgaccttctcggccggcttcccgttcgaggagacgccggaccagcaaggcgccatcgaggcggtggtcgccgacatgctcgcgcccaggcccatggaccgcctggtctgcggcgacgtcggcttcggcaagaccgaagtggcgatgcgcgcggcgttcgtcgccgtgcatagcggcaagcaggtggcggtgctggtgcccaccaccctgctcgcccagcagcactacaacagcttccgcgaccgcttcgccgactggccggtaagcgtcgaggtgatgagccgcttcaagagcgccaaggaagtcgagaacgccgcgcggctattggccgaaggcaagatcgacatcctcatcggaacgcacaagctgctccaggaagatgtgaagttcgccaacctggggttggtcgtgatcgacgaggaacaccgcttcggagtacgccagaaggagcagctcaaggccctgcgcagcgaagtggacatcctcaccctcaccgccacgccgatcccgcggaccctgaacatggccgtctccggcatgcgcgacctgtcgatcatcgccacgccgccggcacgccgcctgtcggtgcgcaccttcgtcatggagcagcagaacgcggtgatcaaggaagcgctgctccgcgaactgctgcgcggcggccaggtgtactacctgcacaacgaagtgaagaccatcgagaagtgcgcccgcgacctcgccgaactggtcccggaggcgcgcatcggcatcggccacggacagatgcacgagcgcgagctggaacaggtgatgagcgacttctaccacaagcgcttcaacgtgctggtggcctcgaccatcatcgagaccggcatcgacgtgcccagcgccaacaccattctcatcgagcgcgccgacaagttcggcctggcccagttgcaccagttgcgcgggcgcgtcggtcgcagccaccaccaggcctacgcctacctgctgacgccgccgcgccggcagatgaccccggacgcggagaagcgcctggaggccatcgccaacgcccaggacctgggcgccggcttcgtcctcgccacccacgacctggagatccgcggcgccggcgagttgctcggcgacggccagagcgggcagatccaggcggtcggcttcaccctctacatggaaatgctcgaacgggcggtgaaggccatccgcaagggcgagcaaccgaacctcgagcagccgctgggcggcgggccggaggtcaacctgcgggtgcctgcgctgatccccgaggattacctgcccgacgtacatgcccggctgatcctctacaagcgcatcgccaacgcccctgacgaggaaggtttgcgtgagttgcaggtggaaatgatcgaccgcttcgggctcctgcccgatccggcgaagaacctgatgcgcctgacccttctgaagctgcaggcggaaaaacttggaatactcaaggtcgatgccggaccgcagggcggtcgtatagaattcgccgccgatacccaggtcgacccgctggtattgatcaagctgatccagggccagccgaaccgctacaagttcgaaggcgcaaccctgttccgcttccaggtgcccatggaacgaccggaagaacgcttcaataccctggaggcgctgttcgagcgcctgacaccgcaaaccacctaa

SEQ ID NO: 346921 - DNA, 225 bp, Pseudomonas aeruginosa
gtggtacccagcttcaaggacaccgcgctgttcgcctggatttcacaaacctggaacctgagctgggaggcgttcgagaagcccttcgacgccgttcaccgcgtggtcggcctgtggctgagcacctcggtggtgctgctccatgcgctcgccgccggctaccaccagtgggtccgccgcgacggcaccctggagcgcatgctcggccgtcgccagcgccgctga

SEQ ID NO: 346922 - DNA, 1005 bp, Pseudomonas aeruginosa
atgaatacctgtctgcacaaggcccgttgctctttttttctccttgcggcgctgcttcccttccatgcctgggccgggctcacggatgtctgtgttcccgtcggctctgccagcgtgcaggtccagttcccttccgtcacggtgcaacgggacgtggaagtgggtacggtgctcgccatcagggaaatcagcactccgatggagtgccagaatctcttttacccgacgggggggaccgcgcagtacttcaagtcgaaacagaatcccgcctatcagccgaccaccggctatgcctatccgaccagcgtggcgggcgtgggactctactgggaaaccgccaactacgacggttccgtggcccggatgagtgggctggcgctgaacaacgaatattcgccgctgtccgtgccatttccctatctgggaaagaacacctacacgctcaggcagacgttcaagctgataaagaccggggcggtggttggcggaacgttttcctttccgagcttcaaggtgatgaccaaacccaattcggtgctgggagatctctacaacaaggaactgttcaccttctcctttgccagcagtccggtggtcagcgcttcgtgctacctgacgaaaagcagcgtcgtcgtcgaactgggccgcgtgccggcggccgatttcaacggtccgggcagcacgaaaggcggcaagggattctccctggacctcgattgcaacgccggcaccgcaatcaacctgacattgagcgaacagttcgccaatacccgctatccggggacgatcaacctgctcgacgtcgcccagtccgccaagggagtaggtatccaactgctcgatgcacacggggaaccggtcccgctcggcaagcggcgatacatggggatggcgaaagacgggccgaattcgatcgacatgaccgcccgctatatccagaccggacagaacgttaccgccggcaagacggccggggtactcagcctgacgctttcctatcagtga

SEQ ID NO: 346923 - DNA, 642 bp, Pseudomonas aeruginosa
atgagcgcactgccgcaggaaaaaccgttgccgcgccaggcgttcgatgacgacccccaggtgctggccgaggtgcttcgcgacggggtcaacctggcggtctggacacgccggttgagcccggcgctgcgcgacttcgccgctgccctggtacgcaaccggccgggactggcgctgagcctgacgctggagatggagggagagcgagcgccggcctggaatgaattgctcggcacgccggagttgcccggacaggccgatttcctcgacgacctcggctggctggtggaagccttcgcctgcctgaccggcgcgcagcgcatcggcttgcgcctgcgcgcgctggacaagccgatgtgcccgcgcttccatgtcgaccacgtgccgctgcgtctggtcaccacctaccagggcgttgccagcgaatggctggacgagcccgccctggatcgccgactgctgggaggtttccaggcggaagtagtcgatgcacagcttatccatagcttgtccacaggtgacgtggcgttgttcaagggcgagcgctgggagggtaacgaaggtgccgggctggtgcatcgctcgccgcaaccggagcccgggccggcgcgcctgctgttgaccctggactggcttgcctga

SEQ ID NO: 346924 - DNA, 237 bp, Pseudomonas aeruginosa
gtgcgcggccgtgagcagcgtcagggcatcgccgccgagcgtgaccaggatgtgcgccacgcgctgaatgggaacgccctgccctgtccgcacttcgatcctttccaaggcatggaggagaccgaggagagccctgaggcgctcctgtacggattcgagcaactcattggcggaggcgttccggtgaacgtagagaatcgcttgctcgtatgggtattcgacagaggacgggactga

SEQ ID NO: 346925 - DNA, 210 bp, Pseudomonas aeruginosa
atgcaggctatcgataagcgtgagttggagcgggttgcgggtggcgggctcactatcggcggtgtccaggcgaaacccggtatggatttcaacggtatcatcagccagaacggtgggggcgtgggcatcggtatcggcggttcggcaggcaaaaacggcaagggcggcaacggtatcggcatcaatatcaggaaccgatctttcaactga

SEQ ID NO: 346926 - DNA, 759 bp, Pseudomonas aeruginosa
atgttggggggagacctggagctgggcgtaaggatcaatgggacggactactactgcgacaaccagatggaggtcttcgacggacgctgccggaagcgcctggatttcttctacattcccgcatgtggtggaagcgaaaggacctgtgcggagaatgctgtaactaaatctctgaccgttggtttcttcgtctccaagaagagcggcccgaagcccgggagggagggtagcctgaccggagtgagcgggccctacggtgctttccagttcgatggagtcggggggatgaacgttgttcaaggatacaacttccgcatgaacgtaaccggtctggacaagctgcgctatgtcgcctgctcgtcgaccttgagtatttcacccaagaccgtgaactttggcgccgtcgcttccctggcggcggagatgggcaagacaattgtcgaaaggcccttcagcattaccgccaacaagacctgcaacagtgtctacggtctcaatgcccgtctctccgcggtcaatgcttcggtgagcaatacggacaccctcgtgccgaatgacaatccttcggtgggcatccgcctgctggaccagcaagacagccaacgccccctggtgttcgaccgggagttcgtgctggtggcgccgtctcctgatcaagttgtggtcaagaactttcttgcccaattacgctggctgacgagccagcccacgcttgggaagttcaatgccgcagccaccgtcgatgtttattacaagtaa

SEQ ID NO: 346927 - DNA, 738 bp, Pseudomonas aeruginosa
atgggcttcttttcaaggatgtatgtattggccgcttttctgagttggggttgggtagcgcccctgtcagctttcgcggacatctcattcgatggaaagaatcgttttgtcatgtcggggcagcgactgagcgttactctggtaaacgaagaggggcaggccgccctggccagaatagccctcgaatggggggatggcgcttccgaacgggaattgccgatggtggtgtcgaagcccctgctccggatctccccgaacgccagaactactgtggaaatcctctatcagggacaaggtctgcccctggaccgggagtcctactttctgctcagcgtgttggacgtgcccacgaagctgcaagtagaaaacgtcatgcaggtcgctctccagcaccatttcaagctgttctaccgaccagcgctcaagagtacccacgagcaggcgatgagcgcgctgtcctgggaactcgactccgcaggcgagcgtctgcaggcggtgaatgccgctccctactacctcacgctgagcgacatccaggcatatggagagcgtggacaggactgcgggaaaccgctggaccatgtgatgctcccgccatactccgccacccccgttcggcttccggactgcagcgttatttctaagttgaattatgcggtcgttagcgatgccggaaaccagcggcccttccgcaccacgctgcgcagcggagcgcgaagcggtgctgtaccaaactaa

SEQ ID NO: 346928 - DNA, 837 bp, Pseudomonas aeruginosa
ttgggcaatggcgggccatcgtcgccgcaagcggccaacatcaggattacgatagtcagcgccgggagcagcgccgacggcaatgacttcaacctgaatccggggggcagctatcggctctcggagtcctggcgggtcggggtattggctggcgctggccggcagaaactcgaggctggcgacaacgactcgacctacaagctcaatacctacctgggcactgtcttcgcccagtaccagcaagatcgttggtgggctgatgcggcggccacaggcggacgtctggattacgagagtctcgaacgtagattcagtctgggcatcggcgaacgccgggaaaagggtgacaccagcggcgacgtcctggccttcactacccgccttggctatggcattgcgcagtatgccggcagcccatggcatctatcgccgttcttgagtgccgacttcgcgcgagtcaaggtgaatgattacgccgaggatggcagcgactccaccgcgctggcttttcgagaccagaagcgcatctctcgccgattgggcgccggcctgcagggcaaataccggattacatggcaaactcaagtgttcggcgagattgcccatgggaaggaatacaaggacgatacgcagcgactgggcatggccctggacagcgtgccggataaccctttcacactggagggctatgccccgcagagcaatctgaatcgcctgaaccttggcatcaatcacaagctcgctcaggagctggtcctgcgcgccaattacaacattcgcaaagacgataggtgcacccagcagggcatcgatatcggaatcagtgtcgatctctag

SEQ ID NO: 346929 - DNA, 825 bp, Pseudomonas aeruginosa
atgaaatcgtatacatgcatgagccgggccgaactcgatgccgcctacaacaataccgccgccgtgccggactttcccggcgtcctcgcggatttccaggcgcgcagttcgagactgtacgcttcccggcccgttcgccgggatcttccctatggcgaaagtccgcgtcagcgcttcgactggtttccctgtggcgagcccgatgcgccgtgcctggtattcattcatggcggctattggcagaactgcagcaaagaggacttcgcgttcattgccgaaggaccgctgaacgacggcttcaacgtcgtgctggcggagtacaccctggcaccgcaggcttcgatgacccagatcgtggcggaaatcggatgcctcctcgagcatctcgccgccgatcccgagcaactgggcgtcgccagccgtccgctgatcctcagtggccactcggcgggtgggcatctgaccctgatgtaccgcgaccacccgctggtgacagcggccctggccatcagttcgctggtggacctagagccgatcagcctgtcatggctgaatgacaagctgcgtctttcaccgcaggagatcgaggctttcagccccctgcgccgccttggcaagggtgttccgacggtgctggcggtgggcgccgacgagctgccggagctagtccgccacaccgatgagtatgccgcggcgagtgtcgcggaaggcgagccggcgacgctgctgcatgtgcctggctgcacgcacttttccgtgctggacgacctggcgagggctgaggggcgcctgctccaggcgttgtccgcgattatcccgcgctga

SEQ ID NO: 346930 - DNA, 1050 bp, Pseudomonas aeruginosa
atgcctgtcaaacccatccctcttctactggcctgtctttcaaccttcgctcctggagcggcattttccggagcttgcacgccgaccaacggcacccacctgtacatcttcgacttccagcggactttcaccgatccggccgccaacgcacccggcacgcacctggacaacgcctacgagtggaatctcggcggcaactacccggcaatctgcagctgtagtggcagctaccaaggcgtgtactacaccagcaagctcaccctcgccccaggcgtcaccaagccggtgaacagccaacccatgcagttctacaagctcaatcggaatatccaggtggcggccgagctgttcatcggcggaggaaagcagtccttcttcccactgccgctgaccagcttccacaacggcgatacacgcgcaagaaactgcggtagctcgatcaactacgtcagcggctcgcgaggccgcctgcacctgatgatcgaccatcccttcgtcggcgtcagcaccatccccaggatccggctgattgatctctacggcaccacgaactccaacgaagccctgggcgtggcgccgatggcctcggtattcatgtccggcagcgtgaccgtgccgcagaactgccagctcgcccccggccagaacaccaccatcgacttcggccggctcgccacgggagaactggcgctgcccggcgaaacgccacaacgcagggtccagcgcagcttccagatccagtgcacgaacatctcggagtcggtcgggatcaccatcagcctggagtcgccagcccatccgcagttccccgacctgatcgccgccaacggtcgcagcgacctgggcatccgggtgcgcaatgccgaccgcaatatccatcccgtggctcccggaacacagcccggacaggccagcctcatcccgctgacccttgactacgtcagccagcgcgcgcaattcgacctggaagccttcccggtcaggaccacgatgtcgcctacccctggaaccttcaagggctacgccaccctgaaattcgatttcgactga

SEQ ID NO: 346931 - DNA, 1044 bp, Pseudomonas aeruginosa
atggcagctctgcatgcatttctcaccgaaccgttcctcggtacggctacctggttctggctggccttcctggccatcgtcatcgttctcctggtcctcgacctcggcgtgctgcaacgcgaccaccacgaaatcggcgtgcgcgaaagcctgctgctgtccgccggctacttcgcctgcggcctggccttcggcggctgggtctggtacgccttcggccccaccagcgcggtggagtactacaccggcttcctggtcgagcaatcgctatcgatggacaacgtcttcgtcatggcgatgatcttcagtttcttcggcatcccccgccgctaccagcaccaggtgctgttctggggcatcctcggcgccatcgtcctacgggcgatcatgatcggcctgggcgccgcgctggtgaaggaattcgactggatcatgtacgtgttcggcgccttcctgctgttcagcggcgtgaagatgctgttcaacaagcacgaggaagaacccgacctggagcacaacccggtgctgcgcttcctgcgcaagcacatgcgggtgaccaaggaactgcacgagcatcacttcttcgtccgcctgccggacgccagcggcaagctggtgcgctacgccaccccgctgttcttcgccctggtgctgatcgagctggccgacctggtgttcgcggtggacagcgtgccggcgatcttcgccatcacccaggacccgttcatcgtctacacctcgaacatcttcgccatcctcggcctgcgcgccctgtacttctcgctggcggcgatgatccaccgcttcgtctacctgaagtacgccctggccctggtgctggtgttcatcggtgcgaagatcatgctccacggtgtgatcggcaagattcccgccggcctctcgcttggcgtaaccttcggcctgctggcgggcggtatcctgctctccctgctgaagacccgcacgccgaaagccaccgtcgaggacaaggccgaaccgaatgccgaacacgctctggatcgaacgtctggacacccacgctga

SEQ ID NO: 346932 - DNA, 891 bp, Pseudomonas aeruginosa
atgacggcgagttcgggcggaggagaccatgcgagcgacggcgaacgccggatcactgcccaggtcctcgccagcttcgccgccgcgcccgatccccggctgcgccggctgctggaaaaactggtggagcacctgcacgccttcgcccgcgaggtggagctgagcgaggaagaatggttcgccgcaatagccttcctcaccgagaccgggcagacctgcgacggcctggtgcgccaggaattcatcctgctgtccgacgtgctcggcctgtcgatgctggtcgatgcgctcgaccatcgccgcagtggcggggcgaccgagagcaccgtgttcgggccgttctacatcgccggcatgccgcagcgcggatacggcgagaacatggccttcacggcgggcgttccggcactggtgatggggcgggtgctggacgcgcaaggccggcctgtggtcgatgcctgcctggaggtttggcagagcgcgcggaatggctgctattccggacaggacgcgacacagccgcacggcaacctgcgtggccgttatcgcacggacggagaggggcgctacgcgatccgcagcatcgttccgaccagctatccgatccccagcgacggcccggtggggcgcctgctgcaggccagcgggcgccatccgtggcgaccggcgcacctgcatttcatgatcgaggcggcgggccaccgacgtctggtgacgcacctgttcaaacacgacgatccgtacctggcgtcggacgcggtgttcggcgtgaaggactcgctgcgggtggagtaccaggggtgcccggcggagcatccgttggcgcaggcgttcggtatcgacacggcgttttgcctggtgcgctacgacttcgtcctggagcgcgcatga

SEQ ID NO: 346933 - DNA, 312 bp, Pseudomonas aeruginosa
atgagtcgttatttcgcggtcttcgccaccgaccggccgcagctcgagagcctgcgccggctgattcgcccggcccaccgcacgcacctgcgcgatccggcgccgcaccgggtggtggtacgcctgggcgggccgacgctggacccgggcgacgggcggatgaacggcaccctgctggtggtcgaggcggcctcgttggacgaggtggaggcctttctcgccgacgacccctacgttcgcgccggcctgttcgagcgtatcgagatccgtccctggagctggagcctgggggcgccggaggcgctgtcgtga

SEQ ID NO: 346934 - DNA, 345 bp, Pseudomonas aeruginosa
gtgaaggtcgcgacggtgccgctctgcgctctcgaggagatccctgacggtggcgcccgaggcctgcaatgcagccgcgacggcgagcagctgtcgctggtcgccgtgcgccggggcgagcaggtctgggtctaccgcaaccgttgcccgcatttctccgtaccgctggacttccgccccggcgaattctgcacctatcggcgtcaggtgctgatgtgcgcccatcacagcgcgttgttccgcttcgaggatggcctgtgcatcgacgggccctgcgcgggcgcggcgctggagagcctgcgttgccggatcgaggacgggcggctggtgctgctgggcgactga

SEQ ID NO: 346935 - DNA, 2271 bp, Pseudomonas aeruginosa
atgcgcatgcccttcgtacccgtccgacgagacgtccgcccatcccttccccgccgtcgcgccagctactactgcacgggcctgctctggagcgtggcgctgccgtggcttccggcgctcgcggcgagcgccgccgacggcctggtcgacgaagacgcctgccaggcctgccatccccggcagagcgaacagtggcgcggatcgcaccaccagttggcgatgcagccggccagccccgagagcatcctcggcgacttctccggcgtgcgtttcaggcatgccggggaaaccacccgtttctaccgcaagggcgacgcgttctgggtgaacactgccggtgccgacggcaggaatgccgacttccaggtgcgctacgccttcggcgtggagccgctgcagcaatacctgctggacaccggcgatgggcaactgcaggccctcggtgtggcctgggatagccggcgcaagacctggttccacctgtatccggacgatgcggtggacgcccgccacccactgcactggagcaagccgcagcagaacgccaacttcatgtgcatggagtgccacaataccggcttcacgcgccgctacgacgccagcgccgagcgcttcgacagccgctggcacgccaccggcgtcggctgccagagttgccatggcccggccgccggccatctggcctggacccgccagcccgagcgggcgcaggcgcatgccggcttcgccgggagcctggcggccacggagaaccgcttccaggtggaaagctgcgcgcgctgccattcgcggcgctcgccgctgggcgacggcttcgacgcaaccgcgcggctgctcgacgattacctgcccagccccctgagcccggtgctctacgaactggacgggaagatcaaggatgaagtcttcgagtacggctccttcgtccagagccggatgtacgccaagggcgtggcctgcagcgattgccacgacccgcatggcgcacgcctgaaagccgacggcaacggtgtctgcctgcaatgccacaaccccgccggccgcgccgttcgtcgcgacatcgacgccagcggcctggccgccgccgactacacctcgcccgcgcacctccgccaccgcgccgacggcccggccggacaatgcgtcgcctgccacatgccgggcaagtactacatggtcaacgacctgcgccacgaccactccttcagcgtgccgaacccggcccaggccctggcgctgggcatctcggacgcctgtctcggctgccatgcgcagatgcccggggaaaccctggtggccagcttccgcgactggtatccgcgcgccgtcccgcgcgacggcggctacgcgcaggacctggcgctggtgcgcagcggccgtcccggcgccgctgccgccctgctgcggcaactacggcgcgccgacctgccggcgatccgccgcgccagcctgctcggcgaggttcccggctatcccgggcagagcctgttgcagcaggcgctggccgccctcgacaacgacgagccgcgggtgcgcgaggcggccatcggcgccgtcgccgccctgctctcgccggcgcagcgggtcgagccactcgcaccggcgctgagcgatccgctacgcgcggtgcgcctggcggccgcctacgcgctgctcccggccgtcgccgaactcggcggccacggcccgtcctggcggcgtgcaatcgacgaatacgaacagacccagttggtccagcgcgaacgcgccgaggccaacctcaacctggccaacctgtaccaggccgacggccggccggggctggtcgaggcgagcctgcgcgcggccctgcgccgcgacgccgacttcgctccggcgcaggtcgccctcggccagtggctggaaaacgccgggcgcgatcgcgaagccgccgcgctgctgcgggacggcttgcgtcgccagccacgctcgggcctgctgcactacgcccagggcctggcgctgatccgtcgcggcgaacgcgaagacgcccgccaggcgctcgccgaagcgctccgggtggagccggacaacccgcgctatgcctatgtcctcgccgtcgcctggcacgaggccgggcaacccggcaaagccatcgagagcctgcgcgccctgctcgcgcggcgaccggccgagcgcacggcgcgcctggccctggtcggctacctgcggcaggccggcgatagcgccggggccgacgcggcgctggccgagctgcgggcgatcaaccccgacgatccgctgctccgctga

SEQ ID NO: 346936 - DNA, 3021 bp, Pseudomonas aeruginosa
atgaatagaagctacgccctggtctggaaccaggccacaggatgctggaatgtcgccagcgaaggcacccgccgccgcggcaagagcggccgcggcacgctgctggcggtcgccggcgcatcgttgctgaaccttctcggcctgcccgaagccttcgccctgccctccgacggcaagatcgtcaatggccaaggcagcatccataccagcgtcgacggcaagcacatgaccatcgaccagcagagccagaagctgatcgcccactggaacggcttcgacatcgccgccgacgagcgcgtcagcttccagcaacagaacagcaatgccatcgccctcaaccgggtactcggcaacgacggcagcaagatcctgggcaagctcgacgccaacggcaaggtgttcctgatcaaccccaacggggtgatgttcggcaagaccgcccaggtcaacgtcgggggcctggtggccagcaccctggacatttccgacaaggacttcctcgacggcaattaccgcttcagcggcaagtccggcgccggcgtgagcaacgccggaacccttagtgccagcgaaggcggcagcatcgccctgctcggcgcgcgggtcgacaacagcggcgtggtccaggcccgcctgggcagcgtcgccctcggtgccggccaggatgtcagcctgaacttcgacggcgacgggctgctcaacctgcaggtcaacgccggcgcggtcgacgccctggcgcacaatggcggcctgctcaaggccgacggtggccaggtgctgatgactgcccgcagcgccgacagcctgctcaagaccgtggtcagcaaccagggcgtgatcgaggccaagaccctgcaaaacaaatccggccgcatcgtcctcgatgccggcgatggcggcgccgtcctggtggctggccgacaggacgccagcgccctgggcggccagggcgatggcggcgtggtggagaaccgcggcggcaaggtcgaggtgcaactggcggcccaggtggacacccaggccgaccagggtcggaccggcacctggaagatccgctcgaatgaagtggatgtcgcccagaccgctacgcgcaagaccccgaccctgctggccgataccctgtcgcgcaacctgggcagcacccatatcgaactcaccagcaagcgcggcaacctgaaggtcgacgcgccggtttcctggaacagcgccaacaagctgagcctgagcgccgagcagggcgacgtcgagctgaacggaaccatcaaagccaccggcaacggcgcgggcctggccttgaacgcccgcaacgagattcgccagaaggccgatatcacactctccggacagaacacggcactgagcctgaactacggcaagcgccacagccttcaggacgacgcgcgagtgaccctgtccggcaaaggcgcctccttccgcgccaacgaccaggactacaaggtcgtccagagcctccagcaactgcgagagatcgaccggaatctcggcgaacgttacgtactgggcaacgccatcgacggcggcaacaccagcttcctgtccctgggcaatggcagggccttcaccggcatcttcgacggcctgggcaacgagatcagcaacctggcggtctatggtaccagcgcgttcatcggcctgttcagtaacaaccacggcacgctgcgcaacctgtacctcgaccgggtcgaggtcagcggatcccgctccaccggctacaacaacgatatcggtacgctcgccggcgccaacctcggcaccatccataacgtcaaggtcagcaacgcccgcgtcaccggctccgcacagaacaacacgctgggtgggctggtcggcctgaacctcggccgcatcgatcaggcctccgccagcggccaactgatcggcaatgggcgcacctacgccatcggcggcctggtgggcgagaacatttcgaccgccaacggtatcgccagcatcgacaacagccaggcggacgtgatcatctccgggcggatgtcgagcgactcgaccgcctatggcgcgggcggcctggtaggcaacaaccgggaggcacggatttccaacagccacgcatcaggcagcctgaacctggccggtaacaacctgaacctgggtgggctgctagggcgcaactacctgggcgaactgaccaacgcaagctcctcggcctcggtttccggctctggccgtggtggcttccgcggtggcctggtcggcttcaacgagaagggcacgctaacaaacgtttccgcccgcggaaatgtcaacggcgccggcgcagtggcggccggcggcctggtcggccgcaatgagggcggcaccttgaccaacgcgtccgcggaaggcgacgtcagcggcaacggtaccgactcgctcggcggcctggtcggcaataacgtcaaaggcaccctgagcaatgtcagcgccagcggcaacgtggccgacaaatcgggccgccacctgggtggactgatcggcagcagcgaacagagcaccatcaccaacgccaaggcccggggagacgtcaatggcatggccaacgacgcccgggtcggtggcctgatcggttcgagcaaggacaccctcatcaccaacgcccaggcttcgggcaaggtccgcggcggcatcggcgctttcgccggaggcttggtgggccagctggaaggttcgagcaaagtggcgaattcgtcggccagcggcgacgtagagggcggcgcctcgagccatgtcggcggactggtcggcacgaactacggaagcatcgagaactcgtcggcctccggcagcgtcactagcaatcagggccagagcctgggcgggctggtcgggatcaacatgggttccgtcaggaactcctcggccagcggcaaggtagttgctcagaaccccctctttatccatggcggactgattggcctcaacctcggcggacagcaatctcagaacacgctgctcgaagaggcgaagaacgtgccgatgatcggacgcgacttcagcttctaa

SEQ ID NO: 346937 - DNA, 1746 bp, Pseudomonas aeruginosa
atgccgccctgtctcgatgactttccgttgaaccatcaccctctgccatccagcgactccctgaacaatgcccgaccaagacgcagtgccggtatcgccggcgtggcgctgctgctctcctccctgggcatcgccgcggcccccatctcgataccggacgccggccaggccgtacgcgatgcgcagagccagcgcctcgacctgcccgcgcccatggagctggatccggaaaaacccgcgccgcaagacgcaggtgctaccgacgcctctgccgaggggccacgagtacgggtcgacaagttccaggtaggcggcaaccgggtgttcgattccgcgcggctgctcgccctgctggccgatctcgaggggcatgagctgagcctgccgcaactgcatgccgccgccggccgaatcggtgatttctaccagcagcatggctacgtactggcgcgtgcctacctgcccgcacaggaaatcgagaacggcacggtacggctcgaagtcgtcgaggggcgctatgggcaggtcgaactgcacaatggctcgcgtaccctcgatccggtggtgcgccagcccctggccaatctggaaagcggcacccccgtaaagggcgacgaactcgagcgcagcctgctgctgctcagcgacattccgggcgtggaagccaagggcacgttgctgccgggacaagttcccggcaccaccgacctgcgcatcgatgcccggaccgccccgctcttcagcggccgcctggaggcggacaacttcggcgaccgcgccatgggcgaataccgcctgggcggcgtcttcgacctcaacggtccgctgggcctgggcgaccagctgaacctgcgcctgctcggcagcgatcgccatcaacgctactaccgcgccgcctaccagctgccgctgggtccctggggatcacgcatcggcatggcgcactcggaaacctcctaccggctggtgcgcgacttcaaggaatgggaagcccacgggcgagccatcatcgacagcctgttcctcacccatccgctgctacgcagccgcgccttcaacctgtccacgcaattgcagtacgaagaaaagcgactgaacgacgacatcgacctgttcgagttcaagaagagcaagcagatccatctctggaccgccggtttcagcggcagcagccaggaccgcctgctcggtggcgggcagaccggtttctcgctggcctacgggcatggccggctgaacctggacagcggcgagcgcagcagggacaggaagagcgccggcacacaggggcgcttcgacaaactctccatcaacgcggtacgcctgcagcggctgaccgaccgcctgcagttgttcactcagctcaatgcccagtggagctccggcaacctcgacagcgcggagaagttcgacatcggcggtgcctatggcgtccgtgcgtttccgtcaggcacccagggcggcaccggcgacgagggttggcaggcgagcgcggagttgcgctacagcctggctcccggctggcaactgagcagcttcgtcgaccagggcgcggtgaagttccagaagaagccctggactccggaagtcaatcgcaaccgcatgggcggggccggcaccggcgccacatggtacggcgcggaccatcaggtcagcctgaccgccgcctggccgctgggccaggagaagggcatcgcgcccgaccgcaatccgcgcctgtggctgcaggcgacccgttatttctga

SEQ ID NO: 346938 - DNA, 1059 bp, Pseudomonas aeruginosa
atgtccgaatcgacctccgcgcttcccgtggcgcgccacttccagcgcgaagcgcagcagcgcggctatgtgctggatgacgcccagcgcagcgccattgcccacctggatgagctgctgcaacgcctgcgtcgcgtcccctcgctgttccgccgggccgcgcgcggtctctacctgtgggggccggtaggacgcggcaagagctggctgatggatggcttcttccgtagcgccgacctggagcgcaagcgccggatccatttccacgcgttcttccgccaattgcacgacggcatgtttcgtcgccaggggcaggccgatgcgttgggcggcgcgctcgatgaactactcggcgattgccgtctgctctgcttcgacgaattccatgtgcacgacatcggtgatgcgatgctcatcagccgcttgttccgcgaattgttccggcgcggcatcaccctggtctgcacgtccaactacgcgccccggcaactgttgcccaatccgctgtaccacgagcgtttcctgccagcgatccgcctgatcgaaacgcgcatgcaggtgcaggaggtggccggtgcgctggattaccggaggcgtccggcgagcgccgaagctgcctccggttacccgggcggcgcctattgtcactccgccgcggcggaaggcctgcaagggctgggtttggcggtgcccgagcctgcggagcgggcgatgctgcgctgcggagcgagagccttgctggcgcgcgcggtgcgcgacgacctggtgtggttcgccttcgccgatctctgcgaggcgccgaccgcggtaatggactacctggtcctcggcgagcgcttttccacctgggtgctggatggcgtgccgccgatggcacgctgttcggtcgccgcccagcagcgcttcgtcaacctcgtcgacgttctccacgacaacgaccggcgcctgttcctgcgcgccgagacggccctggcggagctcgtcgaaggcagcgcgctgccggcggacatggcgcgtaccgccagccgcctggcacaactgcggcagtttcgtcgctga

SEQ ID NO: 346939 - DNA, 885 bp, Pseudomonas aeruginosa
atgtcatttaatcattactaccagagcgaactcaccgcgctgcgcccggtgggtttcgccgaggacgaggcgctgattccctatccactgaacaccttccgcagctatcggtacctgctggagtactttgctttccaggacaagttcctgttcgtcgacggcctggacctgctcggcggcttgcccgaggaagtcctcaagcagatacgtggtctggagttgcgtttcgacatccgcaagagcggcatccagcgcctgcatccaacgctggagaacgtcaagctgtactgcacgccggtggccaacctgttccgccacgatgccttcaaccgcagcctcgtcgatgcggtaagaaaccatccgaagatcggcaaggtcctgatcatcgatctgaaggacaagggcgatcccatatatgccggcataagggaccaggagatcgtcgactcagccgcgatgcttggccagcagatgctcagggcgaaggacatttctactactccggctcggatgccgaaggacagaagcggcaccgggaactcgcgcgacgcctgtacggcgaggggattcgttgagatgcatgtcttcgcgaccctgtcggcccttgtcatgttgtggttgtccgtgacggacccgcgttcgacctggatcatccaggccccattcagcggctggagtttcgacctgcactatgtgctcttcgtcttctgcctggccacgttcattccgctcctgctcatcgttgccctcagcctgctccaggccacgcggctgatggtcggcggaaaaagccgcagtgtcggcctggggtcgctggggttggcctgcttctacggtctggcgctgtaccgtttcaatggctggttcgtccatgaggtcttctga

SEQ ID NO: 346940 - DNA, 273 bp, Pseudomonas aeruginosa
atgacgaacttcttctccaacgccctgatgttgatgatggatcgtgtcaacttcattccggaagagtcctcaatcttttccttctcgccatacgagatcaatcagggatcgtcgtcctattggatctacggggaagatggcggaaattattattatttttcccatgaactggtggcgtcttatctcttcatatcgaaatccaacaactgcccgacgttcgatcggctcaatttcaaaacctggtgcagcgcaaagaggggaggcgagaaatga

SEQ ID NO: 346941 - DNA, 825 bp, Pseudomonas aeruginosa
atggccgagcccgaaaagatccaccaggacggacaggagtacgttcctgccggcgcaggaatgagtaccgcgacctccgatacccaaccggtggagctgaaggtctgtcgttgtagcgggaaggaagttacgacattgcccggatacgagagtattccaggctacagcggggagttgccttcgcccttgcaggtcatgtggtatgtgccgaagacgaaggagttgctcaaggccagtttctccgacacggagattcgtctctggataaagcaggcggctgcctaccatggtattccgcatattatactggccgttatcctgcaacaggaaaatggccccaatggcagcaagtttcttcagaccttgcagtttggcgaacgcaccctgacgactttcctggccatcgtcgatggcatcgctttcgatgcggtgccggacaaactggccggtggttccagcggtttcgccaatatgagccgggcgacgttgcagaaggccgcgcaatatagcgagaactactactgcaagaggccaatgcccgaagatgtccaataccgggtctttggctggaaccaggatacgcgtattcctggcgatgactggaaggccgacctctattacgcagcggcccatctgcgggaactcatcgaccgtgtcaccggcgtacgctgtcacagcggcgctttgacgaccgcgcaactgaagaaggtggtcgcttcctacaacggttccggccccctcgccgagaagtacgcgaacgatgcaatgaagttactcgatgccgccaaggcagggagcgcgtggctgtatttctatgaaaagtaa

SEQ ID NO: 346942 - DNA, 888 bp, Pseudomonas aeruginosa
atgaacctgaccgcgggcgacctgaacgtcaccctgatccgcgatttccgccacgacgggcgccgccgcgcccagttcaacacgctgaccgagcgtacctatggcttcgacttcgaacagtggtaccgggacggcttctggtccgatgactaccagccctacgcgctgctccacgacgaccaactggtggccaacgtctcggtcaatctgatgaatttcgaggtggacggcgtcgccaggcgctacgtgcaactcggcacggtgatgaccgcgccggagtaccgcaaccgcggcctcggccgcctgctgctcgaacgggtgctggcggactggcgcgaacgctgcgacatgctctatttgttcgccaacgacacggtgctcgacttctacccgcgcttcggcttccgccgggtgcgcgagcatgagccgagcgctccgatcacggcgacgtcgggcagcttcgtcgcggtggatatgggcgatgcggcgcgccgccggcatttcctcgacgccctcgaacgggccgtgcccgtctcgcccctggcgctgcgccacgcttcggggcaactgatgttcagttgcacctcgttcctgcgcgacaatgtcttccactcggcgcgccacgacgcctacgcggtcgccgagcacgacagcgcggacctgctcctgctggatgtcttcgccccgcgtccgctcgatccgcgcaccctggccgccgaactggcccggccggaaactcgtcgcctgcggctcggcttcacgcccttcgacacgagcggcttcagcatgcgccccatcggcgacgacgacgcgctgttcgtcctcggccaggccgagccctggttcgaccggcgcgagctgctgttcccactgttgtcccatgcctga

SEQ ID NO: 346943 - DNA, 831 bp, Pseudomonas aeruginosa
atgtccgcctccccccaccccgaatggatcaccgtcggcgccctggccgacggcttcgccccggacagccatgtccttcccgcgtgcaacgcgcttgccggacgcagcctgaccctgcacttcgccaacggctggatcatcgagcaccgcttcgagcgccagcgccagcgcctgcactggcgcctggccggcggcagcgccagcggcgagtcggcctaccgcgccagctcgctgcgggagaacttctatctggtggacttcctcaagcaggaagacggccggacggtgtcggtcagcctggtgctggatctcgagcacctggcattcaccgcggtgctcggtaccctgcccgaccgcgccacctgcgaacagggcctgttcgcccgggccctgggcggacaggagctgaccggcgtcgaggccggcttcctgcacggcagcctcgaccgtccctggcaggccggcgcctgtccgcacgctcccagcgaagaactgctcggcctgcgcaaccagtatgtctatagcgccaacgaggcctacgagcacatctacctcaatccgcgcttctacacctggcaatgcctgcgcggcaccgaacagggcctggccgacaccgaccgctgccaccactaccggctggccgagcgcctgtacctgttcgtctggcgcgagaagatcgtgccgaccctcggcgtgctgctcatcgacctcgaggccgggcgcaccgacggcaagatcttcggctaccagggcgacgacttcgccaccccggtgaatttcccggtcggcgccctcgcccgggtgctcaaccagacccgccacgaaccctga

SEQ ID NO: 346944 - DNA, 570 bp, Pseudomonas aeruginosa
atgaacatgttcaagcgtagcgttctcgctcccctcgccgtttccggcgcgctcatggccgtggcttcgccctccgcgttcgcggctgacggcgtgatcaacttcatgggcagcatctccgacacgacctgtgacatcaacggtcaggcgccgggcgaaggcaacgtcacccaggtcgatctggggaccgtctctcctgctcacttcactgctgtcaacatcgcttccgacttcaagcccttcgacctggtcctgtccggcaccggatgcacgaatggcaagatggcctccatcgccttcgatggcgcgaccaatgtggacaagaacaccggcaacctgaaactgaccggcaactctcaggctggcggcgtgcagatccagatcttcaacaacggtaacggttccagcaccaagatcccgctgggcggctcggaggctacgccgcagcaggccgagatcaagaacaataccacgactctgaaatacaaggcgtcctacatctccaccgccgacaccgtcactgcgggtagcggtgtgtcccacatccgctacgtgctggcgtaccagtaa

SEQ ID NO: 346945 - DNA, 747 bp, Pseudomonas aeruginosa
atggcttcgctgatacacaaaggtttcttcttctgggttgcggcgagtgccatggtctccgccctgggcgtctccccggccgaggccgggctggtcgcccagggcacccgtctcgtcttccccggcgatgagcgtgaagtcaccctgcgaatcaacaatacctccagcgttccggtgctggcccagacctgggtcgacgatggacgcgaggatgtgccgcccgagcagttgaacatgccattcagtgtctcccccgcggttgccagagtggagcccaagggggggctggtcctgcgcgtaggttacctcggcaccgcattgccgaaggaccgtgagtcggtgttctggctgaacatcctggatgtgcctcccaggggcgagggcgacgagaacgccttgcagttttcctttcgctcgcgcctcaagctgttcttccgtcccagccagttgagaagcgtcgaatcggcgcctgcaaaactccgctggaagttgctcggaagtgcgggaggaaagccggtcgttcgagtcgacaatccaacgccttacttcgtttctttcgcttctgtcgagttgcttgtcgaaggacatgccgcctcaatcggaaatggcatggtttccccgttctcccagaaggacttcggcggaaagaagaatataccgctcaatggcaggaaggtttccgtccgctatgaggtgatcaacgattacggtggccgttccacgctagagcgagcgctcggcgaataa

SEQ ID NO: 346946 - DNA, 774 bp, Pseudomonas aeruginosa
gtgattcgtcgatacctgcgtcgctgcggcatggtcccgggcgtgttgctggcgctgctggcgctgctggcgctgctggcgaatgccgatgcagcgctgtccgtggtgggcacccgcttcgtttatccggcaggctccgagggcctgacgattcgcctcggcaatggcggcatgcgaccgatcctggtccagtcctggctggaccgcggcgatgattccgccgacccgagcagcatccaggtgcctttcgtcctgtcgccgcccctgttgcgcatcgagccccatgaaacgcaggcgttgcaactgcgccagagcggcgaggcgctgccggatgaccgggagtcgctgttctggctgaacctgctcgaggtgccctcgaagaacaagggcgacaccaacctgttgctgctcagctaccgcctgcgcatgaagctcctgttccgcccgcgagggctgcagggcgatccgcaggaggccgtcggacaggtgctctggcgcttgcgcccagccacgacggcaggcgcccggaccttgctcgaggccgacaaccgcagcccctatcacgtgtccctggcgcgcctggaactgggcgagggcgacggcgcgctgtccctcggcagcgtcaccctggcgcccttcagccgtacgccgctcagcctgccaggccctgctcctgccggagcgacgcgggtgcattacgacgtggtgggggacagtggccagttcaagtccggagtcgcctcggcgctcccgcaggcctcgctacacccgtag

SEQ ID NO: 346947 - DNA, 3030 bp, Pseudomonas aeruginosa
atgaacaaatgctatgcactggtctggaacgcatcccagggttgctggaacgtcgccagcgaaggcacccgccgtcgcggcaagtccgccggcgcgcgggcggtagtcgcctcgacgctggcgctgctgggtgcggtcgccatgaccccggcccatgcgctgccgaccgggggcaaggtggtcgaagggtcgggagatatccagcaggtgggcgacaagagcatgtcgatcaaccagcataccgacaagctgatcaccaactgggactccttcagcgtcggtctcggcgagcgggtcaccttcaaccagccaggcagcacgtcgatctccttgaaccgtgtgctcggaaccaggggcagcgagatcctgggcaacatcgatgcgaatggcaaggtattcctggtcaatcccaacggcgtgctcttcgggcgcaccgcccaggtcaacgtcggtggcctggtggcgtcgacccaggacatcaaggatgccgacttcaaggccggcaagttccagttttccggcacgtcgaccagcgaggtgtccaacctgggccgactgaccgcggcagagggcggcagcatcgcgctgctgggggcgcaggtcagcaaccaggggacgatccaggcgcagatgggcagtgtcgccctcggtggaggcggtgacttcaccctgaacttcgatggcaacaagctgctcgacatccaggtcaacggcgctgtcgccgaggcgctggtgaggaatggcggattgctcaaggccgacggcggccaggtgatcatgaccgccagggccaccagctcgctgctcggttcggtggtcaacaaccagggcgccatcgaggccagaaccctgcgcggcagtgccggcaggatcgtcctcgacggcggggacggcaaggtcacggtcggcggggcgctggccgccaatgcgcagaacgcgccgggacatggcggcagcgtggaggtcaggggcaaagaagtcgaagtgaacctggcgacccaggtgaacaccctggccagcaacggtatcaacggcacctggaagatcagcgccgacaaggtcgacgtccaccggacggccctggccagcggcggtaccatccatgtcgacaccctgtcgcgcaacctggcgaccaccaatatcgagctgaactctacccagggcgacctcgacctcaacggcccggtcacctgggcggcgggcaacaggctgacgctgaactcggcggccaacctcaacctgaacggcaagcttgccgccagtggcgccaaggctggcctgagcctgagggcccgggacgcgatcgagatcaacgacaatatcgttctgagcggcggcgccagcagcctgagcctggatgccggcaagggccaccgggtcaacggcgccgcctcggtcacgctgtccggagccaacaccacctatacctccggcggctactactacacggtcatccagaccctggcgcagctgcaggccatcaataccaacctggacggcctgtacgtcctcggcaacaagatcctgggcagcgcgtactgcacggcgctgcagtccatcggcggtcccgccggggtcttcaccggcaccctggacggcctggggaacaccatcggcaacctgtcgatcaccaacaccggttccaacgtcggcctgttcgcccgctcctccggtacgctgaccaacctgaagctggacaacctgagggtctccgacaacaactacggtgccggaccctcttcgctgggcgccctggtcggcgtcaactccgggcgtatcgccaacgtcaccgccacccgcgtcaacgttctcggcagcagcctgcgctccaacgccgtcggcggcctggtcggccgcaacaatggcggacggatcagcggtgcctcggtcagcggcaccgtgagtggctatgcgcccaccacggccatcggcggcctggttggcgagaacgcttccaatggcctggaagcgatcatcgaagacagcaccaccaacaccctggtgaccgccaagtccaccgagcgcaacagcctggggggcgtcggcggtctggtcggcctgaactcgcgcggcaggatcgtcaacgcctctgcccagggacgagtcgagacctccagggccgggctcaacgtagggggactggtcggcttcaacctgatgggcgacatctcccgcagcagcgccagcggccaggtcgtggccggcggcgccggttatagcggcggcctggtcggcctgaacagcaacggcacgatcgcgcaatcccaggccagcggtgcggtttccagcagcggcgggctggcgaccggcggcctggtgggcaggagcgagggcgacagcgtcctgaccaacgtcaaggcgagcggcaatgtcacggacaactatggcggggacatcggtggcctggttggcaccaacacggcggcgagggtggataccgccgaggcgaccggcaaggtcaccggtggggccaacagccgggtcggtggcctggtcggcagcaacctgaatgcctcccttagccatgtgatctcccgtggcgacgtgttcggcgggagcaacagccaggtgggtggcatcgtcggcagcaacagcggcgatatctccagcgcggataccagcggcgtcgtctccggtggcgccaacagctcggtcggcggcctggccggagtcaacttcggcaccctcatggcgtccagcagcaagagtgaggtcaagggtggggcgcgcagccgcatcggcggcctggtgggcgagaaccagatccagggcctgatcagttcctcctcgtcggagagttcggtcagcggcgattactacgtttcgatgggcggcatcgccggggtcaacctgggcaccatcgagtattccggcgtcagcggcaagatcaacttccgtccgcaatccagctacggccagatctacggctcgctggtcggcgagaaccgcggaaccctggccggcaactatgtgaccggcgaggcggcggtcctgccgccggcgggcgtcgactacggcaacatctggtaa

SEQ ID NO: 346948 - DNA, 1137 bp, Pseudomonas aeruginosa
atgcgtgcgaggctctttgccgccgacgttccgatccgcgctccgcttgtccggccggtcctgctctgctgcctgatcggtggcctttcgctcccgcaggcctgggcgcaggacgagatcgcccggaactgtaccttcagcaatggccagggcggatcctggcgtaccgtgaacgacctgaccagcagcacaccccgcggaacggtgctggcggtgagaccggtcaacctctttctcaactaccagacctccagcgccgcggagccgcacgaattgatcctgggaggaaactggagcggcgtcggttaccccggcctctacggcacggtgcagaccaacgtgtccggtatcggctaccgggtctcgatggatgcgcaggacggggcaatgcgtccggtccccgtcgacagcgttccccatgccctcgacaggcgagtcaccagcaaggccggcaacacgatcaacgattatctgcaggagctggttctcacggtcgatccgaaggacttgcccagtggcgagctgcaggtcaccagcgtgtccggcagcgctacgctgaacctgtgggcggtggatatgctcaagggagaaaccgccctgggagggcgtttcgacgtgccgaccggcaacacgccggtcggaatctgccggacgcctcaccgcctggtcgggccggcagccatcaatatcggcggcgggccgccgccggtgatcccgaacaagtgccgggtcgatgtcgggcagacgatccaggtcaagctggggaacgtggccctcaaggatttcccgcggctcaacgatacctctacgccgcgcgccttcagcattaccctgagcgactgcgcggcggcggcgaaaccgctggtcgccttcaaggacaagtacgcctcggcgatccagcctgatccgacgattctcagcctgaagagcggcggcgcggcgggcttcggtatcgtcgtggacaatggcctgaccggccagcgggttcgcttcgatggcactccctacccgatgcgccgtatcggcgacagcgccgatattcccctgagcgccgcctatatccggaccggtgcccaggccgaactcagggccggggcggccgacggcgccgccgagttcagcttcaccttcccctga

SEQ ID NO: 346949 - DNA, 288 bp, Pseudomonas aeruginosa
atgccccagccttatcgcgatagcggcggggagatcgccggggtggtctgcggctggtgcgatatttccgagcaggtgcgcctgatcgaggcactcgaagccgcacgtggccaggccgatgaggccaaccgttcgaaaaccgcgttcctcgccaccatgagccacgaaatacgcacgccgctgaacgcggtgatgggcaccctcgaactggcactgaagcgcgccgccaggggcgagctggatcaggccgggctgaagaccacctacatctcgctcaggggaaggtga

SEQ ID NO: 346950 - DNA, 333 bp, Pseudomonas aeruginosa
atgctctggaaattctataaagatgcaggggttaacgataagctttttgcaaatacattcaatcgccgttacgacgggggcgtcaagcaattcgagctagacaagtcaggcaagtctcagccccagcaccaaagcaaagagatcaaagttactgaggcctggtgcaacccccaagctgacgacgattgctatatcaacaagaacaaagtggccaagaaaaagctaggtgactacctgccccaggtgactccggagcaggtcagcgctgccgggggctattgtgagtaccctatttgctacgacgaaaacgatactccaatcggcatgaggtaa

SEQ ID NO: 346951 - DNA, 4017 bp, Pseudomonas aeruginosa
atgaattctaatttctatctgccacgcaaattatccaacaacaatgacttattcagcgaagacgcactcttaacaacctcaaaatttgtcgtaatactagctgagccgggcgctggcaaaacggtactcatggagagtatcgcgcagaaattagacacggtcgttctgacggccaatcgtttcaagcactcccccttaataaaagaaaattccccattagtaattgatgcattcgatgaactcgccaaggttgatccttcaggaatctacgcgctactaagcaaagcggaatcgtcgaagccaacacacgtctatctgtccagtagatcaagcgagtggggaaacgctaacaacattgcttttaaagagttttttggctgcgagccattcattgtaaggctctgtgagttcacggaatcagagcagaaactaatttttgaaaatcactcacctgaagaaagctttttgaacttcagttccgaagtttctagatttgatttacaagacctacttccgaaccctcagtttttaaagcttttcgcagatgcttacattgaaagcaatcgacacttcccagataagaagtctattttttctttagcagtggagcgcctagcaaaagaggtaaattctggcgcgactagaacaacagatacatttagcaccagtaaaaaaatagacctagcttcagaagtgttcgcaaaactacttctagcgggctccgagggtgtatgcataagcgaatctaccgaagagcgaatgtatccggcattagacaccttatttattcaccaggagtcaaacagcagcatattagcaacccgactatttaaacctggcgattgcgtggatcatcaccggcctgtacacaaaatcgtcgcagagtattgcgccgccgattactttaccaagcgaataatagatccaagcgactccttaaatttggcaaagtgccttcctattatcgcaccgaactcagctgtgagggatgaacttcgcggccttcttggctggatggccgccttgggtgataagccaactcaagaaaaaataattgaactagatccgtactcagtactggcgaacggtgacccttcacagctattgaactcatcaaaaaaactgctcattaataagcttgtcgaaatcgaggcaaccgacccatatttccgacgaaatgacttctggcggagatttagcgttgcaggattctttacgcgagaaacaattgaggacgtaagattattactaaagacaaaaagcgacggccatttacgaaatcttatacttgagcttctggcaggctcctccgcagctaacctcttaacaaaagagcttcgctacttgctgctgacacccgaggaaagccaaaacactcgaatattagcaattaaatgtctgcttgaaatttccgactatgactatcttgaggacttgcgagttctaatattcgaagccactaacatctcgcttaacctttcagccaaaataattgaaaagctgcttccttcatcaatcactccctcttatattgcttctttcctgagagtttgtgctcacctttatcccgatactgagtatcgtgagcgaaccataggctctcgatacttcataaaagatcttatctcgaaacttagcctagaaaccactgaaattgtcctagacacgttaaccgaatccttggcatgcacttgcagaaaaaaatcttttgaatgcagatgccgcaacggccttagtaaaattataggctctcttctagaccggtattttgagcttgctgattcgccatttgactccatcaggatttggaagtgggtcaaaaacttaaagttcaacaaccagcatggcgcaaacgaaagcatagcagtcaatgttctccaaaaagacctgaaactgcgatatgaaataattacgcatgtattttcaagcattaccaacagagaagaaatatttcaaacccagcttcatcatttcaacctatactcacattctggtcttttgttaacagccaaagatcatagatttataattgacctagcttttttgatagataatccccagctatggatcagttttatagcgcaccaccatctttatagaaccggcagcgatcgtgggcctgacgacttgcgtagccacatgcgcgaccaagcaaacatcaaacctgcattcatgcgtgagtgggctaaatcaaaccgtgcagcaattcaccatgcccgtgagcataacacctctcgttttttgcaaagcagaagatttaaacgccgcaagaatagagaaaaaaatatccatgcccagaacattgaatacatcaaaagaaaccgcgaactaatagagaacgggcgccattggagtctactagttcgcttcgcagaacttgccctgatgcaacctgaaaaaataagggaagagttcgaagacgacgctttagtgcgaaaatcattacgaaactgctttggcttcatatcatccactgtacctagtctcgaggagctttcagagcttcatggcgcatcaaagtatgatcaatctgaagtcatactctacgctgcatgcttagaaactcttagagaccaaggccatctcgaaaatgttgagcacggtttgttgcagtctcttcgcgcgggcatagacatgcattacagctcagtcgccagcgaagagcgagacgcgttaaaaacagaagtagacagactccttttcatcgatgctgagagcgcagaaaacttcctgagaaaatacgttgaacctcagctttcttcccggtcctctcgtgcgaaagtctggctactaaaacatgaggaggcattcagcaacctccgtcatgagctttcttttgaatggctaaaaaaatactgcgatatagctttagagccactcgaagctctatttgacatcgttatcgaaaaagccgatcctgacaagttaaatgacttaattttacaacgatgttcaggcctaatgcctgagaattttatcaccgtggatagccaggaaaccatacataagcgtgctttctggcttttacgcgcttggtatttccttgaaaaccctccagaagaatactggaactggcttcagtctgacagaaatattgttcatgtgtttagtagccgatctggaaatatgagtcgccatgacaatactcattggccaaaactaaactctataaaaattgaaaaaatcttaggagcatttatcgaacaatggccaaaagttgatttgcccacccaatgggggactgacagccctgccggggaaaaggcatatcgcttcctgaacgagatttcatggtcaataagctcagattctccagctagagcaattcctgttttaaatcgactcctctcagacgaaaggttccacgatgcacacgcagacttgaagagcatacatgcagcacaagttcgtaaaaaatctctggaagcattcgatccgccctcaacacgagatatagttaacacacttgatcgtgactccatagttaccgtagaaagtctgcggcaactcatcatccaagaactacaggaatatcagaaatacatttttggaggcgaatataactcggtagatcgattctatagcagtggagcaagacttggagaagagtcatgcaccgagataattgctgaaaggcttagcctaattcttaggcatcaaaatatcatcataactcctgaacaccatctcaaatcagaaaaacgaagtgatttcaccgtcgcaaaaataatcaatgggaaacgacgactacttgtgaccgaagtaaaaggacaatggcacagagagctctatagcgcagcttcaacacagcttttcgagcgctacgccattcatccagaggcggaggaacagggtatatacctcatactttggttcggcgagacggaatcagtcgccgaacgtaagaatcatggtattacatccgctcaggctctaaaaaatagcgttgaggaaatgctgccacaagatcttaagggactaattgacatatttgtactagatttatcaaaaaaatag

SEQ ID NO: 346952 - DNA, 1041 bp, Pseudomonas aeruginosa
atggatgaggacctaatagaggagatggttgaggggcaatgggccttgatgaccactacggagggggatgacctgttaatcaagtccgatgagtcaagtttgatttatgatgtgtgctccgtgacgcaggtagttatggggctgttatccaaagcagagatgcttaaagtaggtagaagcggaaagcgcagcttgactccgtttgggcggaagactctggaatgtcttcgtattgactttaatcgtcttgtggcagcattcccgggaggcgctttcaatccctatgtatacgcattcgtagaggccaccggtaggctgatgagtgatgaggcgttttggggtgtgtctgcctatcccgatcgtttggtaatgggcgacgcagttaaggctttcaggatattagctgaggaggttttgggggttgatgctgggggggcactgaaaactactttgagaaatgctgagcgtaatgcgagaaagaatttgactggtcttaatgcttacgtagacgctttgctggaacggtattcgaggttggtggtcgtaagagtcgatttaagatatgcaatcggagcgtttgaggctaatgcagattcgattgctattgtgaaaagtgattttaattatttcttgagcttcgtaaaagggaagcgatttggtaaggatgtttgcggctatgtgtggaagttggagtatggagcagtccagggctggcattaccacgttgtgttgtttttgaatggtgcgaagcatagagaggatatttccatcggaaaggagcttggagacaaatggatggatatcactcggcagaaaggatgttattttaattgtaatgcaaggaaagaaaaatataagaggcctgctctaggagtggttagctggcgtgacttcgagaaagtaaataatctcaaaagagcggcaggttatcttgcaaaggcagacatgctgatacgcccgaatctggctggcggcgaaagggcgttaggaaagggccgtatgcctaaagggcattctgggaaaggtcggcctaggcagtga

SEQ ID NO: 346953 - DNA, 711 bp, Pseudomonas aeruginosa
atgaaagaaaataaaaaactccccaacgacataatgtcattaatgtcaaatccacctcaaagcttagatgatgtcttcaacgacttcgatgggctggccgaggaacgctttatggagatctattcattacgcccatacgcagaattactagaaaaacattctaaaaaaatccttaacgagaaacatacgacaaaaaccattaacaaagcatttgaaaaactacaagaagatatactcaaccataacagcaacctagattactacggaaaaatgtgtctaactttccgaaccatggctgatcagctagacagggagagcaatcagcctgcagctatctggggacttataatgtctgcctacttcctaggtgcgaccagcatagcatccgacataattacaaacaaacatatagatacattagagaaaaacgaagcagcagcgaaggcaaaaaattcagtctatacagaatcgcgaagctacttcatcaaatgcataaatgaaaaaagcccagaaaatggctggaagacaacaagtcatcttgcctcagagctatccgaccatatcgtaaactacgaaaggactacccttaaacttaaaaccccggaagatatcactactagactcatgcggtgggcacgcgaatatccagacgtagcgcttgctgtctcgcagcatgtacaaagaaaaagaaagggtacgcctaaaaactaa

SEQ ID NO: 346954 - DNA, 1206 bp, Pseudomonas aeruginosa
atgggaaagctaaatccgaagcaggtcgagaatctggttgaggccggtacgtatgaggacggcgaaggcctgcgactggtcgtgaaaagcactgggcgaaaatcttgggttctcagattccaacttgctggccgacgtagagaaatggggttaggggcttaccccacggtcagcctgaaagaagcgcgcttggacgccgctgccaaacgacgccaactggtggacggcatcgatccccttcatgcccgtgacatggagcgggctgctttgctcgagcatcagaaggccagcgaagcgaagaggatcaagtttgaaacgcttgccaagagctactgcgaagcacatgggagtagctggtccgacaagtggcgaaagggctggctcagaaagctagaactctatgcattcgagcacataggctccctttcagctgatcaagtcggaactgaggaagttctggccgtcctgaaaccgatctggtcggttaagccccggacagcggacgaggtacggggccaaatagagcaggtattggatgctgcaaaggcccgtgggcttcgccagggtgaaaacccggcacgctggcgcggtcacctagacagcttgctgagccgaatcgagaaaagaaaagcacggaaacgagagcacttcacggcaatgcgctggcaagacatacctccattgatgtcaacgcttcagggcattgaaacgtcaacttcaatcgcagcacagctcctcatcctcacaggcgcccgatcgcacatggtgcgattcgcaagctgggatgagtttgacctacaggctgggctctggtcactaccgggcgaacggatgaaaatgcgcaagcctttcgttattccaatacccgaacaagtgatcacgcttgtcaaagcagtgcctaaaattgaaagcagtcgcttcctttttcctggccatggaaaatctggagtgatgcatgctaatgctattcgaaatctgctgcatggcatcggagaaaaagaaataacgcgccatggtttccgatcaacatttcgagactgggcaaatgaatgcacgaatcatcctagagaagtatgcgaaatagcattagctcacgacgagcgagaccaaaccgaaggtgcatattctcgatcagacttccttgacaaacgcagagcattgatgaatgagtgggctacattttctctgagcaatatcacgaagtaa

SEQ ID NO: 346955 - DNA, 735 bp, Pseudomonas aeruginosa
atgaccgccatcggcaccattttcagacgcgagctgggcagctacttcgcaacgccgctcgcctatgtgttcaccctggtattcctcgtcctctccggcgtggccaccttctacctgggcgatttcctcgagcgcggccaggccgacctggcgccgttcttttccagcctgccctggctctacctcctgctgatccccgcgctggccatgcgcctgtgggccgaggagcgcaagtccggctccatcgagatgctgatgaccctgcccgtctcccgcgccaccctggtcaccggcaagttcctcgcagcctggttctgcgccgggctggcgttgctgctgaccttcccgatgccactgacggtgaactacctcggctcgcccgacaacggcgcgatcatcgccggctacctggccggctggctgctgtccggcggctacctggccatcggatcctgcatgtcggcgctggcgaagaaccagatcatcgcctttgccctgaccgttctcgtctgcctgctgttcgtcggcgccggcactccccacgtgcagcaggcgctctccggctggcttccgcaatggctgctggacggcattgcctcgctgagcgtgctggtccgtttcgaggcgctcggccggggcgtgctcgacgtccgcgacctggcctacttctgcagcctgatcgtcgcctggctggtcgccaccaccatcgtcatcgacctgaaaaaagcggcgtag

SEQ ID NO: 346956 - DNA, 156 bp, Pseudomonas aeruginosa
gtgacgctgagcggcgtactggccgcctttaccatctccgcgcccctcgtcctgtcgaaggcgttctgcctgaacgaggcgaccaccatcgccccgcgcggggtctgggtgggcctggcactgctcgcggccatggtgctgcctctcaagacctga

SEQ ID NO: 346957 - DNA, 1374 bp, Pseudomonas aeruginosa
atgcaacgattgaagctctggctggagcgccaacgccaggcccagttcacggacacctggagcgagcgtcagcgccgcgaggccttggccctggtcgaacgccggctgtgggaaaacgacgccgactggatcgaactcagccgcgcacacaacggcttcgttcgcgaagccgcggtcctcgcgctcggcgccaaccccgcggcgggggcgctgctggcgctgatcgagcgggtcaacgattgggtcggcccggtcaggaccgccgccatggcgggcctggcggactacctggttcccgagcaggtacccgccctcctcggtgccttgccgcaactggtcgccctgggcaggaaaagccgggccgaccatgccgccctgctggagcaggtgcgtgcgctgctggccgccccggaacaacgcgaaggggtcctcgaagccctactgcacgaacgtgccgccgctgcgcgctttctcctggagagcctgctgcgcctggaacagagcgcgcggctcggggtcctcgaacgggcgctgcgcagccaggacccgagcgtccgccgcctcgccctgctggcgacagcggagctgccgcaggccagcgcgaccggattgctggagcgcgggctcgtcgacagcagcgccagccttcgggcccaggcgttgcacctgtacgagcgggcgctgggcgccggctcgctgccgcaaccgatcatggccagggcgctgctcgacgcttcgccgagcgtgcgcggcctggcgcagtacctggcgaaaaacgccggaacggacgtcgaccgggtcctcgccgaacggcttgcttcgacaccggcaaccaagcgcgagtggctgggcctgctcggcctggcccgcgagcggcaggcccgggcggtcctgccgctgacccggcaagccttgcgccacccgtcacagcaggtgcgcggcgcagcgctggaaagcctttccgcgctgcacgccgaaaacctcggcgaagcctgcctgccagccctgcacgatccctccgccaaggtcttcgccagcgccttgcggtggctgcgcaacgttgcgccacaggaacgcccgcagggcctggacgatgagctgcggagcctgctcgacgccggccggctcgagcgggccgacctcctgctggcgctcaaaccgtactggcagcagctcgactacctgttgcgggcccgccccggcctggcggcggacgattggcagcgactgttgttcgcctggcgcgagcggcgcggcagcgccatcgactacgccacatcggcggcgcgccgcgaagaactgctggcgcatctccaggccttgcaggaacagcggctgctctcccggcagatcgtcatcgacgcgctgcgctga

SEQ ID NO: 346958 - DNA, 1839 bp, Pseudomonas aeruginosa
gtggacatcgagcgactacaagttgaaggcggatttttggatggtttggatcttaggttttccagcggcctcaatgtgatcatcggggcgaggggcactggaaagacttcggtcatcgaattaataagatatgcacttgccgctcgcagccatactgcggaagccaaaaatcgttcgcttgaccacgcgagggcagtgctggatggcggtgaggtgaccgtcgcattaaacgatctgatcgatgacgtcatcgtttcgcgcactgctgacgaagatcagccacgctcaaccgctcgcttcgttgcgccgatagtactatctcaaactgaagtcgaaacattaggactcagcgacgcgggacgtctgtcactcatcgatggctttattaacggtcgcactagcatggcagctaatgaagctgcggtaattagctcaataaaaagtatttataaagaaatcttggcggtcgaaacggagatctcttcactatcagaagaggtcgttaaagtgccgagcctaataactcaattgcaggattttgagcgacagcttcgggaccttcaaggggactcgatcgaggtggcaaaaaagcaggcggaatcttcacttcttaccgaagaacttgcagccgcatctgctcgtgaagacatagtcgctcgtttcgaaaaccatgcttccgaatggaaagggacgctagataggctgctttctgaggattatggcccggatgcatggagcggtgatccagataaagatccggttggcgatcttcgcggagtatatgatcttgccatttcaaagatagttgaagcctcgaaagcctttgaacagattaaggacgtgtctaagctgcggcgagaagaaatatcttctaaaaattttgagatagagcgtaaagctcgtattttgcggctggagcttgataaggtttctgaaggcactggggcattgagtcgtagtatctcgctaattaaagcgcaaattgctcaaattaatacccgagaaagcctattgggagagcgtcagaacaggttggtagctcttcgcaagcgtcgcgatgaagctgcaactgagttggaggatgctcgtcttaagcgctatacacttcgatccgaagtggcaaatagcatcaaccaagctcttgcgccctatataaaagtagaagttgagcagtcttctcagttgggagaatactccaaggcgctcaccgatgcgctcaaggggagtggtattaaatacaatgatttggcctcaaggatctcagaagaaattagccctcgagagcttgttaaagtcgttgataatggtgactttgaaggtctttcagaaatggtgagtataccgaaggagcgagcagcccgggtagtagcgcagttgagggacttcggcctggcagacatattgacctgcgacgttcaggatgatgtcagcatgtcccttctcgacggcgttgactataaggaagtttccagtctctcagctggtcagcggtgtacggttattctatccattgtattgcagcactctgaaagagtgctgataatcgatcaaccagaagatcatttagataacgctttcgtggccaacacaataataaagactctgaatagtcgaaaggggggcgggcaaatcattttgtccacacacaatgccaatattcctgttttaggcgaggcggatttaatcattgagttgacctctgatggtcgaaacggctttgtccaagtcaataagcccttgacccatccagaggcagttaacgcaattactactgtaatggaggggggggctgaggcattctcaacccgggcgaaattttatcaagacaattcattgtga

SEQ ID NO: 346959 - DNA, 918 bp, Pseudomonas aeruginosa
atgacccgagaggaggcaatcgcttccctttctagcgactcagttgaccaacggcttgaggcagctcgatatttttcgaacgccgcagaagttactgacgcttctctgctctcgcgggcgattgcgaaagaaagtgcgcgatgggtaaagcgcgcacttgagcgagctatcgatcggattcaggtaggtccaccaaagcaaggtgtagcgcctattgatgtgcccgtcattgaaaacgattctgaaaggatagttaaagatctccgagcacaggctgtagatgaggtttcccgaacgattctgcatgaattcgccccactcattggatctctgcggctcgtggcagaagttgagattgattcatatgaaacatctaggacaaaacactgcgtagaacgtctaaatggcttgctggaagcagtggggaatctaaaaaaagcggcatctacgccttcatacagcgagtttgatttgtcagagctggttgctgagtgtgtagcagttttgaatatttcgagcgaggaaatagttttacgaatcgcgggtataaaaccatacatggttcaggccgatcgtgactcactgggattagctattgataatggaattagaaatgccgtagaggcggttagagagttttcaaaacttgacccagcagagattctaataaactgggggcctgctggctccgagaactggcttgcaattcttgattgcggagcgggattctcaggaaatcctgatgaagctttcaaacttggcgtctcaaataagggggaacactttggttacgggttaaccattgctcagctgtcgatgcgctctatggaaggcgatgttttcgtctcaaacaaagccgagggtggggcaaggtttgaattgaggtggtatagggattatgcagatactattcgttga

SEQ ID NO: 346960 - DNA, 1422 bp, Pseudomonas aeruginosa
atgcagatactattcgttgaggataactcctcttacgcagatacactgatttcagtggtgaatgtgaagctccccggagtgtcatgggatgtggttgataattctggttcggctgaggagctactagcgcgtaatttttatgatctagtgattcttgatctttgcatgccgagtattccgtcggggcttgaaaaaaacgttgagaatggtcaaaggctattttacaaaattcagaagctaatgccgggaacgccaatctatatacttacaggctccgacctggacagtttcgccacagggctttctaggcatggagagagagttaggctttggggggctaaacaagagtttccaaccgtattgtactttagaaaaaataaaacacttgaacttgttgatgagttgtcgggtgtttatggtgagattttgtctgtaaattctatctccataaatacaagaggcaaggctatagcatttgccaaaggacaagaacgggctctaaaaacctttgtgcgaagtatgggtgggcatgatggagtttactaccctttaagcggattgtcaggatctttggtaggacgaatcgaggttcgagatgctcgacttaatattattggggcgtttgtagcgaagcttggaatcacctcaaagatcaagaaagaaaatgagtcctacgcacgtcacgttaggcttctccctatcaataccttcacccccttactatctgaagtggataaaggcttaaaagaatatagtgcaatcttttatacactggctgaaggatatacagagaccctattcgaagttgtgcgcagagatgctggagctgcagttggcgtgatccagaaggtccgagccagtttggagcgttggaactctgcccgagatgttttaagagtttcggttggtgatgtgcgaaaggctaagcttagcgatgaaaattttgaagaaattatcaagcgatacggtattgaagagctgcgagatatagaatccatccatgtaagtgcttcggtttcttgcatacacggagatttacatggcggaaacatccttgtaaacaaaacaggagcacctgttttaattgactttggtgacgtcgaatctggctatacaggcttagatccaataacgctggaaatgagccttatttttcatcctgactgcgtactgtctggaatttcgaaagagattagaactttccttgagcattggccgatcattgatgggtactgccaaaataatccttttggcgatgtcgttaaatattgtcgggactgggcttacgacataagtggagacgatcgatctgtattggctgctggttacgcattcgcaataaggcagctcaaatatgataccgtgaaccccgatgatactatcgcgcttataatgcgcatagctaacgctctaaagggttaa

SEQ ID NO: 346961 - DNA, 1020 bp, Pseudomonas aeruginosa
atgacgaaggacggggaacaccccctcactgagctgatctccatcgcagccaaggctggaattggattgctccccggaggaggtttgctgacagctggctatgaagggttgcagctgcttagtaaccaagcggctgcgcagatggagcgccggtctgaaaaacgttaccaggaattcatccaaagcgtctttgctggggaggttactcccgaggtcacagagcacctgacagcggatgattacaccgctttgctgtcaggttgcatggcagatatggaaaacgagaaggccaagtactatgggcgcctggctgcggccattggtcgtggcgaggtgcaagggaagagcagacgtttcctgatcattacgctcagtcaggtttctgatgagcaactgcagatgctccgcagatcctatatcgcgacccgctttgacctgaaaccgagccaaggtaacggtcatgttgatcctgttgagatactgcatctgcgtcacccggtacaaaagcatgaatacgatgagctggtttcaaggttgatgtatgttgataaaaagctgactgaactagctgaggaattggttcgggcatgttttacaactgaagagctcaaaccatccgccatcggctatgctgcctggttcccaaaggtcgtggatattatcttcgacacgaaccaattcactttggttgaatcgttaatagacggtttctggttggaagcaattcgcacgtcgaaccgttcggttgccctaattgaccgtcctgcactggcgaattttgcttctccgcgtgtcatggtggtgggatcggaggctgcacctgaatatttgatggcgctcaaggcacgcctaaaaaataatgatgtgttgtttgtatgtctgcatgaccatgtgttgcacatacaagcccattatccagatagcaccattattaatgccgaagggtggagtattcctcaaatcactgaagcagtggtgaatcatgtgaaagcgaccaatggcctgttagaagtcgcgtag

SEQ ID NO: 346962 - DNA, 294 bp, Pseudomonas aeruginosa
atggaaggattttggactgttgtcgtcaaggcttgtggcatcgctggcgtagcggcttttctcggcttcatcgtctacccccaaatcatcacctcaccgtacctgaagaatctcacgcacacggagctttttgccctatttggcttgatcgcgatcgtggttttcggcgtgtgcctggcactgatcagcgccagcaaaaaacatgccccaggcagcaactccgttaacattaaaggctctactgttcatggcaacgtccagtccggtaacaacacttcccgcgaacaaaaatga

SEQ ID NO: 346963 - DNA, 573 bp, Pseudomonas aeruginosa
atgaataaagcgaatgtgtggggctcccagattcacgggggcctcagggtgggtgacgacaccaattacatcatccaacttccaacgcctgatccgacagccatcacacgcgccttggccagattccaagagctcagcgaaaatgacgaagactttcagtggttcgttgaacgactggattttttcaccaaccagaaaacccaaactcccgtaatcggcctagagcagaagctcagaaatggtggcagagaggatcttattgaggtagcgattgagcgaaaggatttctttgccaagcgcctcatgaagtcgcagctcaaccgtcgtcgccaaggcgtgttcctctatatccttcaaaaaatcagcttcggcttcgaggagcacgttcgcccgctgattaagcaaggagcgccgaatgaagtcatcgacggtgtgatcctgaatgggatcgtggatgccatttaccgcgaggtcatggccgaggacatcactgtggatcagtacattatttccgggatgctgtacttcctaacaggcaagtgccatttgatctgggaggggccgacatgctga

SEQ ID NO: 346964 - DNA, 507 bp, Pseudomonas aeruginosa
atgctgatgtaccacccggcctttgatgccaaccactgcctctacagaatcgtgtccattctttatgccaccactgatcagcagatcagttggccgctgctgcgcttgctcgacttttactatttgttccctagtcagctaaaaaatatcaagccttggcccagtgagattcggaatctgaaggcccaggtgatgaaaattccagagcaattcgaagatctgactaaccctacacgtacattcttcgagctagagtcgttccagaaaacggcagccctagagctgatcgctaaaggggtcatctccaaatcatcattcgacaaaggcatcatggaactagagccagactccctgccctcggcttacacagcgcttctggacactgacaacttcttgaagagcgacgcattcgaagtcatcaccaaaggcttaccgaaaacgaaattcaacggatcgaacggtcttaaattccgctccggtctgatggagtacatctatgacctctaa

SEQ ID NO: 346965 - DNA, 1917 bp, Pseudomonas aeruginosa
atgacctctaagccctcgacttttttcatcaatcgtttcgtcatcaccaagggcagcaaagcggtgtaccacgggattttccatcaaggcgtcaatatcattaggggcgccaatagcgtgggtaaatccaccatcctggatttcctgttctatgccctaggcggggacgtcgccgaagaccggtggaacgaggaagctcaaacctgcgatggtgtgtttgctgagatcgaattgaacagtcacgttttgacggtccatcgccgggttcagcctggcaagaagccccccatgagcttctatagtgggagttttgagcagctcaatgccgctcagtcgggggctgtttggcaaacctacgggatcaaccgcagcgacgaaaaactcagtttttcccaacagattttcgagctactgggatggccgcacagccagactgacgatttcgcaaacttgaccatccaccaaatcctacgtttgattttcgttgatcagggtacgccggttaacaaaattttgcgggccgaacactccacgttcgacaaacccagcatgcgccaagcgatcggggatttcttgctcggcctggacgacctcggcatttacgcgctcaagcagcagctttcaaaagccgagtctgagttcgcaaaaattgaaggccagttggactccatctacaagttcatttctccttccgaagctgtgctacgcgaggcgtcactcaacagtgcggttgaagattcgtacaaagagctccggacgttgcttgggctacgagatgcattactcgctcaacctgacgagtcgacctctgacgcggcccttaaagccaaagcagaacaggcaagccagcagatcactgagctcaccaaggaaatcgacattcgcacgaccaagcaagccgagatggtcaacgagatcgtcgagtccgagctgttcatcagtgcaatcgagtcaagaatcaaagccttgcaagagtcgcgcacggcctacgatttcttcggtgaagtccgctttaaattctgcccaagctgcctcacagctctttctgagtcaggcaaggaacagtgccacctgtgcaagaccggactagataaaaactccagagaagcgtcctatcttgcagcactgaatgagctggcgttccagaaaaaagagagcactaaagtactcgtggagctgcgcaccaagctgagcgaacatgctcactacctcagttcaaagcagcgcgaccttcagaccgtgaaatcaaaccatgtcgccgctcttcgcatgagctccgaccgcgtgttcaagcttaatgaaatttcaaccaaaatcggcaccgtcgaagagcgaatcaaaaactatgacgcgaaagccaagctagtaacagctgtagaagggctcattcagaaaaagcagaagcttaatgccaccatgctagagctgggtgagcagattactgccagcaaagcgcaaactagttcgcgccgggaaaccatcgaagagaatctgtctgaaaagaccattgagcttctcaagaaggacgggggcttcgagcccgcttttaaccaagcgcaaaccgtcatgtttgatttcgggaaggacttcatgctcgtcgatggccgctcaaaattttccgcgagttccgagactatattgaaaaacagtttccatttggcaattctgctggagtcactggaggatgaaagcatgcgttacccaaggctattcctactcgacaacactgaagacaaagggatgggcccagatcgcagccagaacttccagagggtgttggtggaggcactcgctgagtatagtacgaagcctcaccaagtaatcatgacaacttccatgatcgatcccgagcttgataagtcagacctttgcgtcgggccgcactatgagaagggcatgcatacgctggacctttga

SEQ ID NO: 346966 - DNA, 660 bp, Pseudomonas aeruginosa
atgaaagtagtaagatacataattttcttcggcatattaagcatctctgccgcatactacttcactccgaccgagaaaattaatagcatacagcctccaaattgggcggacatagtgtctgctgcaattgcgtttgtaggcttggtattagcatttacgacctatgtgaactggcactcaggaaaaataaaggaagatgcctataactctgtcaagcgatatgcttcactgctggcggaaattgaagatataataatgcaagtccatttcgacatatgcggtataacaccattagactcaaagcttttgcccgacaaagaagctgcaatgaaagttataagtgggctgggcgaagctattggtacgacctcttcgacaatgaaaaagcttcataccgctaggtcagagcttcccttttggggggcatcattgaagccagatgctgaagccatacatacgaacctcatgcgtaagatgcatgattatatggctcttcattttgaacttttaggtatgctgcacgcttattacggggatgagctacctgatgggccagttctcgccaaacacaaagatctccacatctgcgcaaatgagatgttcttaatatttacggaaagaaagaaggcgcgcattcagaatctattcaagtttgaatag

SEQ ID NO: 346967 - DNA, 1002 bp, Pseudomonas aeruginosa
atgtttcgccgcgttttctttaggtacatactccttggcttcctgctggccaactcctgtttcgctgtgggcagttgcaaggtaacaagaagcgatggcgtcacggtcgactctctcatagtgactctgccgcgctttacgcccgatgagttcgatccgaacattcccctgggaacggtgatcttctcctcttccggcaattcgtcgggaatgggaggaagcatttcctgtaccagtgctatcggtaccgtcatttatgtcgggtcgacggcgccggcccccggcctatataacacctatccaacaacggtcgcaggcgtgggcgtgagaatcaggggcggcatcaatcccgagtcgtggtggccgcaatatcgtgattcgacgtccaccacttacacgctggatgctgcttcaaacttcacggtggaactggtgaaaaccggacggatcacctccgctggagaaattaccggggagctgggcaggacggtcgtcctgaacgaggggctggtggcccggagaatcagggtgaacggctcaatcccgatcaggccgagggtccccacctgttccctgctcagcaaaagcgtgccggtcaactttgagcaagtcaaaatttccagcctgatggacggggctcttgctggtgttaagaaattcgacctcaaactcaggtgttccggtggggaggagggctctaccacgaggatgttcgtgacttttaccgatgcttccaaccctgggaacaccagcggcgtgctctcgctttcagcggcctccaaggcatcgggagttggcatacagataaggagagcggacggccaggtcgtcaggtatggccccgactccagccaggcgggcaatgtcaatcaatggcaaatcggggagttcggcaatgtcgatgtcgtcgtccctctccaggcgggttatatcaagaccgcctcccaggttacgccaggcagtgccaatggctcggccacttttacattgagctatcaatga

SEQ ID NO: 346968 - DNA, 498 bp, Pseudomonas aeruginosa
atgaaatgcaagactctattgatcgcctgtctgctcggcctgggaagcgtacaggccctggccgtttccaagctgccgccgcggattccggtgcacgccggctccgagcgcgtgacactcgatctgcgccccttgctggcggaaaccaacgacgtcgagatcacccgtatttcggtgtgtcgccggatcggcagccgttgccacgaaacgctgtggcggatcgagctccctccggggtggtatgccggggaaatcgaagtactcggcgactaccccggctcaagcgtgctcctgcgcaggccggagcgcttgcggcccggggggagctataacgcgttcgttcatttcaacgagcgcagccggcggcaccggcaaacggtttccagcatcgccgtcgaattctgcctggccggtgagtcgggcaactggacgctgctcgacgagaccgcctgcctggcaagacgcaacgccgaagatcggcaaggagcgcaaccatga

SEQ ID NO: 346969 - DNA, 1212 bp, Pseudomonas aeruginosa
atgtcagcatcaccggagcgcactttctccgcagtcgccagaaagaacttcaagcgccttctgacctattgggcacagatagggaccctcctcagtctcgccggagccggtctcggctttttcagcctgtatgcctatgccgaggcaataggtcggcccgacctattcatggactccattgacgccaagtcggcgctggtcgtctggttgttactggtggttctactattggctgcttacctgttcgtgctaagcgccacgacctggctgttcggaatgacggtgtcactgttcaacaagcctcccggaaagcagcgggaggccgtgctctggctactgtttccggtactcgtgggtttcggaacattcgttttcatcctctatttccatgccgatggaatcggcggcagggtcgcggttctgctcgtcgccttggccgtactgctgagctgcctgctcatgtatgccttgtgggatttcagaaagttaattagggatgtcctgagtgtgaacggcgcccaggtgaaagccggcgagaagtggttcttcatgggctttctctggctcctgctgttcatgaccgtatcagcgggtgtttttcctgcgaccctcaccctccagtcctaccttggtgacgatacgccggaggccatacccggtctcgcccgcctttccctgctgactatggtgctgaccctggtcccggtcgtcatcttctaccgtgtacccggcgacctctatcgacggataacctatgccgtgacggccctcatcctgatgtcctgcgcgacaatgctgatctctccgggaagcatgggcaggatcacctactcagccgccgggaaactcaatatccgtgctcacgaaagcacacgctacgtgctgagcgacgatatccgactcgcggatctgcacggccccctctggaaaacccgcctgggacaatcctccagagtcgaagtgaacgcctggcagctattctctttcggcgatgtcctgctgctctgtccggacgacctctccgagcgggaactgcgcgagcttcgccactacaccagctactgcatcaaaacccgcaacagcaaagtgctcaggaaaccgaagactcctgtcttcccgctccgggagaagaaccgctggagctgctcggctccgccatggttcgtggccgatggacactcggtaaaaccgttaaatcacggatctatttaa

SEQ ID NO: 346970 - DNA, 573 bp, Pseudomonas aeruginosa
atgaccccccattcctccccgcaccgtcttcctccgctgcggctggcccgcgccctgccgttcctctacctgcttccctgcctggcgctggctgcgccggtcgacctggagccgacggtggtcagcgccaccactaccgagcgcaagctgcgcgacgccccggccagcgtttcactgatcgccgccgaggacctgcggcggcgcccggtgcgcgacctgcaggaagccctgcgcggttcggaaagcctgcaattcaacggcgtcggcatgtcccggcggggcatcagcgttcgcggcatgtccagcgagcacaccctggtgctggtggacggccagcggatctccacctcgtccgcggccatcgcccattccgacttcgacctcggctgggtgccggtggagagcatcgagcgtatcgaggtggtgcgtgggccgatgtcctcgctctacggttcggaagcccttggcggggtggtgaacgtgatcacccggcgcgccaccgatacctggacgggcagcggcctgctcgatggcggcgtgcgcgaggacggtctcggcggacagagccactag

SEQ ID NO: 346971 - DNA, 126 bp, Pseudomonas aeruginosa
atgccaccgaagaacgtccgcctgatcctcggccatccctccggcgacagcttctgtgccgccatcgcctgggccgagcgcctggcctgcggttgcaagtgttcgaggacagcctggcgggcgtaa

SEQ ID NO: 346972 - DNA, 1236 bp, Pseudomonas aeruginosa
ttgagtaggctatataaggacatttgcagccaacgaacgctttacggcgcctggagaaaggtgcgtagtagcgccatcttctcctcctctgatgaaatcaaacgggaggctgaagatttcgaaagccggctccctgactccttgatcgatattcagcgcgctctatcgaaacaagcatttatattcctccagcaaactggcgtcgcacagaagaagccaggcgggaaattccgccccttggttctagctcctatcccgaatcgtattgtccagcgagccattctcgacgttttgcagcgacgcgtccgctttgttaagcgagttcttggtacttccacaagctatggtggcattcccgaaaaacgtgtagccatggccatctctgacgcgagagaagcaatgcgtgcgggggcacgattccacattcggtcagacatccccgccttcttcaccaaaatcaacaaagaccgggttctagagcttctgcggccgcatctgaactgtgaggctaccctcaagctttttgaggaagccatcaaaacggacttagccaatatcgacgacctcagaaggaaggagctggccgagatttttccaatcggaatcgagggagtggctcaaggatctccattgtcccccctgatagccaacatctacctggccgacttcgatctagaaatgaactcagacggcattacatgcctacgctacatcgatgactttttgctgcttggggcaactcttagtgatgtagacaaagcattcaacagatcgttgaaagtgctgagcaagattgggctggaggcttacgacccacggacagacaaagcaaaggcctcccgcggagccacccagaaggggttcgatttcttgggctgcaatgtctctccgggtttggtacagcctagcgaagcgacacgcaaacgattcagggaaaagttggacgccgagttcgtcgctgcttcacatgccctacgctataacgcccagtaccacgacggcgacgggaagtacgcatactcatccgctcttttccggatcgacaaaatcatcctagggtggggaaaagctttcacgttttgcaatggcacccacagcatgagcgcgctggatgattttatttcaaaaaaacttgctcagcttgaagcagagaagactgctgttctggccaagtccgacagcgcagcgcaaagaagaatcttgggcgtacgcctcctgactgacatccaaggctaa

SEQ ID NO: 346973 - DNA, 924 bp, Pseudomonas aeruginosa
atgtctggcctgttgatcttctctgacgatggctatggggcacttgtagcccttcatgtcaggcagcaatcggtcgttttctgccttcgctcgcaggcagcatttggccgcattgagcctgtcgcaacaggcaggaggcggccagaagcagtcattcgaatcgactataaaagaggggacgattcattgtttatcccgagctgtgataacagagaggatgccattagatctcttgctgaaatctatgcagttcccactgaggaaatcgatagagttcttcgaaatcctgaagtgcaacaaatcgctgagatttattctgagattgatacgaggagcttccatttttttgtatgccacctgctgaaagcctctcctcgcactgatatcacccaagcttattactaccattcgacaagctacgatggctgcacctcatggtttgatgagggcctcctaggttcgtcgcaaggtgtagagcgcttcttagaaaaaatcaccgagtggattcctcctgagaagcaatcacttgcgaagcaggtggctaagggaatcgttaagcgtcgcagcgagtttgagggctacgcacccgagatgtgtggcccctacgcttggaatactttcaccgcggccagctctagctcaaatggaattcgctatcgggttccagaggctattcaggatctgtggtcttccagcttttgtggtggtggaggggtggtcgacttgtcggaaatcatcgaggagaggctgaggcccgttgtagtcaagttcaaaggaggggtctcgaacattgacgactactccgccacgctctgggcctatttattatcagatgatggtgagtgccaccttaaacatacctttacaggtaatgggcttgctatacctcgcgaggacattgctgaactcattgacgtcggttaa

SEQ ID NO: 346974 - DNA, 591 bp, Pseudomonas aeruginosa
atgccctgtgccgccgatatcgtccgtcatcacgacagcgacccgctggaaaatccctgggtcgacggccagccgccgccgcccgagcgcatcgaggtgcatgactacgaccctcgctggccggaactctaccgacagctggcacggcgcatcggagatgcgctcggcgggctcgccctggagatcgcgcatgtcggctccacggcggtaccgggcctggcggccaagccggtgatcgacatcgacctgacggtagccgacccgcgccaggagcagacctatgtgccagccctggagcagctcggctaccgcctgcggatccgcgagccgagctggcaccagcaccgctgcctgcaactggagtcgccacgggtgaacctccacgtgttcggtccggattgtcccgagaccattcgtcaccggctgttccgcgactggctgcgtgaaaatgccgaggaccgcgagtcgtatgccgccgccaagcgcgcttcggccgacggcgagcagcgggtggcggactacaaccggcgcaaggagccgctgatccgcgccatctacgcgcgggctttcgcggccgccgggttgatctga

SEQ ID NO: 346975 - DNA, 2628 bp, Pseudomonas aeruginosa
atggatacgcaacaactgacccaaggcctgcggcaggcttttttcgcggaaaaccaccgcatcgtcttctggtacgaccctgagcagagctttgtgagcgagctagggcagctcgatcttcccgatgttcaggtgctgaacatgcagggcgagtcgaccttcggcatcaagctcaagctggagcttgaggatgccaagggaaagtacctactgtactttcccagtgccgagccgaatgccaatgatgattggctactggatatcaagttgtactcgcgcagcttttatgcagacaaggtctcgctgatcttcaacgatttaggtctgcaacagcagagtttgcgtgagcaccttgcggcccgtgagcgcttcctcagcaacaagaatcgcttggccagcctgaaacgattgatccagccaagcgacactgaacaggcgctggatttggccatgatagccgtggttttgggggccaacgccagtgacatcatgacgcttctctgcaccatggcaggggcaatggtaagtgatgacctaggcctggagcagaatccgccggttatcgatgagctgtacaaattcggcctgatgccggcgttgctacaggcactgcgagatgaggttggctacccggccagtgttgaggaaatcaatggcgaaaagccgttcagcttcggacatttcctcattcgtctgctggcgaccggattctgcgaaagcatcggcgacatcccaagctgggcctctgcgattgccatcccgtctgccaatgctcgggcgacttctcgggcgctgctttcgcgttggcgggatagctcgcgttactacaaggcttacgatgaaatctccagctgggtcgccgaggctctgtatatcgggcagaagatcggtgagattccgttggaaacgctggccaatgcagccaccttcgaggccgtcgagcggcagatcatcgtcgatctgagtaaggccattccggagtcggatccgcgcgacctaggcctgttctcgaagatcatttccgagcgcttggataactactgggcctcgcgtcacaaggacgacgagatccgccgtaagtaccgcctgctctactccgcactgtcagcggcgattgatctgttcagcctgcgtcagcagtatgccgctggattccactttgccagtaccgaagcaatctacacggcctatgaaagcgagctgtatcgctttgacagggcttaccgccactattttgcggcttcccagcgcgctcatgtagagctgctgaagaagctcgatgaagccgtcgagcaatgttacgcctactggtacctcgaccaactgggccgcagttggggtgacaaggtagaggccgagcagcggctggagcactggaagatcgccggagtgcccaaccagcagaacttcttcgatcattgggtgcagccacagtttgggaaaaaccgcagtaagcgcctggtagtgatcatcagcgacgccttccgctacgaggctgcggttgaactgcgtgaccgtatcaatgagaaacgctacagcgaggcaagcctcgccagtcagcttggcgtactacccagctacaccacattgggcatggcctcgctactgccacacaacaccctcgagtatcgggaaggtgccctcgatacggtgttcgcagatgggcaatccaccgccggcacagtgcaacgcgacaagatccttgctcagcacaatggcatggcagtgacagccgaccaggtcaaagcctgggcacgggatgaaggccgagaagtactgaaagatcagcaactggtctacgtctatcacaacgtcatcgatgaccgtagcgacagtggcggcccatccgagtcggacacattccaccatgtggaggtggccattgaggaactgactgagctgactcgcaagatcctcttgcacttcaacaccagcacggtgttgattaccgccgaccatggttttctgttccagcagagcaagctggaggtcgctgaccgcacctcgcttgctgagaagcctgaaaacactatcaagagcaaaaaacgctacgtcatcggacacaccctgcctgcagccaaagatgtatggcagggctccactaggcagacagctggtacaacctcggatacccaattctggattccaaaaggcgcgaaccgcttccacttcgttggcggtgcgcgctttgtacatggcggtgccatgccccaggagattgttgtaccggtgctgacggtcaaccaactgcgcggcgagaaagccgagaaacgtaccaagcgcaaggtgggcgtgatttcaccgaagtcggtgctgaagatggtgaccaatatccagcgcttcgatctgatccagacggagtcggttagcgaacaggtactgccagtcaccgtgtcggtcgccattttcgagggcgagcagccgatatccagtgaggaggtcgtgaccttcgattgctccactgactcgatgagcgaacgcatgaagcaggtgcggctgtctctgatcggcagtgactttgaccgcaagaaggactacttcctggtcatccgtgacaaagacctccacacagagttggagcgctatagggtcaccatcgatttggctttcaccgacgactttttttga

SEQ ID NO: 346976 - DNA, 567 bp, Pseudomonas aeruginosa
atggtgaaggcaggctttattgtggaaggggccagcgaacggatcgtggtcgaatcgccaatgttcagggagctgctgcgtgcctgtggttacgagctggtcacgccagtggtcgatgccaaaggcggtggaaacctgttgccgcagaacatcgaggctttcatcgcccggctggataccgcgggtgcagagcggatctttgtcctgaccgatctggaagacgaggctcaggtagctacggtgcgtgcgcgggtggcgcatcagcgtatccaatttgccttcatcgcggtgaaggcactggaggcttggtatctagccgatagcgtggcgatgaatgcttggttgggtacggacgactttcatgagcccacccctgaagccactccagataagccctgggagcggctcaaacaggtcgcagcagagcgtggcaagcgtggccctggcagcaaggtggcatttgccacaaaggtaaccaagcactggggctttactatcgaaaatgcctctgcgcatcccgcctgcccaagcgcacgagaactgatcgaacacttccgcccgacgtga

SEQ ID NO: 346977 - DNA, 1113 bp, Pseudomonas aeruginosa
atgaatatccgcaaactgcatatcaagggctacaagagcgtggccaatctgacactgcaggacgtatcgccactgctggtgttcgctggggccaacggctccgggaagagcaacatcgccgatgctctggcttttctcggggcggtggtcaagttcggcgcactacaggcccgtacgcagtttggcggtttttcacagatccattgcttcaagtaccgcaaggagcagcgcacgacgatcagcttctcgatggttctggaactggccgggagtctgtacgactacaccatcagcatccattccctggacaaggcaccgcagattgctgagacgctgaaggtcgatggccgcctagtgatcgaccgtcgaggtaacgataccaaagtacaactcaccgaggcggacggcttgcagagtctgccggactacccgaaggatatgaccgcactaatgctgctggggcaaagcccgctgtatgcatttttggccaacatcaaggtgttccgtttcgatccgctggcggccaaggagccatccagctcgactaccgataccagcgagctggatgcccacggcaagaatgtcgcgtccatgctgtcggtgctgcagagagatgcggactttcgtgaacaagtgctggagtggctggagctgatcgtgcccggcatggagaacgtctccaccgagcagcagcgcctggatggttcgacggtaattacctttaaagaaaccagcacgaaaacccgtttcccggccaagctggtgtcggacggcaccatctttgtcctgtgtattctcactgccgtgctcagccgcgcccataagagcggtatcaccatcatcgaagagccggagcgcggtattcaccccaaggcgattggtgagctggtgcaactgatgagggaaagcgcttcggtcgatcatccgattttcctgaccacccacagcgagtcgatcgtcagaagtctggaaacgccggagctgtatttcgtcagcaaagcggacggcaaaacccaggtgcagacagcgaccagtgcctgtgtggacaaggcgcagattccgctggataccgcctggctgagcaatctgtttgatggggggctgccatggtga

SEQ ID NO: 346978 - DNA, 3582 bp, Pseudomonas aeruginosa
atgaacaccaataacatcaaaagctacgcccccaaggcgcgcgcagcttttatctccgccatgaccaagcgcgcggcgttgtttggcattcgcgagtccagtatccccagcatgggcatcgcgccagtggagcaaaagggtgacctggccctgatcggtgagcgggcctttccggccagcatcatccgcccccgcgccgcgctggtgaaaatggtcgagcaactgggctttgcccaggccatggaacaggcagcctacagctggttcaaccgcctatgcgccatccgctatatggaactcaaggactacctcgaccacggtcgtcgcgtgcttagcgccgccgacgggagcgctgccacgccgcagattctcgacgactgtctggacatcgacctgccaggcctcgacaagcagcgcattgccgagttgaagctagacggcactaaagacgaagagctctaccgcgaactgctgctggctcagtgtcacgccctgcatcaggcaatgccgttcctttttgaggcggtggatgacgccaccgaactgctcctgccggacaacctgaccaaaaccgactcattgatccgcgagctggtcagcgccatacccgaagaagactgggccaacatcgagatcatcggctggctctaccagttctacatctccgagaagaaggatcaggtcatcggcaaggtggtcaaatcggaagacataccggccgcaacccagctgtttacgcccaactggatcgtcaagtacatggtgcagaactccctgggcgcgcagtggctggcgacctacccgggctcaccactcaaagcgcagatggagtactacatcgagcccgccgagcagactgacgaggttaacgcccagctcgccgccgttgccccggaaagcctcaatcccgaagagttgaccctgatcgacccggccagcggctccgggcacatcctggtcgaggcctatgacctgttcaaggccatctacctggagcgtggctaccgccagcgcgacgtggcgcagctgatccttgagaagaacctcttcggcctcgacatcgacggccgcgccgcccagctgaccggctttgccctgatgatgaagggcagagcggatgaccgtcggttgttcgagcgtggggtcaaactcaatgttatggcgctggtagacagtgcagaatttgatcctgaggtagtggctaacggcatacagctggcggacttcgggttgcaactgggtgatctcaacgagctgaagcggctgtttgaacatgccacgacctttggctcgctgattcaggtgccgcaggcgttggcaaaaaagttgcccgggctaaagaagctgggtgaggtgaatagccgagatctgtttgtgactgatgaactcaagcgcttaggcccgctggtgcagcaggctgagttgcttgcagctcagtacaacacagttgtcgcaaatccgccttacatgggaagcactggcatgaatgctggtgtaaagaccttcgtcaaggacctgtatgccgatgcgcgcagcgatctctttgcttgcttcattcaaagaggctgtctcctcgcgagcacaaccggtcgtactgctatggtgacaatggacagctggatgttcttatcatcttttacgaagatgagagagtctctgcttaaagagcatcccactgatagcctcgtccacgttggctggaactgctttcctgaggtgcacacctaccaccgaggtgtagcattcgtcctaaggaatgatgccattgatatagcgggtaattatcagaatctaagcgatgtacctgcgaccgtaaataagaacgagctgtttctttcacgcctccaagcaaatgaggcaatatatcgaaagaccgcatccgagttcgaggacattccagggagtccgcttgcttactggataagcgatgctatgcgtgtcgtattccgagattgcaggtcactaggagaagttgccgaagcggcggtgggactacaaacaggtgataacggtcgattcctgaggctctggtttgaagtctcgaatttaaatatcgctcgagggtgtgctaatcgagcggaagcaattgagtctcagaaacgctggtttccatcgaataaaggtggtgaattcagaaagtggtacggcaatcatgagttcgttttggactggcaagatgacggaagggcgctcaggagcttcataccgaagtcagtgattcgcaacccagattactattttcatgaatcagttagttggtcggatgttacatccggattgtcgtcgttccgcgtgttccccaaaggatttattcatgatgctgttgggcactccgctttcggaggaaatgaggactggaggatgcgtttgctggcctactgcaatactaagttctttgggcttgctgctgatctcataaatccaacaatccactttcacataggctacttcaacaagttgccgctcgcgacttatggggatgaactccaaccgagggggataagtgacgcgtgcgtatcagcaagcaaggttgactggaatacttacgaacgctcctgggatttccaatattcacccatactgacggcatccagcgaatccaccgcgaatcttgaatcgtgttacaccacttggatcacacaaaaccgcgccaccatcgcagagatgcagcgcttagaagaggagaataatcgcctctttatcgacgcctacggcctggcgggcgagctcactcccgacgtgcccatcgagcagatcaccctcacggtcaacccggcctaccgctacggcggcaagatgagcgaagccgatttgtggacgcgctttcgtgaagacagcatgcgggagctggtctcctacgcgattggctgcatgctcggccgatatagtctggatgagcccggcctgatctacgcccatagcggcaaccagggcttcgaccccagccgctacacccgcttcccggccgatgccgacggcatccttccgctgaccgacaaagagtggtttgccgacgatgcggccaatcgcctgatcgagtttgtttcggtggcttgggacaaaacccacctcgaagccaacctgcgctttctcgccgacaacctttcgccgaaaaaaggcgaaagcagccgcgacaccctgcgccgttacctctgcgacaacttcttcaaggatcacctgcaaacctacaaaaaacgcccgatctactggctgttcagcagcggcaaacaaaaagcctttcagtgcctggtctacctgcaccgctacaacgaaggcacgctggcgcgcatgcgcaccgaatacgtcattcccctcagcgccaaactgagcagctacgccgccaaactggaaaaagacatcgaagccagcaacagcacagccgaaaagaaagagctggaaaagcagctttcaaccctgcacaaccaacaagccgaactcgccaccttcgacgaaaaactccgccaccacgccgaccagcgcatcagtttggatctggatgatggggtgaaggtgaactatgggaagtttggcgatctgctggctgaggtgaagaacgtgaccggcgggaaggaggaaagctaa

SEQ ID NO: 346979 - DNA, 3672 bp, Pseudomonas aeruginosa
gtgagcattaaagacattttctccaaggagctcgaccgccccatcaatggtgtggtcaaagcggaccagtctgacgacgccaccgtgtaccaggagctcgacgagtatgtggttaccaacgagctggagaagcattttcgcagcttcttcgagtcctatggcaccgacctgacggatccctccattgccaaccgcgtaggcgtctggatcagcggcttcttcggctcgggtaagtcgcacttcctgaaaaccctgtcctacctgctggccaacattcgggctcgggatgcccagggcaacactcgtagcgctgtttccttcttcgatgccaacaagctgcgcgatgcgatgatccgcgcagatatcgacaaggccgtcgccaatagcgctgatgtcatcctgttcaacatcgacagcaaggcgagctccaacgacgccggcaacccgatcctcaatgtcttcctgcgagtgttcaacgagcaccagggattcagcggcgaccatcctcacatcgcccacatggagcgccacctaacccaacgtggcgtttatgagcgctttgttgagaccttcaacgagtctaccggtctggtctgggccgaagagcgcgatggctaccagttctaccaggacgatatcgagaaagccctggcgcaggtattggctctgtccgccgaagcagcgcacaagtggttcgaggagtcagagcagacgttcagcgtttcggttgagaacttctgccactgggtgcgcgagtacctcgatgccaagccggccaagcaccgtgtcctgttcctggtggacgaggtcggccagttcatcggtagcgatacccgtttgatgctgactctgcagaccatcaccgaaaacctcggcaccatctgcaagggccgcgcctggatcatcgtcacctcccaggccgacatggatgcggtgctcggtgagctctcggcctccaaggccaacgatttctccaagattgctgggcgcttcaaaacacgcctgtcgctgtccagctccaacaccgacgaagtgatccagaagcgcctgctgcgcaaaacagcggaggccgaagccgagctgcgtgctctgtgggggcagaagggcgacatcctgcgcaaccagatcaccttcgaccgttccggtccgacgctgcgtaattacgacggtccggagagcttcatcaacaactacccctttgcgccgtaccacttccaactggtgcagaaggtcttcgaggaaatccgcaaggttggtgccactggcgcgcatctggcctacggtgagcgttctatgctcgatgccttccagatggcggccctgtcgattgccaacaaagacattggcgctctggttcccctgcacagcttctaccgtgcggtggaaggcttcctcgatacagccgtcaagcgcaccatcgaccaagccggcgaaagcgcggtgctcgatgcgttcgacgtacagatcctgcgcaccctgttcatgattcgctatgtcgatctgatcaagggcactctgggtaaccttgtcaccctgtccatcgagcaagtcgacgaagacaagctaaccctgcgccgccgtatcgaagaaaccctgcagcgcctggagaaagagagtctgatcacccgtaacggtgaagagttcgtcttcctcaccaacgaagaacgcgacatcacccgtaagatcaaggcgaccgaaattgcctcgtccgaagagaacaatgctcttgctaatctgatctacaaggacctgctcaaggacaagaacaagttccgctacagcgtcaacaagaccgactacagcattggccgctatctcgatggccacagcttggagggccgctatgagcatgacctgcgcgtcgaggcgatctcgccgctggatctggattacgctcttcatggtgaagccggctgcatcaacaagagcaacgacgcgcctgctggcatggcgctattcaagctgccggacaacaaggaattcttcagcgagctgcgcacctggctgaagaccaacaagttcatccgtctcaacgacgatggcagccagcccgagctgagcaagatcctcgccgaccgtggtcgggagaaccaggagcgcaagaagcgcctgcgcctgatgctcgaagagctgattgagcgcgccgaggtctacgcactgggccagcacctcaaactgtccagcagcaacatccagagcaagttcgacgaggcctgccaatacctgctggagaacacctacaccaagctgggttatctgaaggtgctgcagcaggaacctgagcgtgagctccatgccatcctgcacaccaatgacatcgcccagctgggcctgaccctcgacggcgaggagggcaatccgcaggcgatcaaggaagtcgagcagttcatcaccctgcgcgcctccggcaatgaccgcttgctggtggccgacatcatcgagcgtttcagcaagcggccctatggctggccggatggcgagatcctgctgatcctcggccgcctggctgcgaccagtcgcatctcctttcatgctgcaggtcccagcctgcctctaccggatgccttcgactacctgagcaacagccgcaagcgccgtgaaatctcggtgcagaaaaagcgccagaccgatgaagtgctgctcaagcaggtgcgcaacctcagtcaggacttgttcaacgccctcggccctgccggcgagaaggagttgttcgagtattaccgtggccatttcgagacctggctgggcaatctcaagagctacaagagcaagaccgatgtcggtcgcttccccggcaaagaggtgatcgagcaagctctgctcagtttgcagcgcttgttgagcaacaccgacagcgttgacttcttcaaggccgtggtcgacaacaaaaacgactacctggatctggaggaggactaccgcgacctccacgagttcttcaccaaccagttgcacacctggcagcagttgcagcaggccttgcgtcgcttcgacaagaacaagcctgccctagaaaaggacgacaaggcccgcacggccctgcttgagctgcaagccatcgagaaaaacgtcgcaccctatagccagctgcacaaggtagccggcttggtggaagcggtggaagtgatcaatgccgccatcctcaccgagaagcgcgaacatgctctggcacgtgtcgacgagaagattgcccagcttcaagccgaaatcgccaagagcggtatcgaaactgcggagctgagcaaccgcctgctgcgcccgcttcagttggtcaaggcggatctggaggccgaaaccagcatcgccaatatctacctactgcaaacccagactgccgacgagcgcctgcaggacggtgtgttcgagttggagcgagctatccaggccgaggccgaacgccaggaaaaactccagcaggagcaagctaaggctgcgcaggtcgctaactcaggcagaggcatcaaggaagatagagcgccttccctagcgccaacaccgaaaccggtagcaccgcccaagccggtggtcgaggtggccgccaccagcgtattcaacaagctcggcaatggcctgtatctggaaagccagggcgatatcgaccgctttatcgacgccctcaaggcggagctggacagtgtcatcaagcaagacaagcgaattcgtatccgctga

SEQ ID NO: 346980 - DNA, 576 bp, Pseudomonas aeruginosa
atgaatcagcagctacaggatcggctgaatcagatcccggaaaaaatcctcagcgaggagttcctcaagagccaaggcctcggcaacgagatcggcttctggatcttcgactatgaccccgaggatgagctacaggtgcgtgagtacctttgctttctagaagggctcctggccaagaagcacagtcatctcaaggttgcccacatcaacctgctgcaggccatgcgcgaatacttggatcagcgtagcttcaccgacaaggccatcctgatgcagcagaccaagggcgaccaggcattgctcaaagcgctttccgggcctctgcacatggataagtttgccccattcctgatggagcacagcggggctgctgagtgcgatgtcgtcctgatttcaggcgtgggctctgtttggcccgtcctacgagcccacaacctgctcaacaagttgcacgcgctgctcggccacaagcctttggtgctgttctaccccggccattactcagggcagtcgctgtccctgttcaaccgtattcccagcaacaactactaccgtgcgttcaagctggtgccctga

SEQ ID NO: 346981 - DNA, 618 bp, Pseudomonas aeruginosa
gtgagcgtgcaggctttcagttatgactccgacttgatcggcggctcactgcaggttcgagagtctcgcgttgtggccgacctgttgctgcagaacgccagcgccgagaactggtacgaggttatccagcaagagaaccggctgcagaaacggaccccagcttcggccaagcgtgttgctcaggcccttcgcaagcgcttggagcggttggacgccgccttttggcgggccattcgcgatggcgacgatgagctcgccactcaagtggtgttctgctcagccctggagcgcaatcttctcctcgtcgaattcatcgaaaccgtcgtccgggatgcctttgttacccgcgctggggtgcttgagccctaccactggagcgagttcctggatgagcgcagccatcgagatccagccatcaccacctggactgaatccagtcgcaagaagatggctcaagtcgtctaccgcatgctggctgaagtcggtctgctggaaagtacgcgtagcatgagattgcaaaacctaaggatccggccagaggcccgcgcattactggacgacagctaccgacaacgaatcaaggcctgcctggaagtatccagcgccgctgcgcagtag

SEQ ID NO: 346982 - DNA, 282 bp, Pseudomonas aeruginosa
gtggagagcgactgcctgtggcaagagaagatttctctgacgctcatccccaatctgctactcagcgactcccagaaagccctggtcgagcgcgacttcgccatgccggaagggcgcttacaactgaccgtacgtaaggctctggcccactacactctgcagcgctttcaggcagcaatcaccgaggacgacgcttctcgtgcgcgggagcatccgctgcaactattaccaacggatcgcagaaagcttgaacctcttctctttagtggggcccaggggtga

SEQ ID NO: 346983 - DNA, 852 bp, Pseudomonas aeruginosa
atgcttactgacaaacgatctatcgcgactgtcaccaatgccgttcggcgccacagcgataaggtgcagttgaactcgacctggacacggctcaaccaggattacggtataggcactcgtaatggcagcggcgtgctgcagcttaccgagagtgaccatcgcacactgcgagccatgctccatcgagacatggcttttgatcctttgctacatggcgccagcgccctcagtggcgatcgactggacctagcaagcaggactcgtaacgagaaggtcagtagggcgaagatcgctgatcggatcgtgatgattgcgtcgctgtcaggggagctgactctagcctcgggatccttcaggcatcccattggcggcaccttgagcgtaccggccaaggagatgcaggggcttgaccgagtgctgctgattgaaaacctccacgtaatgtttgggcttcatcagtacttgtggcctgtcgaagttcggcatctaccgatgttgtttcgaggcagtcctcagatcactccggctgcggttacgactgccttgagtggtgtgtcggaggtggtctgctttcctgactacgacccgcagggttggatgaatgctcttacgctgaatgctcgtgccatcgtgctgccggcacgcagcaccatccagcgtattgtcttcgacaagctggataaaccgagggactttgctaagcagcatgctgcgcaagattggctcagggcacagcagattggggcggtggacacattcctccgtcaggaggtggctatttcccaagaggcgatggctggaatggcgctcgagctttttgaattgccgccgcttgcctcgcgacgtcgctaa

SEQ ID NO: 346984 - DNA, 1245 bp, Pseudomonas aeruginosa
atgaaggcagaggactgggagcgtcttggcgagcacctaaaggccaatgcggagtatctcgaagatctggcccaggctgacgatactgggttgccggcgccggaccggatgaccaagggtatctcctggctgatgtccaaagggttgatcgaggaggataacgagttgctccacttgagcggtttgctgctcgatgtgggggcgcagatctccattcaaggctttgagcgcgttgctccggacctgaaggagaccctgattgccattgagcagctgtgtgaggcatatcacgatgctaagaccgacaactcaatcaatgaagcggagcgccatctcaagcggcttatccatacctccaggcaggtgattaaccaccttcgcaatgagcacagccagacccgtgcattcatcgaaggaggttatgggttctctcctcgactttctgatcgactgcgggatatcaagaatgcgatcggtcgtctgcagcgcttgcatgagaagctggggttgttctcgcacaccggactattgcaactgacgcgtagcgaccatgcgttacgtcgagtgctgatcgaaggactcttagccgcggtgtcgaaaaatcgattggctttggacgagatgatcggccgacttgatcggctcagtctcacagtgcgcaaacgcaatcgcatgcggcaggtggcccacgcagtggatctctttctgcaggctggcaatgagatcgatcttgagccactgctggaccggcccgatgcggcaaactgggtgcgcgccgaaccgctaaagccgataggcaacgtattttacgatgttggcgccggtgaaagcctggatgatctggagctgctcattggttcgctcccttttcccaaagcacgtgtggcaccgatcgagcccgtgcctcgagaatccaaatctgttcctcccagatcagaagagcctatggtgatggagaagccatttgcacgtgcgcacttggaggcaatgctgcgaatgctgattgacacagggactccacagtctgccctcgcgtactgggcagcgcatggcgattccaaggtgagtggcggcatctggctttacgccttggatggctacgttcagctgcaagtggcgctgagcaagacgcaaggcaaatcgctcaactatcggctcaggccgaccttcgagcccttttctcgtgtctctgcgaatcggcgggtattggacttcacgcttgagcgggccggacggtccaggtaa

SEQ ID NO: 346985 - DNA, 657 bp, Pseudomonas aeruginosa
atgagtccgctcagagaggtgctagaggttcttttggctggcggctttatctgccaacacgcttatccagaactgcatagacagatgcgagtactcggttttgccgacgaagtgaggggcgcgttggcgcctcttggacgcgagctgggcacgatcggagaggtagagacacctgataccttcttttctcggtacctggatctcaacgaggctcttgaccgctccgccgctaccgttcaactggtttctgtacgtgatcatctcaagccttgtctggagctcattcgactgctcaatcgggctggtcgtagtgatacctgcctggctccgggcgatgtcatcgactttgccgaaatgctggactcaatcgagcatcatgtgacctatcgagaccagctgtgggatctgagtggctacgagcttttcagcaagtccaaaagtggaaaagacaataaggatcgcctctctctggtgcttcgtgcgctagctgacgcggggtatttggtaaagcgcagtagcgagtccgccaactatgtggccaccggcaagatgggctacatcttcatggtgttggcttggttggcggagtacaacaagctgagcctggatgtcgaagcgaatgctgcgggcagcgagcagggaggtctgagcctatga

SEQ ID NO: 346986 - DNA, 3726 bp, Pseudomonas aeruginosa
atgtcgcaactaatcaaaattgtcctgattgactcgctgtgtgcaggagccaaggcagagctcgctatggatggcaataccagtgtcacgggtgcaaacggcatcggaaagtcgtctttcatgaagttgattccggtgttctatggcgcacctcctggtcgactcgtgaaagccggtagcaaccgagagagctttgccaactggtacctgccaaatgcctctagcttcatcgtcttcgaatactcgaattctgtgggaacagttcgttgcgcactcatgcaccgaagtggcgagggatatgcctatcggcttgtacctagagcttggagccctgatcttctctatcgcgattacgaggccggtcagctggttttgccgaacgagctacatcggcacttggcacaacagagtgtcgattgctccccggagctgcagccactgcactaccgacggatcattcagttcaacagcggtagcgcccatcttgagggagtgaacgatccccataagcgcaagatgatcatggggctgcgaccaagcttctcgcttgccccaaagcgcaaagacttcaacggcatcgataatgtcaccctagccctactggagagtggcggtacctttgacaccatgaaggcgacgatggctgagatcctccagcaggagaatcccgatccgggcagcaccttgatgatgctcaatgctcagccattcagaaatgtggtggatagccgtgcgggctatctgctgatggactcactaaaaccaaagattcagagcctcagtcagacccgcctggagtttcaggcagttgtccgccaactggggctgcagaagcgtaatgcggtgcagctggacagtaagcttaaagagcgccaggccgcgcgcggaactgctttggcgaagttggtcgaggaggactctgatctggaggactcgagtggcaagacggccaaaggactgaatgagcaatttggtacagcgaaggcagatctcacggccgcgactgaatcggttgagagtattgagaagaagcgagacgagtacctacagcaaggttcggctcagctactggagcagctcgatcggcttcctgaagatcaggcccaatgcgacctcaagcaacgccacctggatcagctgaataagcaggggctggatatccgcaaggtctatgagcaaagagcccagaaagccaaggatgaggccactcagcagcgagaaggtgcccatgcgcaaaacttgttggcgactcaaggcatacaagtccgtcaggaaaaacacgacgctgagcaggcgcgtttgctcgaggagactcaggcaactcaacagagagagcttgaagagctgcgaggccggcaaagcggcctcgcctcgcaatgtgcacgcgaagaggctgctgtcgatcatctgaagaccattgaggttctgcctcatgctcaagtcgagctgaaccaagcgcagcagagcatcgatgaccagcaggcggtattggaggagtaccagcgcgttgtaaagagtatgcgtgaaggtgaggaggcactacaccgggagcaggtcgctctgggggctgcttaccagggcactgagctgcaaaaagaaggctttcaaaacgagcgagcactgttaaaggcccagcttagtgccagctcagaaaccttgctcggtttcctccgccgtaatcaccccaactggaccgacaacatcgcccgtctggtatcagtggaaacgctgatgcgcactgaccttaaccctgcgcttgtgaaagaggtaaatcagagcctgtatggcgttgagctctcacttaacgtcctgcctttcgcctctatcgcaagtgaggagacgctcgagagcgaaattgcattggctagccggcagattgacgccctagattcggagctggagggcattcagaagcagcgtcgcaccttagcggaacgtatgcgccagcacagtgctggactctcgcaggctcaaagcaacgagcaacaggcaactgttgagttggatgtgagcaggcgtcaacgcttgaacattctgtcacgagctcacgatgagcatgcgcagcagctagcaattcagagtgcacgcgctgcggaggtggctgccaacctcaagcgcatggatgagcgcatggctgagctcaagagcacgcaccgctttcaccttctcgagttgcgctccacggcagaacaggtccaacgcgatttcaaggaggagcgtgctcagcagaaggttcggtaccaaacgactctagagcgaatcgatgccaatctggagaaagagcaaaagcagatagagcaggacctggcggcgcgcctacgggatgctggcgtcaacgacgcagagaatcggcggcttgaggctgagatcagccggctggaggagcacatcaaaaaggtctcgtcgcagcgttcagtgcttgagagttatcgcttttggcgggagacaatactgcccgtcttgccgcagcgtattggtgagatgaatgcagcgcagggtgagcatgatcgagttgagcgtctgattagcgagcatcgccgccgggtagaggagctcaagaagcatattactgagcgtcgaaaagtactcgtgcaggaggagcacaaagacagcgagcagcaggggatacttcaccggatcatcggtcggctctctcaggttgaggcagctgagactgaggcctggaatttgagcctgactgcagctgacatcgaggatgaggtctacaagctacttcgccagcgcgctgagcttcagaaaaaggggagcgagctttatcgggacatcccttcacggttccgtaaggaattgttagggcacacgacccaaggcgcggcgattgagcaaatcgttagccaggccagcaatgctgcgtttgaagtcgagtacgcctggcttgaggcggctccgaaccttcaggagtacatcgagatctctcaccccgatcagaagatcaagctaatcgtccaagccaagaacctatcggacgagctctgcgacagtcgggcgaaactgcagcagctgcacaaaagcatccaaaagttggggcgtgacgccacggctaaagccagcgaagtgctgggctcatttgctcaaatccgccagtttgagtttaaggtcacctcccgaatccacagcatgacgttctgggacgatatgtctgcatacgagcagcactaccggcgctgggcgatgatgggcgacgactatctcccgacagaaggctttatggcggcgttacgtaatattgaacgtcagatcagagagggggctttttcttcgaagctgtctgactgttttgatgtgagtgtgtcctgtaacgaccagggccgtacgaaagtcgccacgaataacgctgatctgatccaccttagcagtacggggctcaccaagatcattgttgcgatgatttatgtctctctgttcgagttgctcaggcaggacgctgattttcaaatgtcgatccccatcgacgaggccctggagctatcggctgaaaactatgtggcactggtgaactacttcaatgagcgtggcctttcgatgctggcctgttttccaggtggtgcgccggagctcctgcgtcagttcaagaacagatacaccttagagcggcgcgccgactcggacgccattctggtgaaagagtacggattgagcgacgcggatgagttggacgagttgaacgcagcccttgctgctggggatgaggagttcgccctatga

SEQ ID NO: 346987 - DNA, 1548 bp, Pseudomonas aeruginosa
atgacgagccttcactgctacaatgaaaaaaacgtagcaatatcggttactccgggcgagccctcatcagggtttgatgagcggggcttgtaccgtttccgagcggtgccagagcatcggctttacatcgacgatgcgctgctgcccgagcagctgcatgaaggtgaagtcgtttggctttgggagccagggttctttgcaggtgaggcctcggctgaattaacgaacctgagcggcagcatcatcgcccagtaccgtctggatgtcgcccccagcagcgataagcttggcaaagacatctttgcaaagatgctggaagacatcgttaccttcgacgcgaaactgctgttcggcacagagagcgcgcagatctccataggcacggacggcgaggattcaaaccctcacctacagtacgcgcgacttcggcgctatggagagtcactagttgccgcgctccgacaggtgaccgagcgcccccttaccaggcttcgccgagaacgtgttgcagtaggcgcgcaccaggttaggcgcttggagccacccgcggtccgagcagctcttaagagccgtacgataattctgggatcggagggcgtgacactgccctcctcgcaagccagcttcgaagtcgctgcgttttttgagcatcaagacaatcctgcaaatcaggtgcttggagcgatacttcttaaggtaatgtctcgctgtcgccagacgattcgagcctttgaacgtattgccgaaacggagcgccactccgatacccgatcggagctagcaccacgcttgaagaggcgtatcgccttccttgatggcctgtaccgagcactgcggcgccagcaacgaatggagcccttctgccacctaagtactcagcgaatcactgccgccgggctcaatgcaatctccgctcaccctatctatgcgcgggcttaccgtttcggctggcataacctaaggcctggtgtcttaggagcgacaggcgaagagagcctgtggatcagcccttcctgggagatctacgagcgctggtgctatatcaaaatcgtcgagcagctgcgctcgctgcatccaactctcaagtgggaaggtcgctatccgactcggcgggaagactgcatctgctggagcggaaagggtccggaatttacgctggaggtctggcttcaggtccgatgcccagcgatcgacagagtcccctatgaagggttctcaagcctctcgaagcaacgcttcccggacatcgcagtgacactggaggcaggggaacaacgcagattcgtgatacttgacgcgaagtataggactagtcgccatggcgtcctcgacagcatggcctcagcacacatctatcacgatagcttgcgctggcatggtcagcgcccgagctatgcccttctcctagtcccccgcgcaggcgaagtggagaaactccaaaacgaagatttttggaaagaacagggagttggcttggctgcactgggaagcgacgatgatgttacagcgatcgttcgtctgctgagtagattgctgctagacacttag

SEQ ID NO: 346988 - DNA, 381 bp, Pseudomonas aeruginosa
atgcatgccagcggaatggtgctgtacgtcgccgatctggaaaaaatggcgcggttctatgggcaggcgttcgacctggcgatctcggcgggcgaccatgagcaccgggtgctgtgcggggaggctttcgaactggtgctgctggtcacgcccgccgcgcagcgggcccaggcaacggggcagggtgctcggcgcgggaactgcgcgatcaagccggtgttcttcgtcgccgacctggccttgctgcgccggcgtctggcaactcttggcggcagtctggcgccgccggagcaggcctggtcgttcgctggccaccaggtttgcgacgccatcgatcccgagggcaatgtcctgcagctgcgtatgccgctgcgcgactga

SEQ ID NO: 346989 - DNA, 1752 bp, Pseudomonas aeruginosa
atgctacccaccattcccttgttcagcgcctggcgccagagcctcagggcgggctattcgctgcgagccctgcgcggcgacctcggcgccggcctgaccgtcgggatcattgccatccccctggcgatggcgctggccatcgccgtcggcgtgcctccgcagcacggcctgtacaccgtgctggtggcagccccgctgatcgccctcagcggaggttcgcgcttcaacgtgaccgggccgaccgcggcgttcgtggtaatcctcctgcccatcgtccagcagtacggccttggcggcttgctgctctgcaccttgctggccggcctgatcctggtcgccatgggcctgggccgggtcggccggctgatccagttcatcccctatccggtgaccctgggcttcaccgccggcatcggcatcgtcatcgccaccctgcagctcaaggacttcctcggtctgcaggtgcacggccagccgcagcactacctggagcaggccggcctgctgctgcgctcgctgcccagcctgcgcccgggcgacagcctggtcgggttatccgccctggcgatcctggtcgcctggccacgactcttcccgaagatccccggacacctggtggcgctcgccggcggcctgctcctcggcctgttgctggagcgcctgggcctgccggtggcgaccctcggcgaacgcttcagctacgagcacgaaggcgtcgtccacgccggcattcccccttacctgccgagcttccagttgccctggaaccttcccggcccggacggccggccactcggcctgagcttcgagctgatccgccagttgcttgccccggcattcgccatcgccatgctcggtgccatcgagtcgctgctctgcgcggtggtcgcggacggcatgaccggcagccgccacgatcccaacggcgagctgctcggccagggcctgggcaacctggtggcgccactgttcggcggtatcaccgcgacggcggccatcgcccggaccgccgcgaacatccgcgccggggccttttctccgctggcggcgatgctccacgccggcgtcgtgctgctggcgatgctgttcctcgcaccgctgttcagctatctgccgatggccgccctggcggcgttgctgatgatggtggcgtggaacatgagcgaggcgccgcacgtcgtgcacaccctgcgcatcgccccgcgcagcgacgtgctggtgctgctggcctgcctggtcctcaccgtgctgttcgacatggtcctggcggtcggcgtgggcctgctgctggccgccgggctgttcgtcaagcgcatgagcgagctgaccgataccgccagcctgcctcgcggcttccaccaggcgttggccgacctgccggcgccggtgctcgcctacgccatccgcggcccgctgttcttcggtgcggcggaaaaggcgctcagcgtgctgcgccggctcaatccggaagcgaaggtggtgatcatcgagatgagcgcggtgccgatgctcgacctgaccgccctggcggccctggagagcatgcttctcgaataccggcagcgcggcatcggcgtgatcttctgcggctgcaacgcgcgcctgcggctgaagctcaagcgcgccggcatccatcccgcggccggccgcctggcgttcgtccacaacctcgaggtggccaggcgcaaggccgaggcatggctggccggcgcggcaagcgaagcggacgggctcgccgctcaggcgaactga

SEQ ID NO: 346990 - DNA, 285 bp, Pseudomonas aeruginosa
atgctgatcggagcgctgggctgggcagtcgcattcatgcccgtttctccgtcatcagcgttgcggattccagacgccgggccagagccccacatcctccaccataccttcgccagccactacatgatggggggaggggacatcctggccctacagcggatcctcggtcactcctcgatgacgatgacgatgacgatgcggtatgcgcacctatcgccggagcacttggagtcggcgatgcgcttttctccgattactcagtctggctacaaattgaccacatga

SEQ ID NO: 346991 - DNA, 204 bp, Pseudomonas aeruginosa
atgcaggtgcacatctggaaacgcaaggaaggcgacatcgtcaccctcaaactggccaatggcggcgacgaacaccggttgctccagcagttgcgtaacgaaggtatcgagttgatcttcgggcccaacgacagccaggctaccgaagtctgcttgcgggcaccgacatcgctcaaggcgcgagtcgatccaggcgcgatctag

SEQ ID NO: 346992 - DNA, 516 bp, Pseudomonas aeruginosa
atgaacgacaccgccccgaccctccagtacttcttccgcaaccgccgtatcctccgcgccatcctgatcgacgaccaaccctggttcctcctccacgacttcacccgcctgatcggctaccctcacaccgaacgcctgatcaaccgcctcgactccgaccagacctgcgaagccagcctgcgtctccacagcaacagcgaacccgccgaacactccctgatcagcgaatccggcgcctatgccgcgctcatctattacaaccacccggagaacggcaccctgcgctgttggatcaaccacacggtcgtgcctctactgcgcagtgctggtgactcaggcctccagtcgcctcgccagctgcaactcaactggggccggcaggcgctcaaggtgctggattggcgcggggagctttgggtgaattttcatgaggtgccgtatttggcgggggaggccggccgtcggatgggggagggatggaggcaactggtcaggaggttgaggggaggagagtga

SEQ ID NO: 346993 - DNA, 234 bp, Pseudomonas aeruginosa
atgaccatgcttcccctgcgccagatcgaacgcatcctcaacgccagcacctgttcctcgcgtttccgctgccgcagggccgccgacggcagcctcacggtgaccgttgccagcgcgcggcggccagccgccgcggccaccacggtcgccggcgtcagccaggaggagtgccgttgcgaacggtcggtgcgcgaactggcgcgagagctggagcgcagcttcactgagcagtga

SEQ ID NO: 346994 - DNA, 204 bp, Pseudomonas aeruginosa
atgcagagcctcttcatcaatggcaccctcggcgtcggcaagtcttccgccgccgagcgcctggccgggcgcggcgtggcgcatgcgctgatcgacctcgacgcgatactgcgcgaggcggcattggacgacctggtggtcgagaccgaccggatcgccgtcgatgctgtagcacaggcgctgccggcggcgctcgcctgctaa

SEQ ID NO: 346995 - DNA, 255 bp, Pseudomonas aeruginosa
atggagcaacgagagttccggcttgctggcggcatcgccgtggcgctgcgcaatccggcgctccgcgcccatgcgcttgaccagttggcgcgcctgcccgtagtcagggaatggctcaagctccagaacgtttcccggcagaccgcctggccggagcgggcgatgcaggcggagcaggtcctgaaccttcagcgagagcgcttctggcaggcgccgaatgcgtcgcaggcgagggcgatgtgcaggcctggctga

SEQ ID NO: 346996 - DNA, 849 bp, Pseudomonas aeruginosa
atgacccagcatagcgacctgctcggcttcgctccgcaacgcacggcgccgcgaattccccgcgctccgggagccgacacggcttgttcctctggtccggacagcctgttccacgccatcggcctcgagcggctcaacgccaccgcctcgatgctggtccggcgcgacaacaagtacgtggttcgcgaggagagcctggcgccggcctgggcggcgctggccaggcagttcgacatgctcgagatcgacgggacgcgcgatttcctctacgacacctgctatttcgacgatcctgcctacaccagctatttcgaccaccatcgtggccggcggcaacgctgcaagatccgcatgcgcaggtacgtcgacgcccggttgtgcttcgccgagatcaagctgaagggcaagcgcggccagaccgagaagcgtcgcgtggcctgcccgctggaacagtacgggatgctggacgacggcagcgaggcgcagatccgcgcggcctaccgcgaactctacgggcgcgcgttcgagcaggtgctggagccggtcgtgtggatgcgctaccgcaggacgacgctggtcgccaaggagggcggcgaacggatgaccatcgaccgtggcctggtgttcagggatgcctccggtacctgccggatagacgacggcctggtcatcgtcgaaaccaagtcgggcaacgccaacggcatcgccgacaagatcctccgtgccttgcatcagcatcccaccaacggcgcttccaagtactgcgtcagccttgccgcgctggggagggtcggcaagtacaacaagctgctgcccgcattgcgcaagctcgatgtgcttcccctgtga

SEQ ID NO: 346997 - DNA, 951 bp, Pseudomonas aeruginosa
atgcattccagcgtaccgctgaccgccgccctgatggccttcgcgctgttggctgcggcaccccaggcgacggcgggagcatccgtcccggcgccctcggccgcgcgttccgatccggcgcgcttcaccttcgcggcgaccgcgcgggtcggcgacatccacctgaccgaactctccggcctggcctgggacgaggacgagaaacgcctgtacgcggtgtccgacaccggccacctgttccatttccggctccgtctcgacggcgatgcgatcgccgccatcgagccgatcagcgcggtcgcactggcggaccctcaagggatcggcgcgaaggccggggagttcaatgcggaaggcttgacgctccgcaacgccacgaatggggtgccgggcgacagcgagctcgtcgtcgcactggaaggcaagccgtccaggctcgcccgtttcggcacggacggccgcctgctgggcgaactggaagtaccgtcgccggccgccgacctgagcctctaccgcaagaaggggcgcggcctggaggcgctggcgatccaccccgactacgggcttctcaccgctcccgaggcgccgttgctgggacagccggagacgctgcatacggtatacgcgaagggccgtcactggtcgttcgcgcgccagtcgccgggcagtcggttgaaggcgctcgatgtgcaagcggatggcgagttgctcgtcctcgagcgcaacaaggcaggttcgaagagcgcgctgtcggcaagcctgcgacgtgtcgatctcgccgcctgtggcctggacgacctgtgccaggccgacaccctggccgtactcccggtcgggccggacaatttcgaaggcatgaccttgctcgattcccggcatctcttgctggtgagcgacaacgccagcctggtgactcgcgacacgctcttcgtgctgctggtgtggccatga

SEQ ID NO: 346998 - DNA, 1167 bp, Pseudomonas aeruginosa
atgagcctctctctggcgagacgcgtacgccgtctgaaaaatgccttgtcgctcatcctgcccgcggcctgcctgggaacgctggcggaagcgggggcggtcgaactcaagctcggcggccgtctgcatctcgactacgcggcgcaccgggccgataccaagccgctggacaatggcttcctcgtgcggcgggcgaaactgggcgtcgatggcaagctcgatgacgactggtcgttcgaggtttcctacgatttcgccgatccttaccaggtcaccgatgacggctccagcaaggtgggcaggttcaaggatggtttcgacgacgtcgcgctgcgctacgagggctggaagcatgccgacctgagcctgggccagttcaaggtgccgttcgggctggaagagctgaccagttcgaacaacatcacctttgtcgagcgagcgttgccgaccgccgccttcgccccgtcgcggcggttgggcctgggcgtgggcagcaaccgtgagcgccataccctgtcggccatgggcttcggctcgtccatcgatggcgacgacaggggacgcggcgtcgcggcgcgggtcaccttcacgccgatcgacagcggcgcgggcggcacgttgctgcacctgggcatcgccgcggtggtcgagcgcccgaggggcgaagtcaagttcaatgcgcgaccggaatccagggtttcggacgtgaagctggtgagcaccggcacgctacgcaatgtcgagcgtatcgaacgcggcgggctcgaggccgcctggaggagcggcccggtctcgctgcaggcggaatggctgcgaaccgcggtcgggcgtggccacggcagtcccgatgcgcgcctggagggctggtacgtcatgggcagctggctgctcaccggcgagtcgcggcagtaccggaatggccggttcaggggcgttccgttgcagcgctcgggcggtgcctgggaactggccgcgcgctacagccgcatcgacctcgacgacggcaaggtcaggggaggcgaggagggcaacctcagcctgggcctgaacttctacgccaacaagcgcctgcgtatcatgctcgactacattgacgtgcatagcgatcgacggggcgggtcggacaacccgaacatcctgctgctacgcacgcagcttgcgttctag

SEQ ID NO: 346999 - DNA, 1908 bp, Pseudomonas aeruginosa
atggtcaaggcgaaaatctacgcggggatcgcgatcatcgtggtattcggcgtgatgtcgatgctgtacgtctatcgtggcctggatgaggtcgtcgggcatctgaccaggctcgaacgcatcggggcgccgttcagcatcgccgccctcgaaatggaaaagaatgtcggtgagtacgccttcggggtacagcagtacatcgtgcggcccgacccggagatccgcgcggagaccgcgaacgacagcacggatttttcccgctaccacgccagctacatgcagttgagccggaccaggcgagaaaacgagctggggcaccatctcgccagcgacttcggcaagctttcgaggatcggcgccacactgatggataagcgggaccggctcgatgtcggcttcgcgcacgttaccggcctgctggagcaggtcgttaccattaccggacagtcgctgccgttggcggcggcgcagcgggagccggcgcgcagccggagcctggcagcgctcgcgaacctgaaggcgcgggcggcacaagcggagctccggctctccgctttccggcggcgaccgacagcgttggcgatgcggcaggcgcaggaggagctcgccgagctcgaggaagccctttcaggctatcgccgactgtcgttggggaacgaggcgcgacggctggaggacgagcttgtggccctgcgtattccgctcaggagcggggtcgaggcatggctttccggcgagggtgccctccaggcgcttgccggtgagttcgcccggttgcaggagcacatcgacgatgtctgcgacaaggagatcgaaccgctggcggcgaaggggctgacgacaccgcaggagcaggcggatcgaatcgcggtgcgggtgctggacatgctgcgctatgcgattcccctctacctgctggtcgcgctgggtgtcggcgcgtcgctggtgttggcgatcgtccggccgttgcgaacgctggcgtcgggaacccgggcgattggggcgggtgaccttgactaccgcatcctcgagcggaacagggatgagttcgatgaccttgcccggcagttcaaccggatggtggcgcgcttgcaggaaagcacggtgtccagggggctgctggaggacagcgagcggagattgcgcctgacggtcgccgaactgcgcgaggaaatcgcggaacgcgagcgctccgagcgggaacgggaaaagctgcaggccgagttacgccgcagcgaggcgatggcggccatgggccgcctggtcgcgggtgtcccccacgaggtgcgcaatccgctgttcggcatttcctcgaccctggacgcgctggaggcgagcgccaatgtcggcaagggcggcgagcgccaccgggaggtgctgcgcggcgaggtgggacggctgaacaagctgatgacggacctgctcgaatacggccggccaccgggcgagacgttctccagcggccgcctcggccaggtcatcgtcgaggcggttcgtatctgcggcccggccgcggaagccgcgggtgtgggcatcgtctaccaggtggacggctgtgacggcacgctgccgatgaatcatggtcgcttgctgcaggtattcgtgaacctgatcgaaaacgccgtgcagcatgcgccggctggcagccaggtgacggtggccgcgaagacgctcgaagtgaacggccagcgctcggtcgagtgccgggtggaggactccggtgcgggctttgccccggaagacctgccgttcatcttcgatcccttctttacccggcggcgtaagggcacggggctaggcctggccatcgtccagcgcatcgtcgaggagcacaaaggctcgatcgaggctggcggcgctgcgcaaggcggcgcggtcatgcgcctgcgcctgcccatcccggactga

SEQ ID NO: 347000 - DNA, 849 bp, Pseudomonas aeruginosa
atgcctgaacactggactcggacgctaccccgcgtacgcggcgacagtctggaaatccgtcccggccggcgcatcagcctggcccacagtcgtggtcacagccatccacgcaccgtggtgttcttcgcccatggcggcggcggcaacaaggatcaatggcgcgagcaatggcgcgtgctggaggaggaggggtacagcctggtggcctgggacctgctcggccacggcgccagcgacaagccccggcgcgcggcggactacgcctgggacgaactggtcgccgaccaggtggaggtgctgcgtcgtttcgccggcgagcgcaacgtcctggccgcgcattccttcggcaccggcctgagcctcagcagcctactgagactgcaggccgacggccagggtgcgctggtggacgccgcgttgctgcttggtacccagttgcagaggccattgccgcgtggcgggctgctgtccttgcccagttggctgcttgagtggtttcgtccagtgctctccagaggcttccgccagcgcgcctggcataccgatgccgatccggcgctgatcgactacgaggaagcgctgacccgaaacaatcgcctggacgtattcaaggcgctggtcagccaggcgacctggctgcccgaggacgaactcgaccgcctgcgcttgccggtacgaatcctcgccggcgacagcgacggcctgacacccgcagagcgcggacgagcactacacgaacggctggtcgattcgcaattcgaggtgctggagcgttgcggccatcaattaatgctggagcgaccggaggtggtgaaccggcacctgcgcgaattgctgggcaggatctga

SEQ ID NO: 347001 - DNA, 1209 bp, Pseudomonas aeruginosa
atgagcgcagcacggcaaatggcgctaggtgcgttcctgatggcgaccgggcatcacctggccggttggcgccatccccacgcccatgctggcggcggcctcgatatcgagcattatcgggccctggcgcgcagcgccgagcgcggctgtttcgatgcgatcttcctttccgataccctggccatgctcccgggacatctcgacgctctcagccgaatggcccgcaccgagcatttcgagcccctcacgctgctcgcatacctggcggtcgctacctgccgcatcgggctggtggcgaccgtcacctcgtcctataacaacccggctgacgtggcgtcgaccttcgccagcctggaagcgctcagcggcggccgcagcggctggaacctggtgacatcgagcaacgcccgggaggccggcaatttcggccgcgaacgccactacgagcacgcctgccgctatcgcctggccgagggttttctccagcgggtgcgcctggactggcgccgacgcggcgtcgcaccggtgcaggtattggcaggcgcttcagaatccggcaagcagttggcggcgcgctacgccgaactgctgttcaccgcccagcccgagcgggcaggggcgcaggcgttctatcgcgacatcaagtcccggctcgcccggctgggtcgcgatcccgcatccctgaagataatgcccggggtactgccgatcctcggcgccagccgtgcgcaggccgaggagcgccgtgcgcagttgtgcgaactcgtacagccggcggtcggcctgtcactgctctcggatgtggccggcggcttcgatctgtcgcctttcccgctggacggcccgttgccggatctgcctcccaccgagtccggcgtcagtcgccagcatctactgctggacctggcacggcgcgagggcctgagcatccgccagctgtaccagcggatcgccgatgctcgtggccaccgcgtggtgagcggcactgcggtggacatcgccgaccagttgcaggactggttcgagtccgacgcggcggacggtttcaacatcatgccgccgcacctgcccggcggcctcgacgatttcgtcgaccaggtggtgccggaattgcagcgacgcggcctgttccgccatcgttaccagggccgcaccctgcgtgaccacctgggtctggctcattcgaaggagatcgccccatatgcctga

SEQ ID NO: 347002 - DNA, 1611 bp, Pseudomonas aeruginosa
atgagcggcagtctgctggaagtacgcgacctgcgtatcgacctgccggagggaggcgaccgtccctgtgcgctgaacgggttgtcgatcgaactggacgccggcgaagtgctttgcgtggtcggtgaatccggctcgggcaagtcgatgctggccaacgccatcctgcgcctgctgccgcagcatctgcggccggtcgccggtagcatccgctttcgcggcgaggatctggccgggcgcagcgaggaagggatgcgccagttgcgcggcagggacatcgccatggtcttccaggagcccatgagcgcgctcaatccgctgctgtgcatcggtcggcagatcgatgaaggcctgcgcacccatggcgtcgcgccagcctccaggaggcgcgcgcgggtgcttgagctgctcggctacgtcggcctgccggagccggaagtgctgtaccacgcctatccgttccagctctccggcggtcaacgccagcgggtagtgatcgccatcgccctggcgctggagccggcactgctgatcgccgatgaaccgacgtcggcgctggacgtcagcacccaggcgcagattctcgatctgctgcgacgaatccgtcgcgaaaaaggcatggcggtgctgttgatcacccacgacttcgctgtggtggaggccatcgccgaccgcgtattggtgatggagcaggggagtgcggtggagcagggcggtctgcgccaagtgctggactacccgcgccacccctacacccggaggttgctggcggcgcgccagccgcgccagcgcagcgcgcccggctacgctcgcgacaccgatccgctgcttgaagtgcgcgacctgtacaagcattacgacagccgccaggggctctggcggcggcgccgcgtcaccgcgctggccgaggccggcttcagcctgcgcccgggcgagtgcctgggcatcgtcggcgagtccggttcgggcaagaccactctggggcgtgccctggtgcgcctgctgcggccggacagcggacagatcctgctgaacggcgcggacctcgcgccgctgtcgcaacgtcgcttgcggccgctgcgccagcaggtgcagatggtcttccaggatcctttcgcctcgctcaatccgcgccagcgcattggccgccagatcatggccgggccgctggcccacggcgtccctcccgccgaggcggagcgtcgggcccgccaactgctgctccaggtcggcctgccggaggcggccttcgaacgctatccgcgcgacttttccggcggccagcggcagcgcatcggcatcgcccgggcgctggccgtgcagcccagggtgctggtggccgacgagtgcgtctccgcactggatgcactggtccagcaacaggtgctgacgctgctggaggaactccagcgcgagctgggcctgagcctggtgttcatcacccacgacctgcaggtggcggcgcgcctgtgtgatcgcatcgcggtgatgcagggcggacgtatcgtcgaactgggcgatgcgcggcaagtgttgcatgcgccgatccacgactacacccgtcggctgctggcggcgcgaccgcagcccaggtcggaggcccccgcatga

SEQ ID NO: 347003 - DNA, 837 bp, Pseudomonas aeruginosa
atgagcgcgatgcatgcgttctcccgccctggcgcgctgctggctggcgccttcctgaccctgctcggcgcggccgcgctgctggcgccatggctttgcgcggcctcgccctgggacatgctggcgcgcccgctgctgccgccgttcagtgacgccagccactggttgggcaccgacatgctcggtcgcgacgtggccaccggattgctctacggcgcgcgtacctcgctgagcgtgggcctgctggcgagcctggcgacgttgctgccggcgctgctggtcggtgctgtcgccggctacttcggcggctggatcgacgaactgctgatgcgtatcgccgagtgcttccagatcatcccgcaactggtgctggcggtggtcctcgtagccctgctggagccctcggtgggctcggtggtactggccctggccctggtggcctggccgccggtggcgcgcctggtacgcagcgaggtcctcagcctgcgccagcgcgaattcgtccaggcggcgctggtgctcggccagtcgccggcgcgcatcgtgttcgcgcagatactgcccaatgcgctgtcgccgctgctggtaagcctgaccttcatcctcgccgccgccatcctcaccgaggccgcgctggccttcctcggtctcggcgacccggaggcgatgagctggggctacatgatcaatgcctcgcgcaacctgctacgcgatgcgccatcgatgagcctgctgcccggcgtggcgatcctgctcacggtgctttccgtccagcgcgtcggcgaggctctgcggcaagccctgcaagcgcccggcgaacagggaggtcggcgatga

SEQ ID NO: 347004 - DNA, 993 bp, Pseudomonas aeruginosa
atgagcctgctgctgtatgccggagcgcgcctgggacgggcactggcgctgatcgtcgcggtgctggtcggcgccttcctgttgctgcgcctggcgcctggcgatccggcgctgctgatggccggcgaggcgggcagcgacgacggcgagtacatcgcccggttgcgcggcgagatgggcctggacctgccgttgacgctgcaattgtggcgttatctcgggcaggtcgcgcagctcgacctgggctattcctaccgtaaccaggagggcgtctggccgctgatcgccgagcgcctgccggccaccctggtgctcatggggtcggcgttcgccgtctcgctgagcctgggcgtaaccctcggcgtgctggcggcgcgcagccagcagggcagcgggcggctggaccgcctgatcggtcgtgcggtctgggtgctgttcgccaccccgccgttctggctggcgctgctgctggtgctgctgttctccgtgcggctcggctggttgccggccttcggcatgcagagcgtcggcgccgaactctccggttggggctggttggcggaccgccttggccacctggcgctgccgtgtctgtctttgagcttcctctccctggcgatgtatgtgcacctgacccgcagcgcgatgctcgacatcctgcccctggagcacgtccgcctggcccgcgccaagggcctgggggagagccgcgtgctgctcggccacgtgctgcgcaatgccttggtgcctgtggtgaccttcgccggcctacagctcggccaactggccagcggcgccttgctggtcgaggtggtctacgcctggccgggtatcggccggctgctctacgacgcgctgagccagcgcgactatgccttgttgctgggggtgttcctggtgatttcctgcctggtggtggctttcaatttcctcaccgacctgctctgtcgcctgctcgacccgcgtatcggcgttgccggggaggcacgatga

SEQ ID NO: 347005 - DNA, 1605 bp, Pseudomonas aeruginosa
atgaccagtcccactttccgcctcgcgccccggcgttcccgccatgcccggttgctcgccggcttgctggcggccggcctggccatggcgggtgccgcctcggcggaaccgacccgcggcggccagctcgacctggtggcccagccggagccgccgtcgctgtcccacgcggtggtcagccacgtcgccactcaatacgtcggcggcaagatcctcgaaggactgatcaccttcgacaccgagctgaagccgcagcccgtgctggcgcgcaactggagcgtcgcggcggatggcctgacctataccttcgaattgcagcccgacgtgaagtggcatgacggacagccgttcggcgccgacgacgtggtgttcagcttcagcgacttctacccgcaggtggacaagcgcatggcgagcatcttcgccgaatatgtcgacagcgtgcaggccaggggcgatagccaggtcgtgttcaggctgaagaaacccttctcgccgctgctctcggccctgggcagcggcctgcgaccgatcgttcccaggcacctctatgccggcaccgactaccgcagcaacccatacaacctaaagccggtgggcaccgggcccttcgtcttccaggagtggaagcgcggcgcctacatccgcctggcgcgcaatccggactactggcacaagggcctgccgtacctggacgggatcgtctaccacgtgatacccgacgccgccgcccgcgccgccgccttcgagcgcggcgaggtgcaggtgctgcgcagcggtgatgccgactacgccgacctcgcgcggctgtctcgcctgccaggcgtagcccagtcggagaagggctacgagctgtacccgggactggccttcctgcagatcaacacgcgcaagccgggactggacaatcccaaggtccgccaggcgatcctctactcgctgaaccgccagttcatcgtcgacaatattttcttcggcaccggacgcgtcgccagcggtcctttcctcggcgccttccacgacccacaattgccgcagtacggcttcgacccggcgaaggccaaggcgctgctcgccgagtcgggagcggacgtgggcaagctgcgcgtgcgcctgctcaacggcgagaagggcggtgcctgggagcgtctggccgagtacaccaggcaggcgttacgcccgctggggatcaaggtgcaggtggcgacctccgacgccgccacctggtaccagcgggcgagcgactgggatttcgacctgacctacaacttcatcttccagatcggcgatccctacctggccaccgcctacctgtaccgctccgactacattctcaagacctcgcccttcgccaacatcaccggctacagcgacccaggcgccgacgcgctctggcagcgcatcgccgacaccggcgagggcccgcggcgacgggcgctgtatgccgagctggaacgcaagctcaacgatgacctgccgatcgcgccgatcttcgagatgcgcttccccacgctctaccaccagcgcgtgcacaacctgatccgcagcgccacaagcctgaacgacagctacgccgaggtctacctggagcccgccgcacaatga

SEQ ID NO: 347006 - DNA, 1377 bp, Pseudomonas aeruginosa
atgacccaggactatctcggcaaccccatcgacagctcctccgaggctacccgccaggccatcgatgacttcaccggcggcatgctcgcctaccagacccgcgcggaaggtatcctcgccggcgccgacagcgagcccggatcgatactggccaacgctttcgccggcctgctcatgatgttcgccgaatcgccccaggcccctgccctcgccgcccgctacctgcaacgcgcccacgctgccggccgcgggattccccgcgcggagcgctaccgggcgttgctggcggcctggagcgcggacgacctggcgcaagcgctgcgcctcagcgaactggctctggaagagaacccgcgcgacctattggcggccaagctcaaccagtacttcgagttcaaccgcggcaactcgccggccatgctgcgtatcgccctcaaggccgtggacggtacgccggacgtgccccaggcctacggcatgctggccttcgcctacgaacaatgccacctgctggatgaagccgaggctgctgcgggccatgccctgcagttgctgcccgacgaaccctgggcgcagcatgccctggcccatgtgctgctgacccgcgggcggatcgaggaaggtacgcgctttctcgaggaggccagcggcggctggcaggggctgaattccttcatgtatacccacaattggtggcacctggcgctgttccatctggcgcggggcaaccaggagcgcgtgctggatatctacgaccggcacgtctggggcatctttcccgagtattcccaggaccagatcggcgccgtttcgctgctggcccgcctggaactggcggggatcgacgtcggaccccgctggcaggcgctgctgccctatctgcgcgagcgacgcggcgacgtcgtgcaacccttcctcagcctgcaatacctctatggcctggcccgcgccgggcaggacgaggccggcgaactgctggaggcgctgcgtcgccaagcccggcaggcaccggccttcagccgggcggcctgggccgacgtcaccctgcccgccgccgaagggctgcatgcccatgcccacggcgactatccactggcagccaggcgcctgggccaggccttgccgagactccatgagatcggcggcagccacgcccagcgcgacctcttcgcactgatcgaactggatgcgcagctgcagggcggcgactggctggcggcgcagcaagcactcgagctacggcggcgctacgatgccctggacgtacccggcaatcgccacctggaaaaggtctacacggccctcgggctgcctcaggaagccgcgcgcgcggcgcgtcgtgtgcagcgtgcgctggacgggaatccctacctctag

SEQ ID NO: 347007 - DNA, 1005 bp, Pseudomonas aeruginosa
atgcccggacccggcccgcgcaacctgatcaccgatattcccggcttgctggttggccatgccaccgacgaacgcgtgcggaccggcgtcaccgtgctgcgcccggagcgcgcctggaccgccagcgtggacatccgcggcggcggacccggcggccgcgagtccgcagcgctggaaccgcagaacatggtcggacagctgcatgcactggtgttctccggtggctccgtgttcggccttggcgcggccgacggggtcagtgcggaactctccgcgagcggtatcggcctgcacctgaaggccggcgcgccagccatacccatagtcccggcggcggtgctgcatgacctggccaacggtggcgacaagggctggggcctggagccgccgtatcgtcgactgggacacgaggcgctgggcaacctgcgggcggagttcgcgcttggcgcggtgggggccggccgcggcgccatggccggcgtgctgccgggcggactgggttcggcctcgctggatctgggcgatggcctgctggtcggcgcgctggtggtggccaaccccatcggcagcgtctacatgcccgacggcgagacattctgggcctggccctgggagcaggcgggcgagttcggcggacgccagcccgggcaacggatggactgtagcgagccgatgcccgagctgtcgcggctggattccatgggccgcctgcaggctggcgccaataccacgctggcggtggtggcctgtaacgcccggctgagcaccgccgagtgcaagcgcctggcgatcatggcccaggacggcattgcccgcgcggtgcgcccggcccacctgccattcgatggcgacagcctgttcgccatggcctccggcgaacgcgagctggtggacggccagcggcgccaggtcgagctgtcgcggatcggctcggcggcggccgactgcgtggcgcgggccatcgcacgtggcgtctacctggcaggagcgacgcgcgccctgtag

SEQ ID NO: 347008 - DNA, 2439 bp, Pseudomonas aeruginosa
atgaaaccagtcatccgtgcccggagcgcctacgccgcccgcacgctgtacagccacagtctcctgttcctcgccatcgcccaggccgtgccggcgcttgccgccgaagccgccgccgggcccggcgccgataatcgcctgggcaccgtggtggtggtcggcaaccggggccaggcgcgtaccctcgccgacagcccgtcgccggtcgatgtgatttccagctcgcaactggaggccaccggccagggcgacctgacccgcgcgttgagccgcgtgctgccttcgttgaacctgccggcctcttccggcttcggctccacctcggtggtgcggccgatcagcctgcgcggtctcaatggcgaccaggtgctggtgctggtgaatggcaagcgccggcacaacagcgccctgctcaacaacggtacctacctgaactccggctcgcagccggtggacctcgatatgattcccaccgctctggtggaccatgtcgaggtattgcgcgacggcgcttcggcgcagtacggctccgacgccatcggcggggtgatcaacgtggtcctcaagcagaccgaccacggcggccggctgtccaccacctacggacagaactacgagaatggcgacggcgagaccgcccgccagagcggcaacatcggcttcgaactgcccaaccagggcttcgtcaacctggcgctggactacaagcaccagaacctctccgaccgctccgacaacgcgccctacaccgactccgccggcaataccagcctgcagcacacctactacggcaccggtctacccaaggtggagaacttcagcctcggctacaacgccgagctgccggtgaacgacgcgctgaccctgtactccttctccacgtacaccaaccgcgaatcctccaagcccctggcgttccaccagccggccagcttcgatggcatcccgacaccctaccccgagggcatcgaggacaacctgcggttcatcgagaacgacttccaggccgcgttcggcggcaagggccaggcggcaggctgggactacgacctgtccaccacctacggccaggaccacgcccgcgcgaccctgaccgacacctacaacctcagctatggcgcggcctcgccgaccaacgtcgacaccggcgtgaagaccttcagccaatggaccaccaatctagacctgacccgcgccttcgacctcggcctgtcccatcccacgcaggtttcctgggggcttgagcatcgctacgagaactacaagatcggcaagggcgagtacgcctcctatggctatggcgactacacccacggggccagcggcgcgctgatccctccgggaaccatctccggcgccggcaccactccggccgatgccgccaggagaggtcgcaccagctacgccggctacggcgagatcggccaggacctcaccgacaagtggcacgtcgatctcgccggccgctacgagcactacaacgacggttccggcgtgaccaccaacggcaagttctccagccgctaccagctgaccccgatcctggccctgcgcggtaccgccagcaccggcttccgcgcgccgtcgctggcccagcagatctacagctcgacctcgcagagcagcgtcaacggcaacctgctggactaccgcaacgtggcggtggactccgacgtcgccacggcgctgggtgcctcgaccttgaaaccggaaaagtcgaccaactacagcatcggcctgaccctgcagccgaccccggccagcagcgtcaccatcgacgcctaccagatcaagatccgcgaccgtatcgcccagaccggctacctcggcggcaccgacgcgatccgcgcgatccttgccggcgcggggctcaaccccaaccagtacgtcacctacttcaccaacgcgctggataccaccacccgcggcgtcgatatcgtcggcgactaccgccaggacctcggcgcctacggcagcatccgctacaacgccggcttcaactggaataccacggagatcgacaagatccacgcctcttcggtggctcgtgccgcgctcggtcccgacggcggctacgaccgccagcgccagggcaacctcaggcatggccagcccgagtcgcgcctgctgctcggcgccgactggagcatcggccagttcgaggtcagcctgaacctgacccgctacggcgagtacacccagtacggtaccgacgaggcctacgatcgcaccttcgatccgcaatggatcaccgacctcaacgtcgactaccacctgacgcgcaacctgacccttaccgccggggccaacaacctgttcaacgtctaccccgagcgcacccacctgccgagcagctccggcgcgttcccgtacggcaacttctcaccttacggcaccaccggcggctactggtacacgggcctggcctacaacttctga

SEQ ID NO: 347009 - DNA, 1335 bp, Pseudomonas aeruginosa
atgacccgccgtaccgaccagctcaagctcggcgccttcctcgccaacagtggccaccacgtcgccgcctggcgccatcccagggcccaggcggatgccagcctggacttcgactacttcaagcgcgtcgcacagactgccgagcgtggccgcttcgacgccctcttcgtcgccgacgtggtcgccctctggggccatcacctcgacgccctgagccgcaccgcgcgcggcgagcacttcgagccgctgaccctgatggccgcgctggccgccgtcaccagccgcatcggcctgatcgccaccgccaccacaagctacaacgagccctaccacatcgcccgcaagttcgcctcgctggactacctgtccaaggggcgcgccgcctggaacctggtgacctcggtggtttccgacgaagcctggaacttcggccgcgaggcgcacatcgaccatgccgaacgctaccgccgcgccgaggagttccatgacgtggtcaagggcctgtgggacagctgggaagacgacgctttccttcgcgacaaggcaagcggccgctatttcgacccggccaagctgcacgtcctcgaccacaagggagagttcttctcggtgcgcggaccgctcaacgtggcacgcccaccccaggggcacccggtgctggtccaggccggtgcttcggaggcgggcaaggcgctggcggcacgggtagccgaggtgatcttcgccatggccgagagcatcccctccgcccagaccttctatgccgacgtcaagcagcgcgccgccgcgctgggccgcgatccggacgggatcaaaatcctgccaggcatcacgcccttcgtcggtcgtacccgggacgaggcgcaggcgctgttcgacgagtttcaggaactggtcgacccggtgctgggcctgcgcctgctggccgataccctcggcgaggacatcgacctctccacctacgacctcgacggaccgttgccggaaacgccggtcggacagcgcggcagccgccgcgacaaagtgctggagctggcgcgcaacgagggcctgacgatccgccagttgtacctgcggctggccggtggcaacccggtgatcggcaccgccgaggacatcgccgagaccttcgacgcctggttccaggcccgcgcctgcgacggtttcaacgtgttcttcccgtacctgcccggcggcatcgaggtattcgtcgacgaagtggtgccgctgctacaggagcgcggcctgctgcgccgcgaatacgagggcgcgaccctgcgcgagaacctcggtctggcgcgtccggccaatcgcttcgccgggagcgccgcatga

SEQ ID NO: 347010 - DNA, 945 bp, Pseudomonas aeruginosa
atgagatcgccgctgccgctcctggcgctgggctgcgcgctcgcccagccagccttcgccctgaacatcctgctcagcaacgacgacggctaccgccatccgaacatccgcgcgctgtacgccgcgctcaaggccgacggccacaacgtgcgcatcgccgcaccgtacagcgaccagagcgcccgcggcggagccttcttcttcggccgcgagacacgggtaggccgcgacgacgacccggcctacccggacagctactacctcaccactaccgaaaccggtatctgcgagagcgcggactgcgccgggcgcaaggtgggcatccggatcagcgcgacgccggtaatggcggttctgctcgggctggacaagatcctgccgaaccctgacctggtgatagtcggacccaatccaggcaacaacctcggcgccctgaacagcgcatccggcaccttcaacgccgccagcgtagcgctgctttccggcgtgcccgcgctggcggtcagcgtcgatctcgaggagcgcgacagccagcgcgtagcggccatcgtcgcccgcctggtagcagccctcgccaggcagcgccaggcgggcggcgcgctgctacccaggggcgtcggcctcaatctcaacctgccgccactggaaaagctccagggcgcacggctgacccgcatcggcagctatgtcccattccacgctcgctacagcgatgacctcggaccattcgatgcgaagctggccggcaagccgggcatcggcttcgcctggtcgccgccgccgggtccgggcaacgccgaggacgaagccgtgtgggtggccaggggctacctcaccctcagtcctttcaatgccctgcccggcacgccggacggcagcgaaggcctcgccgccatgctgaccccgctgctcggccagcacgcagccaaggagacaacgccatga

SEQ ID NO: 347011 - DNA, 1020 bp, Pseudomonas aeruginosa
atgagccgccggacctttcgcctgggcttcctgaatcgcgtctacgcgccgcaatacgaaccgcgtctgtaccagcagaccgtcgaactgttcgaggccgccgaggatctcggctacgacagcggttggctcgcccagcaccatttcgccagcgagaatggccgcctgccctcgccgttgctcctgctcggcgccgcagccgagcgcacccggcacatccagttgggtaccgggatcgtcgtgcttaatcaggagcagcccctgcgcctggccgaagatgccgccgtcctcgacctgctcagcgaaggccgcctgcaactcggcctgggcgccggtttcgaccccgacagcttcgccgccttcggccagcgcctggacaaccgccacgcccaatacgaccaacgcctggaacgcctgcgccaggcgctcgccggcgcgccgctgaacgccgagggccgcgtattgcggcccgcggcgaacggcctggcccatcggctgtgggaagccacctcgcgggtcgagcaggtcgcggcgcgcggcaatggcctgattctcgcccccgacccgcgcgccgacgccgagccgcgcggccaggtcatcgagcgctacagagcggcctggaatcccgctcatccaagcgcaccgcgtgtcgccctggtgcgagcggtgtttcctggcagcgacgcgagtgcccgcgattcgagcctgcgccgggacatcctcgcctacgtcgaacgccagcggcgcatcggcatcggccacgccgaccctgcacaaggcttcgaagccgtgctcgacgctctcggcgtgctgcatggcgatccggtgaagatcgccgaacagttgcgccaggatgcgccactgggcgccgacgaccatttgatcgtccaggtgcagaccacctccaccggcttcaccgaggccctgcgccacctggaaacgctggctcgcgatatcgccccggcgctgggctggcaagcgcgccagcgacgtccccttacccaggagatcccggcatga

SEQ ID NO: 347012 - DNA, 1035 bp, Pseudomonas aeruginosa
atgagcactccccccttcacgtctgcgcggaccttcaagctcggcttcctcagccacgccttcggcagcgacccgcggcaggtctatcgcgacctgcaggaacagttcgaagtcgccgaggccctcggcttcgacggcggctggatcgcccagcaccacctgagcggcggtttcggccagttgccttcgccattgctgttgttcgccgccatcgccgcgcgcacccgacgcatcgagctgggcactgcggtgataacactgccgctggaggacgccctgcgcctggccgaagacgccgcggtgctcgacgcgctgagcggcgggcgcctgcaactagggctgggcagcggcggcgccaacctggagatattcaatgccttcggccgcgaggccgggaaccgtcaggtcgacttccagcgggcacagcgtacgctacaggacgccctgctcggcgcgcccttgcccggcaccgctcggctgcgcctgcatccgccggcggcagggctgcgtgaaaggctctggcactcccacggcagcacggcgggcgccatccatgcagccggacagggcaacggcctgctgctgggcaccgccacccacgatccgctgacggtgcagaagccgctggccgaggcttacctcggcgcctggcaggacgcgacgcggcgaccacgcataggcgtggtgcgcgcggtatttcccgccgaggacaaggtgcgcgcacgcgccgaactggcggcggacatcgagttgcatgtcccgcgcctgatccgcgaaggcctgatcgaccaagccgccgacctggaaagccacctgcgcctgctcaacgtccaccacggcgatcccgcggaagtcgttgccagcctacgcggcgatccatcgctgttgccctatgccgactacttcatcgccgtggtgcagtcggaaagctcgacccagacccaggtgctgcgccgcctggaaagcctcgcgcgggacgtcgccccggcgctgggctgggcaccggccggcgagcgcctggcggtcgccggatga

SEQ ID NO: 347013 - DNA, 876 bp, Pseudomonas aeruginosa
atggtcgccgcggcgctctgcgcgcatacccgccggctcggcctgagcctgagcctggctgccgaagccatgctcccggcggcgctcgccgcgaccttgcaaagcctgcagtcgctatccgccggacgagttcgcctgcatctcccggacagcgatcgcggcagcctgcgccgggccttcggcgaagtgctcaaccgcgaccagcggcacgaacgaatcgacgagttcctcgatatcctgcagcgactgttgcaagccccggctaccccgctggaccaccaggggcgctacttccacctggaaaacgccggtctcggtctgcgcgacctgccgcccacgcccctgctgctggacgaaaccctgggcacgcaacgcctcgccagccgcgcggacctgtgcttgatggatggcggcagcgtcgcccagctggctgccagcatcgcccggctgaacgaggcggcccgagggctcggacgctcacttggacacgtcgccagcttcggcgtcatcgcccgcgacagcgaagagcaggcctgggacgacgccgcgcggcaggcccgagccctcgccgtggcgaccggcgacaagcgccgccggaacccggcggtggccgagctgctggccggacgcgccgggcaccccgcccgccgggacgagatccatccgaatatctggcgccccattcccggcgaacccgccgtgctggtaggcagctatgcccaggtcgcgggacgcctgcgcgagttgcacgccgccggcgtggaccaggtcatcctgcatgcgcccggtgccgtgcgcgaggtcctgcgctttggcgagcgggtcctgccactgctccgtgcttccgccggaaaggacgcttcccttggccattga

SEQ ID NO: 347014 - DNA, 1140 bp, Pseudomonas aeruginosa
ttggccattgaacgcaaacgccaatccatcgagatcgactggttcctgcccaccaacggcgacggccaccacctgaccagtagcggcctgccgaaggtcgggctgttccagcagggcgagcgcgcgccgaccctcgactacctgcgacaggtggtgcgggccgccgagcaggcggccttcgatggcatcatggtgcctaccgccagcggcttcgaagacccctggctgatcgttgcgctgatggtccaggaggtccgccggttgcaattcatcctgaccctgcgtcccggcgtcgaactgccggcctacagcgcgtacaaggccgcgaccctgcaacaactgagcgacaaccgcctggcgctgcacctggtcagcggctccagccgcttcgagcaacgcgcccttggcgacttcctcgaacacgacgaacgctatgcccgcagcgccgaattcctcgacgtgttccgcgccacctgggccggccgcgagcaccacggccggcactaccgcactggcagtcccgcgccgatcgccgacgaagcgatgctgccgccgatctgcttcggcggcgcttccgcggtggccgaacgcatcgcagccagccatgcgcaaacctacctgatgtggggcgaaccgccggcgatgatccacgagcgcatccagcgcatgcgcgaactggccgcggccgctggccgcgaactgcgcttcgggctgcgcctgcacgttttcgccgccgccgactcgcgtcaggcctggcgccatgtcgggcgactgctggaagagattccccgcgatgcgatcgagcgcgcgcaacgccaactggcggcctacgagtcggtcgggcagtcgcggcagatcagcctgacccaggggcgcgcgcagggtctgcgcgacctggaagtctcgccgaatctctgggccggtgtcggcctggtgcgcggcggcgcgggtacggcactggtgggcagctacgcggaggtcgccgaacgcatcgaggagtatcgccagttgggcgtggacagcttcatcctgtccggctacccgcatctggaagaagccatacacctgggcgaggagctgttgccgttgctgcgtcgcgaagcggccggggccggcgcacgcaagcggcgccgcgactga

SEQ ID NO: 347015 - DNA, 1077 bp, Pseudomonas aeruginosa
atgagtcaatccccctggggcgcaacgcccgtcctgacgctgccgcagggcgagaagcagcctctttccatccgcgccaaggcactggtattcgccgatccgcgttcgcgccagttgctggagttcctcgaccgggtcggcccgagcgaagtgccggtgctggtcaacggcgaaaccggcaccggcaaggagctggtggcgcgatacatccatgccgccagcggtcgcaagggcgccttcgtcgcggtcaattgcggcgcgatcaacgagaatcttgccgagagcgaactgttcggccatgaggcaggtgccttctccggcgccaccggccgccgcgccggctggttcgaggaggccgacggcggcaccctgttcctcgacgagatcggcgacctgccgatgccgctgcaagtcaagctgctgcgtgcgttgcaggagcaggagatcgtccgtgtcggctcgcgcaagccgatcaaggtcgatatccgcctggtcaccgccaccaacgtcgacctggagcaggcggtggacgccggcaacttccgcctcgacctgttctaccggatcaacgtcgcccaggcccgcgtgctgccgctgcgcgagcgtccgctggacatcatgccgttggtggagcacttccggcggatctatgcgcagcgcctgaagatcgccgaaccgatgttctcggaagccgcggtcggcgccctgctggactacgcctggccgggcaacatccgcgaactggagaacgtggtgcacctggcgttgctggtggcgggcgagaacgtggtgcgtcccgggcacctgaagttctccgccgcgctgtccggcccgcgcggcgctgcgggtggggcggcgggattgccgcaggaaatcatccgcgaacagttgcagcggctgttcgaggtgccgggggacagcctgctgcacgacctcgaagacctgatcgtgcgcgagtccttcgcccactgcggcttcaaccagctgcgcagtgcggcgttgctgggcatcagtcgcaacgccatgcgcacgttgctggtcaaccacggcctgctcaagggccgcgccaaggcctga

SEQ ID NO: 347016 - DNA, 645 bp, Pseudomonas aeruginosa
atgttcgatttttttagaaaagagcgcgactatatatttatctctcgcttcgaaaaaacctccaatgactggaagcttaaatcctctacaattttcaagtcaaaaaaagacacaaaaagtttcaccataatcatcgatagcaaaaaaataaatatcaaatgtgctgtttctggaaaagatatcgtcattaccacattgcacaatggacttgatataaccgtaaaggaagaaaatattgccactctccttgcaaccaagccccatgacagtatcgcatatcacgccatcaacaatctatgcaagtcccatgcaacttcgtcagctagctcattgtttatttccggctgcgcggtgaacaacttcgaagaaggtaaagtatatcccggatacaaattaaaattaaaactattaagtcgagtcccctttgccaatccgcatgtctcgggactagaaagagaatatttcctagtcggttccgtatccgacagtgactgcgacgaaatagaatatcttggccaaacacttggcaaggtggatgaaaaaatttcacaaaacataaaaccgctatggaaagcaaaggctgaggctgccaaagttactgaactagcccccatatcacagcaggaaccagggacagtgaattaa

SEQ ID NO: 347017 - DNA, 1320 bp, Pseudomonas aeruginosa
atgcatgcccctcagtcttcggattcaaatcacacggaaatcgaccttgcccaactgttcgagcaatgctgggcatccaggcggtcgatcgcactcatcaccgccctgggcaccggcgcggccctggcctatgccctgctggcgataccgatctatcaggtggacgtcctgctacgccccgtccagaccagggcactggaagccttaaacatcaaaggtctctacagcatcacgcccaagcaggcgctcgatcgagtgagcaatgaactgacggcgtattcgggtaggcggacctatttcgaagcacacccggagcagttcgaacaactggaattcggcgagctttcccccgaacgtgccttctggcgcttcagcctggatgctttctccatcgagttcgcggacaagaaggaaaagacgcctcgaaccgaagcactcgtccgcttctccatgcaatatcccaaaggaatggatggcgtagcgattctcaacggcctgctcagcgccacgctggagcgtgagcaccgacagatccaggaggacgtgcaagcgcgcatcgacaatcgcctgcagattctggagcgcgacatcgcggcgatgcaggcgagctacgccacggccaagcggagcaggatcgccaccttgatggaggcagacgcgatccgccgggcgaacctgcaagatgaactgaaagcgctgcgtggacgactcaggctggtgcgcgactcgcgcatccagcagctcgatgaagccatcggcatcgccagccaactgggcatcaggaaaccaaccacgccaggcgtgctcggcgaagatggacgggacagttcccgcagcctgttccgcacggaggtgaacaaccagcagattccgctctacttcatgggcgtcgatgccctgaaggccgagcggggcatcctgctcaggcgcaagacggatgacttcacttcgcccaggatcgcggtgatccagcaggagctgaaacagctggaacacaatcgcgagatccagtacctgcaagcgcgcgaggacgaagaacgattctatgaaaacctggccgccttgcgtggcgagcaagctcgcctgctgcgcctgaacatcggcgaaacgaacatacagctggtgcgagtcgaccaggaagccgcgacgcccttgaagccggtcaggcccaaacgagcgctgctcgtcgctctaggggtgctcggcggtgtgctgctggggagcttgctggtattgctccgggaactgccgcgccgacaccggggtgaaccgcgaatcagttgcccggcgcggatagcgtcttgcccgccaggcaactga

SEQ ID NO: 347018 - DNA, 996 bp, Pseudomonas aeruginosa
atgaacgccaggaagcccgcctaccggcgcgatatccaggtcgatgcgttcgacctgcccgccgcccgcgaatggatgtcggccatctgcggtccgcatcgcctgcaggccgcccaagcggacgcggtgcgcttccgctatcgcggcagcgtgctcaaggggctgtcgaccatccttgggcgtatcgaatacggcaccgaggtgagcatcgacatttccgatgccgaacgcttcgacagctatagcctgagcctgccgctggcgggcgagcaggaactcgtcgtggatgggcgtcgggtgcattcgatgccagggcggggggttatcgtcgagccgaaccgcagccagcggctgcgcatgtcgggcgattgtcgcaagctgcaggtgatcgttccgcggtggtccatgcagcgggtcctggaggacctgctgcagggaccgctggagcggccactggctttcgatgcgtcgatggacgccaacgacggcgccacggctgcctggtggaggatgatcgactacctggaccgggaaatggagctgagcgggctgtatgcccaggggctgttcaaccgcgatctggagcgggccttgctcaaggggctgatcctcgcccagccgaacaactacagcgaagccctgcgtcgccagccgggccggcggataccgcactacctgctgcgggcccgcgacttcattcatgtgcatgcgcgcgaagtgctgtgcctggaggacctccagcgagtcgccggagtctcgcggctgaagttgttcgaaggtttccgccggtatttcggctgcgcgcccatgacctacctgaagcactatcggctccagggcgtgcgcgaggaaatcctggctggagcggggccgcgaagtatttccgctatcgccatgggttgggggttcgtgcatctgggacgttttgccggcgagtaccacaagctgttcggcgagcttcccagcgtgaccctgtcgggcctgcgccgcccctag

SEQ ID NO: 347019 - DNA, 1338 bp, Pseudomonas aeruginosa
atgactcgccagaccctgcgcgtcaccgatgtcatcgacgccagtccgttatccgccctgcaggtgcgcgttctgctgttgtgcttcctggtcgtgctgctcgacggtttcgacatggccgtcatcggctacgtggcgccggaactgcttcgcgactggaatatcgagcgcggccaactggtcccggtgttcgccgctggcctgttcggcatgttgctgggcaacctcgccctcgggccgctcgccgatcgccacgggcgcaagagggtattgctgctcagtctgacgatcatcgccattggcaccctggcttgcgccttcgccggttcgccgacctggctggcgatgttgcgtttccttactggcatcggcatcggaggggttctgccgaacagcatcacgttgtgttcggagtactcgccggcgcgtcggcggacgctgttggtcatgctgagcaattccggtttcaccctcggcctggccatgggcggctggctcgccgccgcgttgctgccgtcgatcggctggcagggtttgctgttgctgggcggcttggcgccgttgctgttgttgccggttctggccctgggactgccggaatccatatccttcatggcggaccgagcggcctatgccgacaggctgcgcgcggtgctcgggcagatcggcggacgccgcgcctggcatgcggtacgcctggtcggcgacggtgcaacgcggggggcgtcttcgccggcttcgatcctgttccgcgatggacacgggctgcgcactctgatgctctggctgagcttcttttgctgcctgctggtcttctacctcctggccaactggttgccgacgctgctgcacgagcatggctacgagcgggcgcagatcgcgaacatcgccgcgatggtgccgttcggcggagtgctcggtggagtctccatggctctgctgatagaccgcatgggtgcggcaaaggtacttccgcccctgtgcctgctggccgccgtcgcactggcgctggccggcgcgacgctggagcagggaagggcgttgccggccatggcgctggtcttcctggtcggctttaccctgaccggcacgttgaacaacctcggtatcctggcggcgacgctctatccgagccaggcccgggcaaccggcgtcagctgggcgctgggagcggggcgggttggctcgatcatcggctcgctgtcgggtgcctggctgctcgcggcggcgggagggttgcaagcgctgttccagtgcatcgcgctgccggtcctgtgctccgcgctggcgctgctgctgatgggcgggcgtcgacccttgtcgccgctgccgtggtga

SEQ ID NO: 347020 - DNA, 1164 bp, Pseudomonas aeruginosa
atgagccacgacctcagccaactgcgtaaattcgtctcgcccgagatcatcttcggcgccggctgccggcacagcgtcgccaactacgtgaagaccttcggtgcgcgcaaggtcctgctggtctccgaccccggcgtgctcgccgccggctgggttaccgacatccaggcaagcctggaggggcagggcatcgactattgcctgtataccgacgtttcgcccaacccccgggtcgacgaggtgatgctcggcgccgagttctatcgcagcgagggctgcaacgtgatcgtcgcggtgggcggcggcagcccgatggattgcgccaagggcatcggcatcgtcgccgcccatggccgcagcatcctcgagttcgaaggcgtcgaccggctgcgggtgccgagtccgccgctgatcctgatcccgaccaccgccgggacttcggcggacgtctcgcagttcgtgatcatttccaaccaggacgagcgcatgaagttctccgtggtgagcaaggcagttgtgcccgacgtctcgctgatcgacccggaaaccacgttgaccatggatcccttcctttccgcctgtaccggcatcgatgcgctggtacacgccatcgaggcgttcgtctccaccggccacgggccgctgaccgatccccacgcgctggaagcgatgcgcctgatcgatggcaacctggtacagatgatcgccaatcccggcgacatcgccctgcgcgagaagatcatgctcgggagcatgcaggccgggctggccttttccaacgccatcctcggcgcggtgcatgccatgtcgcacagcctcggcggctatctcgacctgccccacggcctgtgcaacgcggcgctggtcgagcacgtggtggcgttcaactacagcgccgcgccggaacgcttcaaggtgatcgccgagaccttcggcatcgattgccgcggcctgacccaggggcaggtccgccagcgcctggtggaccacctgatcgccttcaagcacgccgtgggtttccacgagagcctcgccctgcacggggtcggcagctccgacattcctttcctctcgcgccacgcgatgcaggacccgtgcatccttaccaacccgcgcgagtcgagccagcgcgatgtcgaggtggtctatggcgaggccctctga

SEQ ID NO: 347021 - DNA, 231 bp, Pseudomonas aeruginosa
atgaaagtactcaacgacctggaaatgaactgcatcggcggcgcggatatccacggcaccccgatccccgggattcccggcgccaccctccgctccctgccggcgcccgcggaaatcgacctgtcgaaggctccgccggtatcgagtgcaatagctggccccaaatggccgcactgccgcccggtggtggtcccgccgatcgggttcctgccggaggaatggaagcgctaa

SEQ ID NO: 347022 - DNA, 165 bp, Pseudomonas aeruginosa
atgcgtgaactgacgctcaacgaaatcgatgcagtatcgggagccatttctctgtcggaatccatctcaggcagcgtcttgggtgcaattggcgatagctgggtcggtgccaacgcgggtggctggatcgtcggcggaatctccgcgggcgtcgacatgctctaa

SEQ ID NO: 347023 - DNA, 417 bp, Pseudomonas aeruginosa
atggctaaggcccatgcatccattgatcttcgtaacgacgccgagcaggtctggcggctgatcggcggtttcgacgcgctaccggactggctgccgttcattccgcagagcgtgctcagcgaaggcggccgggtccgcacgctgcagagcgtcgagggcggcaccatcgtcgagcgcctgctcgacttcagcgaggccgggcgcagctacacctacaccatcctccagggcccggccccggtgcgtgactaccaggcgaccctgcgcgtcctgccgctcgccgacggccagggttcgcgggtggaatggttcggctccttcgtacccgtgggcatcagcgacgaggaagcttcgacgctgttccgcaccatctacgaagatggcctggcggcgctgaagcagagcctcgcgaactga

SEQ ID NO: 347024 - DNA, 1011 bp, Pseudomonas aeruginosa
atgaacctcaagtccctgattcctttccgcctcggcttcggcagcgcgccgctgggcaacatgttccgcgcggtttccgaagaggaagtccaggccaccgtcgacgctgcctggaacaacggtgtgcgttacttcgacagcgccccgttctacggcgccggtctttccgaaacccgcctcggcgccgccctggcctcccgtccgcgtgaccagtacgtgctcagcaccaaggtcgggcggatcatcctcgatgaactggaagaccccaccagccgcgagttgggcgagaagagcgggctgttcgaacacggcaaccgcaaccgcatcgtcaacgactacagcgccgatgccaccctccgctccatcgaggacagtctgcgccgcctgggcaccgaccgcctggacatcgtctggatccacgacattgcccaggacttctacggcgacgaatggctggagcgcttcgaaagcgcgcgcaagggcgccttccgcgtcctcgcccggctgcgcgaagagggcgtgatcaaggcctggggcctgggcgtcaaccgtgtcgagccgatcgagctgacactcgacctggacgagccgcaacccgacggctttctcctcgccggccgctattcgctgctcgaccatgagcgtgccctgcagcgggtcatgccgcaggccgtggaacagggcgtcggtatcgtcgtcggcggtccctacagctccggcgtcaccgccggtggcgagcatttcgagtaccagaaggctggcaagccggtgctggaaaagctcgagcggattcgcgcgatcgcccgtaaccacggggtggatgtcaaggctgccgccttgcagttcgccctggcccacccggcggtggtcgcggcgattcccggttccacccgaccgcaacatgccaacgaggactatgcggccctgagtgcggtgattcccgcggcgttctggagcgacctccgcgagcagcggctgatcagcgccgtggcgccggttccggccgcctga

SEQ ID NO: 347025 - DNA, 897 bp, Pseudomonas aeruginosa
atgctggatctccgacaacttcgttatttcgtcgccgtggccgaggtcgagcacgtcggccgcgccgccgagcaactgcacatctcccagtcgccgctgagccggcagatcgcccaactggaagagcgtctcggcctgcaactgttcgagcgcagccagcagcgcctgcgcctgacttccgacgggcggaccttcctccacgaagccaaggccctgctcaagcacgccgaacgcctggagtcgctgggacggcgcctggggcgcggcgaggagggcgggctgtgcatcggctacgtcagccacgcggtgcatgccggggtcctcccggacgccttgcgccaggtacgcgaggagcgccccggcatccatatcgcgctgtacaacctgagcagccaggagcagttcgaggggctgcgccagcgcagcctggacatcgccctggtctgcgaggcgccggccgccgccgaccccgacctgctcgccaccccggtgttctgcgacccgctgcatctggcgctgccggccacccatccgttggcacacaagagcgaaatcgtgccggcggacctgcacgagcaggactggatcatggtcgagggccagttgctggcgcagcgccgcgaacgcttcctggccgactgcgtggccgccggattcaccccgcagatccgcctggaggccgccgagccgctgagcgccctggggctggtctccgccgggctggggatggcgctgatccagcgcagcatcggtggcgagggcaatccgaacgtggtactgcgtgaattgccctggctgaatcagagcaccgcgctgtgggcggcctggcaccgggtagacctgcgaccgatcgtcggcgagttccgcgagatggtgctggcccgcgccgcgaattga

SEQ ID NO: 347026 - DNA, 792 bp, Pseudomonas aeruginosa
atgcatatcgacctgggcggcaagaccgccatcgtcagcggctccaccggcggcatcggcctgggcatcgcccgcagcctggccgcttccggcgccgaagtggtcatcgtcgggcgcagcccggccccggtggaggcggccgtggccggtatccgcgccagcggcggcaaggcccgcggcatcgtcgccgacctcggcacggccgccggcgccgaggcgctgttcgccgccgaaccgtccaccgacatcctggtgaacaacctgggcatctacaacgacgtcgacttcttcgacaccgacgaccagcaatggctggagttctatgaaatcaacgtgctctccggagtacgcctggcccgccgctacgcccccggcatggtcgagcgcggctggggccgggtgatcttcctgtcctccgagtcgggcatcgccattcccgcgcggatgatcaactacggcgtcaccaagagcgccaacctcgccgtttcccacggcctggccaagcgcctggcaggcaccggggtgacggtcaacgcgatccttcccggcccgaccctcaccgaaggcgtggccaccctggtcgccgaagccatgcgcgaatccggccgcagcgcccgggaagaggccgacgccttcgtccgccgcgagcgtcccagttcgatcatccagcgggtggccgaggtcgacgaagtcgccgcgctggtcacctacgtggcctcgcccttctcctcggcaaccaccggcgccgccctgcgcgtggatggcggcgtggtcgacagcatggcgatctga

SEQ ID NO: 347027 - DNA, 786 bp, Pseudomonas aeruginosa
atggacctgggtatcaaaggccggtgggccatcgtttgtgccgccagccaggggctgggcaggggctgcgccgaggccctggctggcgagggcgtcaacctggtgatcaacgcccgtaccgccaccaccctggagcagaccgccgccgagctgcgcagccgtttcccggccagcgaagtgcgtacggtcgtgggcgatgtgaccgaccccgcgctacgccaggccctgctggccgcgtgcccgcaggtcgatatcctcgtcaacaacgcaggcggcccgcccccgggcgacttccgcgactgggaccgggaagactggatcaaggccctggacgccaacatgctcacgcccatcgagctgatcaaggcggtggtcgatggcatggccgagcgtggcttcgggcgggtggttaacatcacctcgggcgcggtgaaagcgccgatcgatattctgggcctgtccaatggcgcgcgcagcggcctgaccggtttcgtagccgggcttgcccgccagcagcgcctggccgggcgtgacgtgaccttgaacaacctgctgccgggcgccttcgacaccgcgcgtctgcagaggactctgcaggcggcgagccgggctggcggcgacctgcaggcgatcactcaggcgcgccgccaggcgattcctgcggcgcgcttcggcaaggccgaagagttcggggcgtactgcgcgttcttgtgcagcacccatggcggctacatcaccgggcaaaacctgctgatcgacggcggagcctacccgggcaccttctga

SEQ ID NO: 347028 - DNA, 315 bp, Pseudomonas aeruginosa
atggcctccaacccgggcagcatcctggactacgaaggctacgatcgcctggtcaacccaccgctgccgatcttcgccatcccgacaaccgtcggcactggcagcgagtgcaccgcctcgacggtgttcaccaacaagcagacgctgttcaagaccgtcatcgtcagcccgaaactgttcccgcgcctggcgatcctggaccctgcgctgagcctgggcctgccggatgcgctgttgcccgatgcgctcgagaatgccaacccgttgggcatcaatcgcctggtggatggggtgttcagtcgggaagcgttgtaa

SEQ ID NO: 347029 - DNA, 1182 bp, Pseudomonas aeruginosa
atgaaatcctcccgagtcctgctcgccctggccatcggcgccttcggcatcggtaccaccgagttcaccccgatgggcttgctgccggtgatcgccgacggcgtcggggtcggcattcccagtgcgggcatgctggtcaccgcctatgccgtcggggtgatgctcggcgcgccgctgatgaccctgctgttcagccgcttcggcaagcgtgccgcgctgatcgcgttgatggccatcttcaccgtcggcaacctgctttcggcgctggcgccggactacggcacgctgctcgcttcgcgcctggtcaccagcctcaaccacggcgcgttcttcggtctcggcgcagtggtcgcggcaagcgtggtgccgcgggacaagcaggccagcgcggtggcgaccatgttcatgggcctgaccatcgccaacatcggcggcgtgccggcggccacctggatcggccagcaggtcggctggcgcatggctttcgccggcaccgccgggctcggcctggtcgccatggccgcgctctggtacgccctgcccaagggcgagcgcggcagcgtgccgcacgtccgccgcgagctggcggtgatcgcccggccgagcgtgctgctggcgatggccaccacggtgctcggcgccggggcgatgtttaccctctatacctacgtggccccggtactggccgaactgaccggcgcttcggagcgcttcgtcaccctggggctggtgctgatcggcgtcggcttcaccctcggcaacagcctcggcggccgtctcgccgactggtcgctggacggcgcggcgcggatcttcctcgcggcgctggcgctgatcatgctgctgctgcccctggcactgggcagccacctcggcgcggcgctgggcctgctggtctggggcgtggcgaccttcgcggtggtgccgccgctgcagatgcgggtgatgcaagccgccgccgacgcgccggggctggcctcgtcgatcaacgtcggcgccttcaacctcggcaacgccctcggcgcggcgctcggcggcgcggtgatcggtgccggcctgggctacgtcgcggtgccgctggccggtgccgcgctggccgctctgggtctgctgctggtctggctggggcgtcccgccaaggcgagcgcgccgacgctgcaaggcgagtccggcgacgtctga

SEQ ID NO: 347030 - DNA, 366 bp, Pseudomonas aeruginosa
atgagccgtcccagccatgcaacgcggccggcattcgccggtcgcgcctttcgcgtcgactacgacgggctgtccgcgcacaacgtctattcggcggacggcgagcgcatccgctacgccatcgtcgccggtccctacgccggcgcccatggcgaggcggcctgccagtggcgggagatcgccgagggggtctacgcgatctcctggcaggaggccgacggtgccaccgtggtgcatgtcgacgatttcgccaacggcagttcccaggcgttcttcaccgccagcgacctgagcttccagcgtctgcacggcccgctggtggaaatcgatgcggccgcgcacggcgcgcaggagagtggcaaatga

SEQ ID NO: 347031 - DNA, 819 bp, Pseudomonas aeruginosa
atgtcttccaccatccaccccctcccatccttcggtctcggcaccttccgccttaccggccaggttgtcgtcgactcggtgcgcagcgccctcgaactgggctaccgcgccatcgataccgcgcagatctacggcaacgaggcggatatcggccgcgcgatcgccgagagcggcgtaccgcgttccgagctgttcctcaccaccaagatctgggtcgacaactacgccagcgacaagctggtcgccagcctccgcgagagcctggaaaagctccgcaccgactacgtcgacctgaccctgatccattggccggcacccggcaacggcgtcgagctggcggagtacatggcggcgctggcggaagccaagtccctgggcctgacccggcggatcggcgtctccaacttcaacatcgagctgacccgccaggccatcgccgtggtcggtgccggcgagatcgccaccaaccagatcgaactcagcccctacctgcagaacccggcgctgaccgccttcctcaaggagcagggcatcccggtcacctcctacatgaccctggcctacggcaaggtcctgaaggacccgctgctggccgagatcgccgccaggcaccaggccagcgtcgcccaggtcgcgctggcctgggccatgcaactgggctacgcggtgatcccgtcctcgacccgccgcgaaaacctggccagcaacctgctcgcccgcgacctgcgcctggacgccgaggacatggcgcgaatcgccggcctcgagcgcaacggccgtgaagtcagccccgagggcctggcgccggcctgggactga

SEQ ID NO: 347032 - DNA, 270 bp, Pseudomonas aeruginosa
atggacccggcccagcgggacccggggctcaaacatgaagcccgaccaggaaggcacctacctcgccacccggctgaaccccgccgaccgctgaaagtgatcctcggcggacgcctggcctggtacaaggccgacgccgataccgataccgatagctacaaggtcagcgagcggatcgacacgcggctgaacttcaacaacctgttcgacaagtactgtgacaacggcatcgacttcggcagctcaactacggcgggccgcgcaacctga

SEQ ID NO: 347033 - DNA, 279 bp, Pseudomonas aeruginosa
atgcctaacgctagtaatctcagcctctgcaccggccaagtagtcaagaacgtctatatcgacaagtccggctcttattgcacattcgtcgcgagccaggatgggagcgatcagagcaatacctatggtgtgaacctcgacagcaatgcgggtgacagcattaacaacgccctgctttccgcgctgaacaagggctatctggtggatttcaacaccagtgcgtctgccattggcggggcagtggaagtcattgacctcaaggtttatctgaaaaaatga

SEQ ID NO: 347034 - DNA, 1017 bp, Pseudomonas aeruginosa
atgaccgctctgatccgaaccacttcgctgatcggcttccccccgctggtgcgcgaactcggcggtgatcccgacgaactcctgcggctggtgcagatcgtgccctcgatgctcgacgacggatcggcggtgatcccttatcgcgggatgatcaatctgctggagttgtgcgcggagcgcctgcgctgtcccgacttcggcctgcgcctggcggaacgccagaacctgatgatcctcggcccgctggcggtggtggcgcagaatgccggcaacgtcggcgcggccctggccgaggtcatccgcttcctgcatacctatagtccgggcgtgcagctccacctggacacggaaacggatgccgcgcatccccatctggtcttcgagttgcgactgcacggggtgcgccgccagcgacagatcgtcgagctgtccctgggggtaatgcacaaggccctgcagatgctccacggccccgggttccgtccgctggcggtgctttcgcggctaccggcgcaactcccggagaaacgctaccagcgcctcttcggcacccgggtacacttcgaacagccgcataacgcgctggtcctgagccacgaacagttggccaagccgatcgaccggcacaatcgccagttgcacgacaccatgatggattacgtcagcagcctggaagcgaccacgccactggacatccgcactcaagtcgaggattcgatcaagcgcctgctgccgacccagcgctgcgccctgccgctgatcgccgagcggctcggcatgcacgagcgctcgctgcagcgccgtctcgccgagcaaggcgtggtcttcgaagccatgctcgagcggatccgtcgcgaactcgccgatctctatctggccgaggcgcgcatgcccatggcccaggtcgccggcctgctcggctataccgagcaaagctcgttcaaccgggcctgccggcgctggcatgggctggcgccacgcgaacggcgcaggcaactgcgcgacggcgacgcctga

SEQ ID NO: 347035 - DNA, 1080 bp, Pseudomonas aeruginosa
atgaaagcagtcgtcatgcgtgacaagcaattgcacctggagtcgatcgacgcaccggtacccgctcgcggcgaggtgctggtcaagagcctggcctgcggcatctgcggttcggacctgcacatgctccaccactgcgagcaggtgttggccaacttcaagcgcggcaacatcccggtggccttcgatccgcagcagggtgtggtattcggccacgaatactgcggcgagatcatcgaccatgggcccggcagcgacaggacgctcaaggttggcacccgggtctgctcgctgccgttcgtgatcactccacggagcttccatcacatcggctattcgaatcactatcccggcggctacggcgagcagatggtcctgccggagcagatgctggtggcggttcctggcgacctgccggcggatatcgcggcgctgaccgagccgctgaccgttgccgcccatgcggtgaaccgcgcgcgcctggatggcagcgaggcgccggtggtgatcggttgcggccccatcggcctggcgctgatcgcgacgctgaagtcgcgcggcatcggcccggtggtggccgccgacttttccccggcgcggcgcgcgctggccgagaagttcggcgccgacctggtggtcgatcccgccgcgcagtcgccctatgagtcctggttgcaaatggcggctcccgagggctacgacatcaacggcccgctggcgttgttcggcctcgggccgcaaccgcggccatgcgtggtgttcgagtgcgtcggcgtgccggggctgatccagcaggtgatccagaacgctccgccgcgctcgcgcctgatcgtggtcggggtctgcatggagaccgacaagatcgagccgttgatcgccatcggcaaggaaatgaacgtgcatttctccttcggttataccgcggaagagttcgtgcagaccttgtacgccctggtcgacggccgcctggatggcgcgccgatgattaccggacgcgtggcccaggaggcggtcggcgaggcgttcgcctccctgggggcgagcgaccgccatgcgaagatcgtcattacctacgattga

SEQ ID NO: 347036 - DNA, 1023 bp, Pseudomonas aeruginosa
atgagtgatcccggcatgcccgtcggcgcccagggccagcggccggcggcgccccgttcggtcttcatcaccggcgccggcggcttcatcggccaggcgctgctcgagcgctacagggcggccggcgcggaggtgcgcggcatggacctgcgcgccgacctggccaacggcatcgtcgcgggcgacctggcccggcccggccaatgggcggagcacgcccgcggttgcgagctgttcatcaacactgccgcggtggtgtcgctggcggcgccctgggagcagtatcgacggatttcggtggatggcgtgcgccattgtctggatgtcgcgatcgacgccggcgcgaggcgcttcgtgcagttttcctcgatcgccgcgctgggctggcgctatccgcagcaggccgacgagcgctgtgcggtggtgatcggcgaacgctaccgctacggggtggccaagggggccagcgagcatctggtgctggcggcccacgcggcgggcgagatcgactgcaccatcgtgcgtcccggagacgtctacggtcccggttcgcgcgcctggctcagcgaaccgttgaagatggcccgggccggcatgctgctgcttccttcgggcggccgggggcgctggaccccggtctacatcgacgatctgctcgacggtgtgctgctggccgccggattgccgcaagccagcgggcagatatttcacctcagcgcgaacgagtctgtgagctgccgcgagttcttcggccaccactggcgctgggccggccgccgcggttcgccgcgctccttgccgctgggcctggcggtcgcgttgacgcgcgtggcctggggcgtgaatcggctgttgcggcggcccggcgaggtcaccccggacaccatgtacatgttttcgcgcagcggcgacatctcgatcgacaaggcgcggcgaatgctcggctacgcaccgaaggtcgacctcgacgagggcctgcgccgttccgagcgctggctgcgcgagaccggccaactggactga

SEQ ID NO: 347037 - DNA, 519 bp, Pseudomonas aeruginosa
atggccatgcccacgccgatcttcgatcacaaacgcctgctcaccctcgacacccatgacttgccgatctacgaggatgccctggcgccctatttcccgggcgtcgacgtgcagccgctgtacctcgatcccaaccagggcgtgtgggccctgcgggtgatcttccggcccggggtgcgcctgccctgccattaccacaccggcccggtgcatctgttcaccctgtccggcaagtggaattacctggagtacccggaatcgccccagaccgcgggctgctacctgtacgagccgggcggttcgatccacaccttcagcgtgccggcggacaacaccgagccgaccgacactctcatggtggtccacggggccaacgtgaacttcgaccagggcggcaactacgtgaacatcatggacgccggcgacatcatgcagaccatcgagcgcctgatccgcgagcgcggcctggagccggcgcgctatatccgtcccggccaggccggctacaccgtcgactga

SEQ ID NO: 347038 - DNA, 936 bp, Pseudomonas aeruginosa
gtgcagcgttccctttcccccgccgtcgagcaggtgcgatatgcgccgccgggcgagtacggcctggacctggaaatcgtcgacctcgacgaactgcgccggcgcaccaccccggcgcacctggaaaccctgcaacgcaccgatttccacctgctgctggcggtcgtccgcgggcgctgcggccattggatcgacttccgcccccacaccgcggaagccggcgcctggctggtcatccagcccggccaggtgcatcgtttcgacggcgactccgactggtccggctggctgttgatgttccgtcctgagttcgtcgctccgcgggatcgcgccggcatggccgacgacctggaggccggcgcctgcgccgaagccctgcccgccgtcctcacccccgccatcgacgaacagcgcagttgcctgcgggcgctccggcagatggcccgcgacgcccgcctaccgcacagccgcgcgctgcgccacagcctgctgcgccgccagttgcaggtactgctcctgcgcctggaactggccgcccgccgccgacagccggtctcgctcgccagcggcgtcgatctgcaacgtttcgcacgctttcgggaagcggtggagaagcacttcccgcgtcatcaccggatcggcgagtacgcgcgtctgctggggatttccgaacgcagcctgagccgggccagccaggcggccgccgggatcaccgcgaaagcctacctgtcggcgcggatcgcgctggaggccaggcgcctgctcgcgcatacagacgaaacggtcgccgccatcgccgagcgcatcggcttcgacgagccgagcaatttcgtcaagttcttcaagcgcgaggtcggccaggtgcccggagccttccgccgcgaacagcgtggcggccgaacgccagccttgccacagcgcacagagcgcacgtga

SEQ ID NO: 347039 - DNA, 576 bp, Pseudomonas aeruginosa
atgagtgcgatcgcgatcgtgtatttcagtggctacgggcataccgcccggctggcggaagcggtacgggagggggcgcagtcggtacccggcagccgcgtcagcgtgcatgccatcgatccgcagggcgaattgcccgagtcggcctggaaagcgctggaggaggccgatgccatcgtctacggcagccccacctacatgggcggcccggcctggcagttcaagaagttcgccgataccacctccaagccctggttcgtccagcgctggaagaacaaggtggctgccggtttcaccaattccgcctcggtgaacggcgacaagtacgccaccatcgcctatttctttaccctgtcccagcaacacggccaggtctgggtcggcaccggcctgttgccggcgaacacccgcgacaaggggcccgaggacgtgaactggaccggagggttcgccggggcattggcgatctctccgtccgacgtgggggcggacgaggcgccgcgcaatggcgacctggagactgcgcggctgctcggggcgcgggtcgcggaattcggcgcgcgcctggcggcctga

SEQ ID NO: 347040 - DNA, 774 bp, Pseudomonas aeruginosa
atgttgcaagacaagcgtttcctggtgaccggcgtcagctccgggatcggcgaagccaccgccgtgcagttgcgtgctgcgggcgcccaggtgatcggggtggacgtccggccgccgagggtcgagctggagggtttcttcagcgccgacctgggtagccgcgacgccatcgacgcgctggtgcggaaagtgccgcaagggctcgacgggctggccaacatcgccggcctgccgccgacacaaccggtggaggcggtgctgcgggtcaacctggtgggattgaagtacctgacgctgaagatgctgccgcagctggcggacggcgccgcgatcgtcaacctggcttcgctcgccggagtcggctgggcggatgcgttgccgacgatacgcgccgcggacgacctggatttcgacggcgtcgccgagttcgcccgtcgccaggggatcgatgcgcagcgcagctatttcttcagcaaggaagccttgctggtgtggaccttgcagaaccgctggacctggcgcgagcgggggatccgcatgaacgcggtgagtccgggaccggtggatacgccgatcctcggcgacttcctgcggaccctgggcgagcgcgccgaagaagacatgcgtaccatcggccggccgggacgggcggaagatatcgcgccggtggtgagcttcctgctcgacgacgcctcgcgctggctatggggtgtcaacatcccggccgacggtggcatgttcgctcatctccaggcaacccggtacggcctctag

SEQ ID NO: 347041 - DNA, 957 bp, Pseudomonas aeruginosa
atggccaacgacaagcggacttcgacccccaccccccggcaaccgcccaagggcggtgcggcgggcaagcgccaggggcatgcggcggagggctcgcgcaagccgcgtgcgtgcggcgaggagcggaaagagaaaccggccgacggacgttcggccacggcgctgaccgccaacgagcggcgggagatcgacgacaagcagccaccgcgcgccgctgtcctgcacgaggtgattcgcgtccagggcgaacacgagctgcagcgcacggtggcggcactctggtggtcggcggtggccgcggggctgaccatcggcctctcgttgatgggcatgggcctgttccgcgctgccttgcccgagcaggaatgggcgatcatcgtcagcagcttcggctatcccatgggcttcctggcagtgatcctcgcccgccagcaactgttcaccgaaaacaccctgaccgccgtgttgccggtgatgaccgagccgaccctggaaaaggcctggcaactgttgcgtctctggagcgtggtgctgttcggcaatatcgtcggtacgctgctgttcgcctgggcggtgctgcatctgccgatcttcaatgaagcggccgacgcggcgttcctcgagatcggccgcgaggtgatgcacaacgacctggcgcagatgttcgccaagggcatcgtttccggctggatgatcgccaccatggtctggctgatcccggcggcggagggcgcgaagatctggatcatcgcgatggtcacctacctgatggcgctgggcagcttcacccacatcgtggtgggctcggcggaggtaggctacctggcgttcgccggggaaatcggctggtccgagttcctgctgaagttcgccctgcctaccctgggcggcaacatcgtcggcggtagcctgatcttcgccctgatcagccatgcgcagatccgtagcgaaggttga

SEQ ID NO: 347042 - DNA, 810 bp, Pseudomonas aeruginosa
atgggatttctcgctcccgaagatggcggtcatgcacttgacctgtgtgcaggagaagcctgcgatctaccggtatttggtgtggccgtgcgctaccctgctggccatgtggtgccccaacacaagcatccgtatgggcatctgatccatgcggatcgcggtctgttacgtgtggaagccgaaagcggtcagtggctggtgccgcccacggcagcagtctggttgcggtctggtatagcgcaccggctggttgttgcacctgtggggctgcaagcgcacggtctcttcgtgcgcgaagatatttgctcccactttccaatggccgattgcgtcgtacatgtttctgctctattgcgagagctgatcatggcgctggcccgagctggcaaccagactcaatcgaccaaacgcatgcgtttactcggcgcactcttgatcgaagaggtgctcgcccagccggttcttccgcttcatctgccttggccgacgggcggtgctgaaagtcagatgcagcacgtctgccaaacgctgctggatgaccctggcgatgggtccaccgcctccgaatgggccgacaggttggccatgggagaaaagaccttccatcggcgttttctacaatcgaccggtatgaccttcggcaaatggcgtcagcaacttcggctcatgtcgtcgctgacaccattgatgcagggaataccaattacgcaggtggcgctggcgagcggctacgatagtcacagcgcctataccacagcgttcagtaagcagttcggacaacccccctccacatttgcagcaaattcataa

SEQ ID NO: 347043 - DNA, 678 bp, Pseudomonas aeruginosa
atgcgcaacgcggcattgcttgcgcctgccgctggcaagacaacgtcaaattttttcaatgtcacatctgcgaagacacgcaagggatgcggcaagccaaacgggcacacaccgccaacaggatggctcgtccacataacaacctcgtcagcgctgagcatcttggccttggtcttgaattgggccttgaatttctggttgtcgatttttgcattgccgcccattaccaagatgacaacttcatctttcagccatagtgagagcgtttttgcgatttgccccgactctacgccatgcgcaaccgctgcttcggcaacggttgcggtgctcgtatttttctcaagaatttcgaggtcaggcgcatgttctgacaagaaagcgcggactgactgcaaactcataagtactcctcttttccccaaccatgaatgtttagaaaacttaaagaccgcatatgtggttttctatatgcggtcgtcttgcattagtgatcagccaactgccgtaatctccatagagaatcgagccgcagcactcagcaccgacagaaccgacgctgtagtgatgtttgcatgtcggcctaccccaaagcgcgagccgagcacaccgggtatggcggcctcaacgatggccagtgccgccgcatcggaaccagttcccaggctgcgctcttcatag

SEQ ID NO: 347044 - DNA, 273 bp, Pseudomonas aeruginosa
atgagcctgaagctgattgttctgtttttgtcggtcgctgtactgtccgcctgcggcccatcagagccatcgaagcaggcagccaatgtgccgaccgtggaagaactggcggccaatcctgagcagttgaaggagctgcgccgccggtgcaagaccgagcgccccacaatgggcggcgtgctttgcaaccgggtggccgaagcgacgaacaagcgtttctttggcgacggcaaggtggcttatacgccatcggaaacgccgccgaagttctga

SEQ ID NO: 347045 - DNA, 1245 bp, Pseudomonas aeruginosa
atggtgggaaccgctccggacgcccagaatgcccgttggaaaccacgtcaggaagacactccggcccccgggccgttctccatgcgcacggagcgagacatgtccaagcccgccgcccgtctgggcgataccaatgcctgtccactgcccggacacggcagcaaccccactgtcagcggttcccccgacgtcctcatcaatggcctgccggctcttcgcgtcggcgacagcagcgcctgcggtgacgccgtcgccgaaggaataggctgcatcctggtcaacggccagcccattgccttcctcggcagcgcgaccgcccatggcggggtgatcgtcagcggttccggcgacgtcctcgtcggcacccagcacacccccgcaccgttcgtggcgccgacgccaatgccgggtgggttcaattgccagttgcggttgtctgccgccaatgggcagccatattctcacctgtcataccgcgccgtactcgaggatggttcggtccgccagggtgtgaccgattctgccggtgcgacgcagccgatccgtacgactacgcagatgacaatcatcagtatccaactgctgccgccagcgattgctgcttgttgtagccgacacgatcctgctcagggcggtggtctgacgatgccgctgagcggagtgcgaaccgcgccggccaaaggacagaatgtgaatacggttcccttgagcaaggacgacaagtcccgagcgctgaccagcggcgaactggcgatggcacagagcttgttcaaggattcgatcgactactccagagtgaaggtccacaacgaggagtacctgcctttcggcctgcaaccagacaacacggccatgaccccgaacggcgagttgtacttcaatcccgactactacaaggacgacttttccatttcggccacggaccagcactggttcatgcacgagatggcgcatgtctggcagtaccagttgggctattgggtaaagttgcatggactattgctgcatcccggttcgctctggggtctgctgggcgatccttaccggtacgagttgaagcctggcgacaagcttcaggacttcaacatggagcagcagggcgacattctggccgactattactgctggacaatcggaaacccgaccagaagcatcagcggtcaagcagttgccaatatcgggttgcatcagtccgtactcagtgacttcctgagaaatcccaatgacaagaatctccttccttag

SEQ ID NO: 347046 - DNA, 522 bp, Pseudomonas aeruginosa
atgacaagaatctccttccttaggctgctgtcgatagtgttcgccatcgcctgtgtcagccatgtccaggccatgtcccgtcatcacgatggcgcggcgcgggtctggatgcagggtggccggctctgcctgggcgtcggcgccgactatgaggtcggtggcttcttttccggcactgtgcaggtcgacgagaaccaagtcggtctatatgccatacaggtgagccagcaacaggcgccggcctgggtgcagagccggcctccgggcacgctgggtgcgtttgtgcgcctgcgttcggatacctgtgtcgaatacggtcgggcaatcggatcgttcgatactcaggttccggccaggcgcttggagcccggcgtctacgaggtgatgttgcaggctggcgaccagaagaagcggcgagcctggttttacaagcgcttctgtctcgccggcaaagatggggaatggtcggtttccggggctcaccgtgtcgaagggactgccgaatggcgttgcgacgagtag

SEQ ID NO: 347047 - DNA, 369 bp, Pseudomonas aeruginosa
atggcgctgctcgcttccggcgtaggccatgcccgcacagcctttcccgtcgagtcccggcccatcgggggcgacgagtcattttttcggttggccgaaacctccgagagtccggtggagtacatgggcaggctccctccgcggaatccgcgaatcgaggagggccgttttgacgaggagagcggcctgttgcgctacaaggtacgcaacgacgatgtggagcctggccgggatttcttcttcctggccaagatcctggacttcgattggtcctactacctgtatcacgatctctacgccgcatcgttccgcttcctttcggtcagggccgttgcagtgctggactccggtgaccggcaggccgcctag

SEQ ID NO: 347048 - DNA, 1620 bp, Pseudomonas aeruginosa
atggacgctgaatggttccgccattgcctgatctaccagatcgatccgtcgctgttccgcgacagcgacgcggacggctgcggcgacctcggcggcatcgtcgagcgtctcgactacctgcgcgacctgggcgtcggcgcgctatggctgatgccgttgtatcgctcgccgttccgcgatgccggctacgacgtcagcgatcacctggcgctcgacccgcgtttcggcagtgaggaagatctccgacggttggtgagcgaggccggcgcgcggggcatgcgggtgatcctcgaactggtggtgcagcacacctcggaccagcatccctggttcgtctccgcgcggcatgatcgcgaggcgccctgccgcgactattacctgtgggcggatcgcccgcacgaggatggcaaccggccgatctttcctagcgtggaggacagtatctggagctgggacgcccaggccggacagtactaccgccatcttttctacagccatgagccggatctcgacctgaagaacctgcgggtcatcgaggagatcgagcggatcatgagccactggctggacctgggcgtcgccggcttccgcctggacgccgcctcgcacctggtcgagcaggccggcggcggcgacgagcgacatggcgcctggttgctcgaacgactcgcccggcatgcaccgcaggcgctgctgatgggcgaggtggatgtcgagccggagcgctatcggcattatttcggcggcggcgatggcgatggccggcgcctggggctggtgttggacttctggatcaacaaccacctgttcctcgccctcgcccgccaggacgccgcccccctgcgccatgcgctggttcgccagccggtgcccgcgccgggctgcggctacgccctgtggctgcgcaaccatgacgagctggacctggagcgcctgagcgatgccgagcgcgaggaagtcatgcgggccttcgctccggaagaggacatgcgcctctacggtcgcggcatccgccggcgcctcgcgcccatgctgggcggcgatccgcgacgccaggcgatggcctatgccctgctgctgtccctgccgggtacgccgatcctgcgctacggcgaagagatcggcatgggtgacgacctgcggcggccggagcgcctggcggtgcgcacgccgatgcagtggagcgccgagcccaacggcggtttttccgatgctcctgtggagcggctggtggtggcaccgatcgacgacggtccgttcgcctgctcgcgggtcagcgtggctgcccaggagaaggcgccggactcccttctcacgcgcgtccgccgcttgtcccggctgcgcgccgagctgccggagaccggcctcggccaagccagcctggtgccctcggaccagccggcgctgttcgccattcgccatgatcttggtcaggcacccggcagcctgatgctggtcaacctggccgagcgtcccgtactcgccaacctcgccgaaccggacctcggtgcctaccgggagatcctcgccgatggcgactaccctgcgccccaaggcacccgggtggcgctctccggctacggctaccgctggttccgccgcgccggctcagatccatag

SEQ ID NO: 347049 - DNA, 1548 bp, Pseudomonas aeruginosa
atgctgcaatccttcctgccgccctggtggaaacgcgcggtgatctaccaggtctacccgcgttcgttcgccgacagcgacggcaacgggatcggcgacctgcccggcctggtcgcgcgcctggaccacctgcaccgccttggcgtcgacgccctctggctgtcgccggtgtatcgctcgccgatgcgcgatgccggctacgacatttgcgaccactgcgacatcgacccgctgttcggtaccctcgccgacctcgaccgcctgctcgacgaagcccacgcccgtggcttgcgggtgctgctggacttcgtcccgaaccacacctccgaccagcacccctggttcctcgccgcccgccgcgggcgcgacgatccgcgtcgcgactggtacatctggcgcgaccagccgaacaactggcgcgcctccatcgatggcggcagcgcctggacctgggacgaggccagccagcagtactacctgcatttcttcctgccacagcagccggacctgaactggcgcaacccccaggtggtagcggcgatgcacgaggtcctgcgcttctggctggagcgcggcgtcgatggcttccgcatcgacgtagcccactgtatcggcaaggaccccgtgttcgccgacgacccacgctgcgccgccggcgaaagcatggcccggatcaacgaccagccctatagccacgaggtgctgcgcggcctgcgccggctggtcgacagctatcccggcgagcgcgtcctggtgggcgaggtgaacatccgctccaccgcgcggatcgccgcctactacggcgccagcgacgagctgcacatgtccttcaacttcccgccgctggacgcaccgtgggatccggtaacgctgcgcctgtgcatccgcgaagtggaggcgacgctcaaccaggcggcggcctggccgacctgggtgctttccaaccacgacaacactcgtcatcgcacacgctacggcggctccctggcccgagcgcgggccgccgccgtgctgttgctgaccctgcgcggcacgccgttcatctaccagggcgaggaactgggcctggaagacgtggcgctcgccccggcgcagcgtgccgaccccggcggccgcgatggcagccgcgcgcccttgccatggaacgccgcatctccccacggctggacgggcgcccccacctggctgccgttcccgccgcaggcggaagaactggcggcggaagtccaggagcgcgaccccggctcggtactcgccctgtatcgccgcctgctcgcctgccggcgtggcagccctgccctgcaactgggcgactgggaagagttgccgtcgcaccccgagatcctcgcctatcgccgtcgccacggcgaggaccagcggttggtctgcatcaacttcgccgaaggcgggcatgtcttcccgctgtccggcgcctgggagatcgaggtagccagcgacgctcgcggcgacggcgaggcctatgccggccgcctgggaggtggccaggcactgctgctgcggcccagggggaatggcgatggacgctga

SEQ ID NO: 347050 - DNA, 543 bp, Pseudomonas aeruginosa
atggaaacgctagacctgctggccatgcgtgaaagctacacccgccaacgcatcctgctctgcttcaacggaccgatctcgcgcagcctgatcgaggagataggccacgcgctgcgcaactacctgcacgccgaacaggccaagccgagcgaagcgatggacgtcttcgcggtgtacatcgagatgacccagaacatccgccactacgccaatctcaagggctacggcgaacacgaggcggcggccacggtagccatcgcccgcaacgaggacggccactacgtggtgtccgccggcaacctggtggaacgcgacgacggccagagcctggtgcgcagcatccaggccatcgccaacctcgacaaggccgccctcaaggccgcctacaaggagcagctgcgccgcccgcgcgacagcggcagcgccagcggagccggtctcggcctgctggacatcgcccgcaagtccagcgaaccactggccgcatcgctgaaggaacagcccgacgggcgcgcgttcttcagcctgcgcgccgtgatctga

SEQ ID NO: 347051 - DNA, 237 bp, Pseudomonas aeruginosa
atgcacacggaattcttccaagtagattttacgtgggatgaattcgacaagatttcactctataaaagccgacatataattggccttaaccatgaatgggagaatctcggccagattctgcctggcattgtcaatgtattctgccgtcgtaaggatttcgaggagcgactggcaatgatcgagtcactcttgcccaagcccattcccgttgtcgtcgagaaattcgaagtctattga

SEQ ID NO: 347052 - DNA, 735 bp, Pseudomonas aeruginosa
atgaagctaccttggagcagaccgttggcattgccaccgcagttggagtggaagtacgcaaatgagccagagcttatgagctggacaataaaggcgagaaactacaacacatttgttgcaaatataatgtttttaatatgcctagcgatggtaatcattggaacatcttttgctggagattggtttcaagaaaatagagagaaaaacatccctgtaagtattggtttttttctggtgatgatctctgtagttctctcagtaacccaccagaggatgaacttcgcctatcgctttagtaagtcagggggggagttttgtgagtggaagaattttccaaaggccgctgtatgggtcgtcaatggattcgcggtcatagccgcaatcgcatgcgttacccttctaggccccgatgggatgctgctgggtgtactgggagcgggaggcatggggcttacagctatagccatgatcaactcgaagagctttcagaaaatgcacacgaccttccatcataacgcctatagctggagcgagttcccaggagttgtaatagaccagcggcaaaaactggtaggcttgaagttcaaatggtatcacaaggagctgaatgaagagatggtaagtgtcgaggcgctttacactcgctcccgcgatttcaagaagctggttgatttcctcgaaaaacagctgcctgacgttccattcacggaagggaaagtacagcgcggaccgtga

SEQ ID NO: 347053 - DNA, 3498 bp, Pseudomonas aeruginosa
atgagttccggaaatgccgagcagttgcgtcgcgcccgacgcaaccaggccttcgacaacacacccgccagcgctaccggccagtgcccgctcaagggacccgaggtggcgatcttcccggtgcgctatgcgctcgacgagtctccgcccaaaggcagcggacaaggcccgaacccgctgccggcggactggtcggcggaacatctgccgaccctgcgcacgcgcagctacaccctgcgccagttgcgcgacggctggctctacgtctgggatgaacaggaccgcaccttccacgaatacagcctgcaaggccagcagttcacccgccacaagtggagcgaagcgcagatcggccaggaccgccggcacaaccccgacaccacccggccctacctgctctatccgcgtcgcagtcggctgcgcatcgcctactccccggtgcaatggacctggcgcctctgcgagctgatgcgccagccccgcacggcgcagcggcaatggatgcgcgaaatcgacctgccgggctactgccgggaactccgcctgccccatggcgggccgctgcgcgaactgggcggcagcgtggccgacatcctcgccggcggcggcgaggcgccctccttcctcaccaccctgctgccgacccgggcgccggaaagcgccgacggcgaagcccccgccgccttcaagccgggcttcgacgaagccctggtgcgcggcagcgtgccgagccaggacagcgccctgttcgtcgcgctggacgacccgctggcgctgatcgacgacctggcgatgaaccaccttggccgccaggccgagcagaacgccttcgaggaagagcagcgccagcaactgcaaaccgcgctcgccgtcatgcgcctgtgcggctgcgatgtggaggccctgatccccaccgacatcgccaccgaccctgaacgccgcaaagcctatgtcgaggacgtctacgccctgctccagcgctacgacgaggccgggcgtggcaatgacctggacgataccggcggcttcgcccggttcggcggcctgctctacaccgacaaggcggacaaggaattcatcggcaagtggggacagctccccggtggcgccgaacgctggcgggaagccagcctcgactgggaagagaaacgccgttggcgcgaagacgtgcgcttcgacgaatgccggcgcttcctgcgcgacagcctcgaacgactggagcgcctgcaggcccacgcgctcgccgccgagaacgacctgaccgcctggttggacagcctggccccggcgccggagccgttgttccacgacccctgcaacgaggagcagagcgagcgtctgttcagcctcgccgtcaccctccaccagggcctggccaactccgaaagcggtggtcagtggctgtgccggcagttcggcgaacgccgttcgctgctgggcctggccctgttcaacttcaacccggaactggccgggacgatcgacctcgccgcgcagaacttcgccgccaccggcagccttgacggcgtcggccgccagggcgacggcagcggtcaggcgctgggcggcatcggcgaggccaccagcgccaccacccgtaccgcggaaagccgcgaggcgctctatctgctgttcaaggacagcgcgctctacaaggcactgtccgaaacggccaggcaatccctggaaaccctgcgccaatatgtcagcggcaagggcggcgaactctggaaccacctgtccttcgtcctcctgccagcgctgagcgaaaaattcgcgcccacgctgcgcatccagagcttcaccgtgcagcaggtgctggtctccacggaaatctccagcagcacccggctggtcttcaatcccgccttcgacagcgaattcgccgcctggcagcgccaggtgcagatcctcctcaagcaggtcgaaggccagcgccgcaccctgctcctgagcggcgcccgccacgaccggcgcgccgcccgccaggccctgcaactgctcgaagaacgcctgcgggaactgcaattgcagcgcccgctcaagatcaccgcggccgtcagccatgtcagcgagcgcatgacgctgtccgtccagcaggtgcagcaccacctcgccaccctcggccagaacgaactgctcgcccagctccagctcaaggcccgccaggcggcggcccacgccgcccgggccaaggcctgggtcgaccagaacctcggcggcgccctgccggtgctgatcgccggcctgaacatctggaacaccctcgacagcctggacaaggcccgccgcgacggcatcttcagcgccgacgaactgcgcaccgtcggcgccaacgcggcctataccggcaatgcgctgatggcgctgtgggtgatgccggcgtggcagcgggtgaaggggctcaacggcatcataagcaacaagaccttcgagctgaccagggccggtgccagtgcctggaaaggggccaaaaaccttaccttctcaaagattgcgggtggactgatcttgcgcacggcgacttgggcggcattgggggcggtggcggcgggagttgaggcgtggcaggtaaacaaagacataaacaacgcgaccagtgatgacgaagcattcatgttgtactggaaacgtaacgctctattgggattggctattgtaggagggcttcagctcgtaggttccgtcttaggtatctggttcagcttcgcatgggttatggccccttgggcagcaatcacgatagccatattgggcatcatctacctgaccgccacactgtttgccaaccgttacaagcgcgaaggcttgcgcctctggctgcatcgctgcacctggggccacaatccgcagcccgaatggagttctggcgaaagcggtcatgccgagcagttgcgtagcctcgctgaaatcctcctgcgccccagcctgctggcgcggggcgtttcccgcatggtcaacctcggcgccaatgcccacggtccctatcgcaccgaatggcaaggtttctgggtcgaactgatcctgcccgccagcctcgccgggcagaatgtcaccctgcaaccggccatggtcgtcagcgactggggccgcgacgatatcctgcggcagatggaaggccgtttctacgaccagtggcgggatggccactgggtcgcccctgggcaagccggccagctacctggggcaaaaccgggtgaccagataccgggagaccatgcctattcccgtgacgatagcgtccgtatctggcgggtctggatcagttactctcaccaaccgaccctggagctggaagtcagctatccgcagaacgttgtccaacgtcccgatggacgcggctacctgttccgtctggccatcaagagcaacgccgaagaggcggaaaggaaaaatacaccgttcagtcaggaaccgtcggcagatatggtattgagcaaaatcgcctcacataagattgcgctgccaatcgttggaatcatcgaagggaaatcatga

SEQ ID NO: 347054 - DNA, 864 bp, Pseudomonas aeruginosa
atgagccggcaccctggcgccaattacctgctgctcgatggcgtcctgcgccgtgacgccctggccgagctgtaccgcagcgaagagccgctggaggtcgaaccgctgtacctgggaacccgctggcatgccctgctggagcttggcccgatcctggtgaaacccgtgccgggttcggtactgctcgccagcctgccaggagacgccagcctgctgtacagtcccgcgcccctcgccgaggtcgcggcgcatctgcgccgttttctcgccgccccggacatccacggcgggcagggcctgttccgcttcgccgatcccctggtcgcctggcactggctgtccagctatcccagcgaagcgctcgcggcccgcctcggaccgatccgccgatggcagctcgccgaaccccgtcagcgctggctgcatgcaacgccggcccggctcgtcgcgttcgacggcagcgaccggccacccccctgggaagcggtccacggcctgctcggcgaggaccagttgaacgccctcgaacgggcctaccgctggcgcttcaaggaacgcctgcagcaacagctcgaacaggactttcccgaggctctcggccatatccccctccacgacctcgacgattggctggagcgttgcctggacggcggcctggaagccggcctgtgtagtgaacgcagcctggccatctgggtggaacgcagcctgctgtggggcgaaggcttcgcggaggatcgcgacggcccttatcgccgctggctggacgctcatcctgaagccgcggccctggcagcggaaatccgcctgcaacgaatggacgaagactgcccggcagtcagccctgaggaaacgccccgatga

SEQ ID NO: 347055 - DNA, 1926 bp, Pseudomonas aeruginosa
atggaaggatgcgcgcaatgcatcgtgtcgtcgggccacctcgcgccaggctgcctcgaagcgcggcatatcgatgtcgctgtcgatgacatagcgatcctgcatgaaatagatgccagagttcggctccatcagggtgtgcaacagcaaaccttcctgcatcggagtcagtggatagatgtcttcgatttccccataaggcagggacagcgcatcgagttgcgcctgatccaatccggcaagagggaagtcggacggcgtcactcctccggaagcaggatcgcaacaatgctcgatcaatccgttcaaatcggctgcgaaggcgtcgacgagctcctgcaccgtctcgtcggagaacatatcggggctgaaggtccaagtcaggccgagctgcccctgatagacctgtccttcgacagagagccagtttgcaagcggcgcacgttcgtcctgtgcactgccggaacgctccgcggctggcaaccacagggcctcgtcggcgaactgatggtcgaactggccgagataattgaaggttatgcgtggttgcggcgaccgagccagaacttcaccgcaagcagggtctgccagatagcgcaacaggccatagccgatccctcggtcgggaatcgaacgcagctgttccttgacgctcttgatcgcggcgccaggttcgacagccggatgcaggtgcaccggatagagactggtgaaccaaccaacggtgcggctcaaatccagctcgccccccaattcctcgcgcccgtgtccctccagttgcaaaagcaggctttcgtgaccgctccagttacaaaccacacgtgccagggcggtcagcagcaagtcgttgacctgggtgcgataggctgccggggcctcctggagcagacgtcgggtagcctcggcatcgagggtcagggccagcttgcgggcgtggcggttctccagaggagcacgaggattctggcaaggcaggtcggctggcgcgccatccaggtgtgcctgccagaacgccagttcgtcatgccgcttccctgccacttcacgcaaatgtgcgctccaggcctggtaggagtgcgtgcgcaacaccgcaggcgagtcggggcgctggtagaactgctgcaagtcctccagcagaatccgccaggacacaccgtccacgaccaggtgatgaatcaccagcaagagccgctgctcaccttcgggaagctcgaccaggagcgcgcgcagcagaggaccggtgctcagatcaaggctacgctgggcttcctcgcacaacgcggagagttcttcgaccgaagcgacctggcgccgccagagcgggctttcaacctcaccggaatattcctgccgccagcccccttcttcctcacggaagcgcagacgcaaggcatcatgctgacgaatcagagcgagcaaggcctgttccaggcgttcgccatcgacagactcgcgagccttcaaaagcaacgattggttccagtgcctgcgattcgggatgtccaacccgaagaaccagtgctggaccggtgtcaaggccacctccccatccaccggcgcctgaattgccgcgctgtcgcaaggcaccgccacctgcgccaacccacggatggtctggtgttggaacaggtctctcggactcaacccgaaaccggcctgacgggcccgaccgaccatctggatagagacgatagagtctccgccgagggcgaagaaattatcgtcaagccctacccgttcgatgcccagcagcgcttcccagatttccgccagacagcgttccgccggactgcgcggcatgctgtaaaccacccgcccaagggtcgcatcaggcctgggcagcgccttgcgatccaacttaccgttggggctcagcggcatgcgctccagagcgacccactgcatcggcaccatgtattccggtag

SEQ ID NO: 347056 - DNA, 843 bp, Pseudomonas aeruginosa
atgacccagccctcgaaacggaatgggcaggttccgctggacgacgccctggagcgtcatcgcgacgcgctgaaggacctgttcccgctgccgccctcccggccgaaatcgcgcaaggcaagcaaggcggccggcgtcgcgctattgctggcgctggccatcggcgccctggcctggctggacccggcctacaagcgcgagcgcttcgccaccgccatcggtgagcggcgcgacgtgaccctggccgacggcagccagctcctgctcgacagtggcagccaggtcgaggtcagttggcacccgctcagccgccgggtcgcgttgcgcgcggggcaggtgcttttcgaggtatccccggcgcgctatcggcccttcgtggtgtccgcgggttcgaccgacatccgcgtgctcggcacccggttcaatgtgcgtcgcctggacgacgacgtccgcgtgaccctggagcgcggccgggtggaggtcggcacctcggctacggcgcaagcgccagtcgtgctcctgccgggccagcaggtcgatgccattggcgggcaactgacgccgctggccaaggtcgatgccgccacggcgatggcctggaaagacgaccgcctggtcttcgagcgcacgcccctgggcgaagccgtcgcgctgctgcgccattaccgcaaggcgcccattctcctggacgaccccagcctggcctccctccggctgaccggcgtcttcgccgcgcacaacgccgaccggctgctcgacctgctgccgagcatccttcccgtcgccgtgtcgcggcaggaggacggcagcgtcgagatccaacgcaaatcgacgcgaaaataa

SEQ ID NO: 347057 - DNA, 525 bp, Pseudomonas aeruginosa
gtgccgttcgatcccgccaagccgacgctgttgtccacactggttcgtcactacgaggaactggtcgaccatgttcgccggcgcttcggcgaccggggcatggcgcgcgaagtggtgcacgacgtgtgcgtgcagttgctcgaacgcgacgaaaaggaggacgtgcacacgcccctggccctgctgcggaaaatctcccacgacgccgccgtgagccgctatcgtagcgaccgtcgtcgaaccgcctgggtggaagccgtcgccgagcttccggaagtcgcctgcatggcggcgacgcccatgggtcgccatgaggccgagcgcgagttccaggcactggtcgacgccatcgccacgcttcctcctcgctgccaggccgttttcgtcatgcacaagatccacgaagttccccaggcgcaagtcgccgaccggctcggtatctccgtcaagaccgtggaaaagcacctgcgcctcggactggcggcctgccgggaacggctcggccgcggcgaggcacggccatga

SEQ ID NO: 347058 - DNA, 384 bp, Pseudomonas aeruginosa
atgcacgacgacgagccggaagcgatgaccctttacctcgccgaagccctgcagcgacgcggcatcgcctacctgcacctggccgagtgggaatggagcggcggcccggcctacccgcaaggcttccgcgagcgcctgcgcgaacgcttccgcgcgccgctgatcgtctgcggcaactacgacgccgagcgcgccgaagcgatactccaggccggactggccgacgcggtggcgatcggccggccgttcatcgccaaccccgacctggtcgagcggatccgtctcggcgcgccgctggccgaggccaaccaggcgcggttctacggtggcgacgccgccggctacaccgattacccgaccctcggccagtccgctacggcctga

SEQ ID NO: 347059 - DNA, 240 bp, Pseudomonas aeruginosa
atgtgtgaaatcattcttgaggacttggctaggccagcatcaatatttagaggagaggaaaagatttttgatgagaagtgcgggggggttgtaaagtcaaagcagctgccaagtatagatacgctaacacttggaagctcggaaaacgttctaaaacggtatgtggactttataaagaaaaatccagatatcgaaattgactacaaaggcttcattcacactattttcttcaagaactag

SEQ ID NO: 347060 - DNA, 591 bp, Pseudomonas aeruginosa; identical to SEQ ID NO: 327629

SEQ ID NO: 347061 - DNA, 306 bp, Pseudomonas aeruginosa
atgagcaagtctctgttccacgaagggcgcgacgtgctcatcgaggtcctgcacatagggccttccgaagaaaccttcatttgcgccgtgaacggacgagttccagtctcatcgctccttgagatcgagcggcaacttcgcgaggaggagttcgagaaaggccacggcctgtacctgttcgaggcctgctatttctccggccagtacggagagttcggcatgtgcgagatcgcgcccggctgggagctaaccctgatcgaattcaacgctgactggatggaaccgattgaaggagaactgccatga

SEQ ID NO: 347062 - DNA, 195 bp, Pseudomonas aeruginosa; identical to SEQ ID NO: 333000

SEQ ID NO: 347063 - DNA, 231 bp, Pseudomonas aeruginosa
atgagcagctacgaagtcaagacctctgacggcatcgtacacaaggcagaggccaatactcacatcatcgactccattgggctgcatctgtacgcaggcgctgggcgtgtcgttgctgtgttccgtacttttgagtgggtgcgcgtatacccggaagtagtgactgccccatctgagccggtgcagcccgcccccgaaaccaccaccagcccggaagctaccggggagtaa

SEQ ID NO: 347064 - DNA, 573 bp, Pseudomonas aeruginosa
atgactgtctatcgcgacgcagcgcacgcaatcgctcgaatcatgagcatcgagacaattgacgggacgaataaggctctctggcagcagcagtatgaatcgggatatcaggaagagcctgtagcggcgaatccctgcccactcagcgctcaggaacgactgacccaggacgcgatgacacgtgcgatgatccaccgcgagttaccgccatcgctctggtatgcgctggttgcaaagtacagcatcaatgatgccgaagtggttgatgccatccgctggcttgttccaaaggcggtcacgccggcacatcatctgttccgcatgaagtgcgttactgcctgggcgatcccgcagaagcgcggcgtgaaggagggcgccaagacttcccgtcgcggccttcctgactcgttttatcaggtgcacacgtgggataccgatgggactccagaaggcactctgcggcgctggaagcaccttacaaacaagtggcttgaggatcagatagacttggcattccgagaagtaaccactttgttagataaagattcgcttattgttcgtatcgcggcataa

SEQ ID NO: 347065 - DNA, 366 bp, Pseudomonas aeruginosa
atgagctactgccgttggagcagcgatgatttccaatgcgatgtttacgtatacgaaagcgtagccggtggattcgtcactcacgttgccgccaatagggtggttttcaaggatgaactgcctgccctggttcctttcgagctggagtacgttgaccagttcttggcgcgccacaaccaggtaatggcaatggttgatgcggctgatcgtgtgctgatcggtcttccacacgacggcgacagcttcgatgacgccgatcaagaggcctgtgcggaccgactggagtatctgaaggggctgggctacgtcgtcccgcagtacgccattgacgcgctgcgcgaggaagcagaggagggcgaagcatga

SEQ ID NO: 347066 - DNA, 195 bp, Pseudomonas aeruginosa; identical to SEQ ID NO: 333000

SEQ ID NO: 347067 - DNA, 390 bp, Pseudomonas aeruginosa
atgagtgatgaagtaaccacaatgctcacgctccagtcgaagacgtcaaccctcttcgatttcccatatcgggttgcagggggttcgttcctgagcctcaccttccgcaagaagggcaaagacctggacgccttcctcaagatcaccaaagggcagatgcaatgcggctatcgagactgcgggttcgttcttcgggttggtgacggcaaggcgcaaaagtggaccggggtccgcagctccaccaacgacagcgacctcatgttcgttcgggacgctaagcaattggaggccatcgtcaaatcgggcaagcctttccggatcgccatagagttcttccaggcaggagagcgcgttttcgagttcgacccaacaggctacccaggcctatag

SEQ ID NO: 347068 - DNA, 426 bp, Pseudomonas aeruginosa
atggcactggacatctcggcggtcggagaggcgctgggcatcccaggcgaggaacaggaaggcgggaccggcgagttcatcgatctaatccgcgagctacagaaggaagtcgaagctctgcgcagggacaaggcgaggctcgacgcgatcgaggataactgctgggacgtgcgctacggcagcagctcaaatgccgacgccggcgacagcagcatcggtatcgagatagttgggtactatcagggtgcaccgcacatccgggtgcttggcgagagctataccgagaacctgcgcgccgcaatcgatcaggctatgaccgccgaagcctacccgccagagaggccagaatacgacgatcacgggagaccactgcgcgcccttctgagcgagcaggagggagggaacgatgtcagcaatcatcagtga

SEQ ID NO: 347069 - DNA, 420 bp, Pseudomonas aeruginosa; identical to SEQ ID NO: 325843

SEQ ID NO: 347070 - DNA, 357 bp, Pseudomonas aeruginosa; identical to SEQ ID NO: 332093

SEQ ID NO: 347071 - DNA, 225 bp, Pseudomonas aeruginosa
atgatcaacgccggcagcgacatgaccgcgccggtcgcgttctggatgaccgagcccatgatgttctggaaaccctgtgtggcaccattgagctggttctccagggtgatgctcaggttcatgtttccgcacatcatgtcgttgttccagccgaagccgacgccgatcgagtccatctggccggcgctgcccatgctcaccgcactgccgccgccaatgctgtag

SEQ ID NO: 347072 - DNA, 273 bp, Pseudomonas aeruginosa
atgcaactgttacgcgacgaacttcggacggcccggaagcactatcagtgtgatgcctattactggttcgaccgtgccggcttcggaaggcaagacgttggtgcggatgactggctaatcgttgaggccgttcgatccgaccgagggaagatccttccgagcacaaagtacatctatcaggtgcgcgtcgatggcggggagttctggattttccgcgcgcgcccggaaatggacgccatctgccgcaaatacgacctgtatccgggggactga

SEQ ID NO: 347073 - DNA, 2448 bp, Pseudomonas aeruginosa
atgaaacgcatccgcaaggcccaggccacgctgaacctgcccaccctcaagctcgaagggggggtattcctgcccgatcaactggaaaaagccgctcagggccgcgccagcgcccagagcgaggccgactacggtacccccaagggcgtcaagctcaaggacgaatacagccgcgctttccagatcgcctgcgcccaatggcagcacttcgccgcgcagatggaacgcgccgacgtcgatgccgcgcagctcaccaccgccttcgtccacgaactgctgcgcgatacctttggctacgccacctcgcaagccgcggcagcacagcaagtgggtgaactgcgttacccggtcagcctcatggctggtaccttgcccgtcttggtggcaccacactctctgggcctggacgaggctgacgcgcggtttgccgtgcaaggcggcggcaaccgtaagaaagccccgttccaggccatgcaggaattgctcaacgccagcgaaccgctgcaatggggcatcgtcagcaacggcagacagctgcggctgctgcgcgacgcagcctcgctcacccgccccagctttctcgaagtcgatctggccgatctgctcggcggccagcgctatgccgaattcgccaacgtctggcgtctactgcacgccagccgcgcatcccgccccggccagggcgctacggcgtgcatctgggaacaatggcgcagcgaaggccagcaggaaggcactcgggtgcgcgatggcctgcgcaacggcgtcgagcaggccctgctgaccttcggcgcaggtttcctgcaacaccctgccaaccacgccctacgcgccgccctgaacgacggcacgctcagcaaggatgactatttccaacaactgctgcgcctgatctaccggctcatcttcgttttcaccgtggaagagcgcggcgtgctgcacccgcaggacgacagcgccgaagcacaggttgcccgccgcgcctatgccgaaggctacgccctggcccgcctgcgcgagctgtgcctcaagcgccgtgcccgcactcgccacgacgaccagtggcaagccatccgcatcgtcttccgtggtctggcacagggcgagccgcgcctggccctgcccgcgctgggcggcctgttcgcgcccgaacaatgccccgatctggatgtcgccagcctggacaacgcccacctgctcaccgccttgcaacacctgcgctgggcagtggtcgcgcaaggcaagggcagcagcctcatcccagtggactaccgcaatatgggcccggaggaactgggtagtgtctacgaaagcttgctggagctggtgcctgccatcgacctgcccgcgcgcacgttcggctttgtcggccgtaccgaggaaggcagcaccgctggcaacgcccgcaagctcaccggtagctactacacccccgacagtctggtgcaggagctgatcaaaagcgcgctcgatcccgtcatcgaacagcgcctggccgcgcagtcgaccaaccctacagaggcactgctggccatccgcgttatcgacccggcctgcggcagcggccacttcctgctcgccgccgcccgccgcttggcggaaaagctcgcccagttgcgcagcctagaaggcgggcaggaaggcgccatccagccgcaggactaccgccacgccctgcgcgaagtggtggcccgctgcatctacggcgtggaccgcaaccccatggccatcgaactggcgcgcatggccttgtggctggaaggctacgaagaaggccgcccactgggctttctcgaccaccacctgcaagtgggcgacgccctgttgggcctgaccgacatgaacgcgctggaacaaggcatcgccaaggatgccttcaaacccttgagcggcgatgacaaggacgtctgcaaggagctggccaaagccaacgcctccggcctcaagcagatcgccaaggatctgcaaggccgccagatgctgctgggcgtggacaaccgaagcggcctcgaagccttacgtgccatcgaaaccctgcccgccgatacccccgagcaggtggccgccaaggaacacgcctggcgccactttctggaggactccgctaacagctcgctggcccacacggccgatgcgttggtgggtgcctacctgctgcccaaggtgcaggacaccgccgacaccgtgcccaccagcatcaccttgcatgcgctgctgaccgacccgcaacgcgcccagaccgagcacgccgcccccatcgccgccgcgcgcgccgcctgcaagggccttcccgcaggtgtttgcgcaaggcggcttcgattgcgtgctgggcaatccgccgtgggaggtgtcgcagatgggcgaagaggagttcttcgccacgcgtgcccagcgcatcgcggaactggcgggcgatgcgcgcaaacaagccattgctgcactgcctga

SEQ ID NO: 347074 - DNA, 153 bp, Pseudomonas aeruginosa
atgtccctgttgatccgtggcgccaccgtggttactcacgaagagagttatcgagccgacgtgctctgtgccaacggcctcatccaggccatcggcgagaacctcgccccccctccggctgcgacgtcctcgacggcggtggccagtacctga

SEQ ID NO: 347075 - DNA, 1830 bp, Pseudomonas aeruginosa
  misc_feature (623)..(623): n is a, c, g, or t
atgccagggactgcactgttcgaaaagccacgctggttgcgcgacctcctgcgcttcctgcccctcaagagccaattcgtcctctccgggaacatccgcgacctgcaagcctgcgaagtggtgccgggtacggtcaccgcgcagagcttcaaccagaccctctgcgacgccctgctggacgccggctacgcccaggtgctggcctgggatccgctggccgggttccgcgtgctcggccggccgggcagcgaggcgggggccactccgcaggtgcttctcgacctcggcctgaccccggtggacggcgccgcgccggccggcatcgacctgctcggcgcgaccctgcaacgcctggtcaaccgtagcggcgagccgatcgccctgatcgtcgacttcgcctcgcgcctggcggtgcgcaacgacgccctgagcgccgccgagcatcagttgttcacccaggccctggtgctctcccaccaggcccgcagccgtcccgccggggaacagcgcaaaccgttcttcaacagcgtgctgtgggtggtggaaaaggaaggcgacctgcccgactggctgctggtggacaacccgcgcctgcgccatatcccggtgtcgaagcccgaccnggcggcgcgccggggcctggccccggcgctgctccgcgggctcggcggcgcgggcgtcgccgaggaggccctgcaacaggccgccgctaccttcgtcgagaacaccgaaggcctgctgctcctcgatctcaacgccatcgtccagctggcgcgcgtggaaggcctggccatggaacgcatcgccgacgccgtgcgccgctacaaggtcggcgtcaccgaagacccctggctgaagatcgaccgccagcgcatccgccaggccgacgagatcgtccgccgccgggtcaagggccagcagcacgcggtgacccacatgctggacatcgtcaagcgcgcgatgaccggggtcggcgccagccgcaagggcaaccgcccgcgcggcgtggccttcctcgccgggcccaccggggtcggcaagaccgagctggcgaagaccgtcaccagcctgctgttcggcgacgagagcgcctacatccgcttcgacatgtccgagttcagcgccgagcatgccgaccagcgcctgatcggcgcgccgcccggctacgtcggctacgacgtcggcggcgaactgaccaacgcgatccgcgaaaaacccttcagcgtggtgctcttcgacgagatcgagaaagcccacccccggatcctcgacaagttcctgcagatcctcgacgacggcgtgctcacctccgggcgcggcgatcgcgtgtacttctccgaggcgctgatcgtgttcacctcgaacctgggcatctaccgccagggggagaacggcgaacgggtcgccaacgtgctccccggcgagcccttcgaggcggtgcagggcaaggtccacggcgagatcgagcgctacttcaagctggttctcaaccgcccggaaatcctcaaccggatcggcgagaacatcatcgtcttcgacttcatccgcgccgacgtcgccgagcagatcttcacccagatggtcgacggcaccttcgccgacctccgcgagcagcgcctcgtcatcgaactggccgaggcgccgcgccaggcgctgcacgacctctgcctgggcgacctgtccaacggcggccgcggcatccgcaaccagctcgaagcgcgcctgctcaacccgttgtcgcgggcgctgttcgaccaggacgcgcagccgggcgagcgcttcctgatcagcgccctggacgccgacggcctgaccctggaacgccgctga

SEQ ID NO: 347076 - DNA, 1245 bp, Pseudomonas aeruginosa
ttgtcattcgcaaataccatacttgtctttctcatatatcataatatctcagaatggctggtgcctttcagccctccgcgccaccacctgcactggatcctgcgcgaggtcgagttcaccatcgagccgggcgaagcggtcggcatcgtcggggtcaacggcgccggcaagagcaccctgctgaagatgatcgccggcaccacccagccgacctgcggcgagatccgcgtggccggccgggtcgccgcgctgctcgagctgggcatgggcttccacccggacttcaccggccggcagaacgtcttcatggccgggcaactgctgggcatgcaggtcgaggaaatccaggcgctgatgccggatatcgaggccttcgccgaaatcggcgaggccatcgagcaaccggtgcgcacctactccagcggcatgcagatgcgcctggcgttcagcgtggcgactgcccggcggccggacatcctgatcgtcgacgaggccctgtcggtcggcgatgcctatttccagcacaagagcttcgagcgcatccgcagtttccgcaaggccggcaccaccctgctgatcgtttcccacgaccgctcggcgatccagtccatctgcgactccgcgatcctcctggagcagggacggatggccatgcgcgggcggccggaagaagtgatggactactacaacgccctgctcgccgagcgcgaggggcagaccgtgcgccaggaaatgctcgccgacggccaggtgcggacgatttccggcaccggcgaggcagcgatcctcgacgtacggatggtcgaccagcggcagcgcgcgctggaggtggtcgaggtaggccaggcggtgacgctggaagtcgaggtcgaggttcgccaggacatcgagcggctgatcctcggcttcatgatcaaggaccgcctcggccagccgatgtacgggatcaatacccaccgcctggacaaggcgctcaccgacctgaaggccggcgagcgcatcacctaccgcttcgccttcgacatgcgcctgggcaaggggcactactcggtggcgctgagcctgtcgcggctggactcgcacctggaccgcaacttcgaatggcgcgactacggcctggtcttccatgtcatcaacaaccgccaggaagacttcgtcggttgctcctggctgggcgccgaaacccatatcagccgctccggcgaggcggctctggaccccacttccgcggagagcactccatga

SEQ ID NO: 347077 - DNA, 2118 bp, Pseudomonas aeruginosa
atggtcatcgtttgctgcgtttttacacggtctgggccggtagccgaaaccgaacgccggcgtcggccgtgccggcgccggggccgcagcggccggcggcgaggcgctggcaagcacctcggcggtcgcgccgaaacgctgcaggcgcccgccatgcagcaacaacagcttgtcggtcagcgccagcaccgccggcttgtgggtgaccagcaccaggctgctgccctgccggcgcatcgccgcgatggcttcggccagggccgcctcacccgcctcgtcgaggctggcattgggttcgtcgagcacgatcagcgccggtcgcccgtacagcgcgcgggccaggccgatgcgctggcgctggccgccggagagtccggcgccgccgtcgccaaggcgcgtgtcgtagccctgcggcaggcgcagcaccaggtcgtgcacgccggccaggcgcgctgccgccaccaccttctcggcatccacctcggcgaagcgcgcgatgttctcggcgatgctgccggcgaacagttgcacgtcctgggccaggtagccgatgtgcggccccagtgccgccgcgctccactgccgcaggtcggcgccgtccaagcgcaccgcgccggacagcggctgccaggcgcccaccagcaagcgcgccagggtcgacttgccggaaccggacggcccgatcacgccgagcgcttcgccaggctccagggcgaaaccgaggtcctgcaacaatacctgctcgcgtcccggcgcggccgcgcagagccgctcgacgcgcaacgcgccgcgcggcgccggcagcggcatgcccagggcagccggcggattctcctcgagcagccgcgccagccgctggtaggcctgccgcgcgccgctccactggcgccagaccgcgatcaactggtcgatggggctgagcacgcggcccatcaggatcgagccggcgatcatcatccccggggtgatcaggccttccaccgccagccaggcgccgaggccgagcaccagcgactgcaaggccaggcgcacgcccttggaggtcgcgccgatcgccgcactgcgctcgctgccgaggttctgccgggcaaggaaggcctggtgctgggcgaaccagcgcgcgcgcatggccggcaacatgcccattgccgccagggtttccgcctggcgcaggttggccgaggcctgctgggtggcgaggatcgacagttgcccggcctcggccagcggttcgcgcgagcggctttcgttgacccaggcgagcagcaccagcagcagcgccccggccagggcgagcaggccgagccagggactgaagaggaagatcaccagcaggtagagcgggaaccagggcgcgtcgaagaaggcgaacagggcgttgccggtgaggaactggcgcaggctggtcaggtcgttcagcgcctgtccggcggcctgctcgccgcgctccaggctggcgcggaaggaggcgtcgtagatgcgctggttgagttgcatgtcgagctggccgccgaggcggatcaccaccaggctgcgcacccactccagggcgccgagcagcaggtagaggccgagcaccatgagggtcagcatcagcagggtcatgtggttgccggagccgagcacccggtcgtagacctgcagcatgtacagcgacggcgccagcatcagcaggttgatcaccgcggtgaacagcgcgacgctgcgcagcgccgggcggaagcggccgagggtggcgaggatttcattgcgcggcgaggccggccggagcttcatcggagtcgggtcctgtgggtgtccgggccgcgagcgggcccggaggacattgcggcagtctccgcttgccgggcacggccggcggaggaacaatccgggggccgccgtcgccacgggtgcgaggcgcagcgacggcggttcgtgcgccggagaggagcgccaactcctctccggcctttagcgcaagcagtccacgaacgctatcgtggacagttgctcaggccgccagggccaggtcgtgcggcagttcctgcacgccgaccacgccgatttccgccgctgccgcagccggggtggcatgggcgacgccggccgcggccaactggtcgaaggtggagttga

SEQ ID NO: 347078 - DNA, 927 bp, Pseudomonas aeruginosa
atgcaccgtctcgtcgtggtcgatggtcttggtccggtcgtggccgacccagtggctctcgtcgttctcgacctcgatgtcctggttcttctcggcatggatgaacaactgctcggcgcccttcttgtcctccatgcggatctcgttgaagttggccggcgttccgcccttgctcgaacggctcttggtgccgctctgggtggcgttcgccggcagctcgtagggcaccgtctgctcggcgttgtagacccgcccggtgatgatcggccggtccgggtcgccttcgaggaagctgacgatcacttcctggccgattcgcgggatctgcaccgagccccagttcttcccggcccaggcctgcgagacgcgcatccagcaggagctgttctcgttggactggtcgtggcggtcccagtggaaatgcaccttgacccggccatactggtcggtccagatctcctcgcccttgggcccgaccaccaccgcggtctgcgggccacggacgatcggcagcggagtggtcggcaaggggcggtaggcctggccggcatcgatgcagtccagctcgctttcgaactgcgcgcccaccccgccgccgccggtctcgtagagttcctggaccacccggtactcggcgccgaccaccaggtactcgcggttctggtcctcgcgcgggtagccgctgagcttgaacaggtggcccgaacccaggccgcgggcgcggccgcgcaggcgcacccgttcgtagcgcgcctgcaaggcttcgatacgggtccgcgcgtactgctcgccgtcctggctctgcacgtattcgccggggtagtcgtacagcgggtagtcggccgccgcgtgcgagcgggcgatgttcgaacgcacctccaggcgcgcgccgggacgctggaagtcgtagtcgttgaggctcagtga

SEQ ID NO: 347079 - DNA, 1437 bp, Pseudomonas aeruginosa; identical to SEQ ID NO: 324756

SEQ ID NO: 347080 - DNA, 1611 bp, Pseudomonas aeruginosa
atgctcgtgtatgtcaataatttcctgtttgaaccggcacaggggccggaccagatcgttcagctcgtggccaagtgggtggggcagcgagcaaagagttatgtcgataccgcgcgacttgccgagggcatccgagagctgaagctcaaggatggcagcacgttgacctcacgtgccacttggtccgccgacaaagggagaacctatcccttctggttctgtgcgcagcttagccaccgggacgaaaaaatttcgggcaggcgctggatcaccgaaatcggtctacaccaagaagccgaggggcaggctatcgagtgctctttgctgctgaggaccgacgaggtcagcgcacgggtgaacgcttcaattcaggtgactcgtccgaaactggtcgagcaactcatccagtcatgcaaccctctcgggcaaacccctgggttaaaagtcaaacaactgacgctggaaagtgcatcagcttttctgcgagaggtggagcgcgacgagcggaactatccgattgtgatactgagcaccaatcgcgataacgaattcccggttactccagagcgcttacggtcaatattggtggggttggccgacgtcgtttgcgtgccggcagaagaagacacatttgccattgaagagctggttggacgccgcttcatggcttttggcggggccctcaacattgtgtttcctggccgccaaggcgatcgcgggctcttttatgaaacggtgctgttgcgccctgatgaaattgttgaccttctagacagcggccactcgatcgagtccgaggtcttatccacgataacgcatcgcaccaacctaccatgttcatggaggcatatttcgccggaaaaggtggggcaggctgtattgcgcgctcagttggcacagatgattgaacgggcgaaggctggcgatcaatcagaggagctgacggaatacgtcgctctgctggagtctgccgatcaggaactgcagtccaaggacaaagagcttgtacgcattcgttccaactacgaagaaaaggaacaagaggttcgatcgcttcaggcggatatcgccaacctcaaacacgcgttgagtggcttgcaatcaagcgacgatggcggagatggcgttgcggagatcctggcgcccttgcgcgacactgttgccgctgttctcaagggaaatccaagtctccaacagactgtggatctgatcgccacgctttattcggaccggattgtcttcctcgaaacagccaagggttcagcgaaagagtctgatcgtggcgggttccgtcagggggcgaaggcattcgagctgttgcaaaagctcgccacagaatattggcagcagcttgctgatggcaaaagcgatcaacaggccaaagcagtatttgggcaaaacgcatatgcagccaatgaggctagtgcactgagcagcgacggtaagcgtcgacgcacctttaactaccgtgggcgcaaattccttatggagaagcacctgaagcacggtgtgaaagacagcttggccgagaccttgcgtgtgcatttcgagtggctggctcacgagaagaagatcatcgttggccattgtggcaagcatctggatttctga

SEQ ID NO: 347081 - DNA, 789 bp, Pseudomonas aeruginosa
gtggccgacaacaagccctatacgacacagttacaagcaggccttggactcgtcaatgagaccaagacgctgctcgacctgtggtcgcccggcatgtcggcgaaccagttacatcaggccgcgctggaatcggggcgattccccaccgtcaccgcacgccggcttcgcaacatcgtcgtcgaatgttttgctccgcgctacttggtggccggtggcgcaccagccgcacacctcaagcgactgtccgcaacgatttcaaccgctgacctgacgcagctcatgctcgtgtttacgagccgagcgaacccgattctcggcgacttcgtgcgacacgtgtactggacgcggtatgccggtggttacacgcatgtcaccaatgacgacgctcgcacctttgtcgagcggggcattgacgatggcaagacggtcaagcactggtccgaaactacggttcggcgtgtctccgcctatctgaccggatgttgtgccgactacggaatgcttgaacgaggattgcgttcgagccgtcgcatcctgccgttccgtatttccccatccgtggccgcttatcttgcctacgagctgcatttttccggtgtcggtgacaacgccctgctgacgcacgaagactggcagttatttggcttggcgcgcgaagacgtgctggaagaaatcaaacgactctcgctgaagggtttgctcatcgtccaggctgctggcgacgtgatccgcatcagctggaaacaacaagacatggaggcgctctgcgatgtcctcactcaaggctga

SEQ ID NO: 347082 - DNA, 612 bp, Pseudomonas aeruginosa
atgccccacgccttgccgcccttgccttacgcctacgatgccctggaaccgcacatcgatgcgctgaccatggatatccaccacagcaagcaccaccagacctatgtgaacaacctgaacgccgcgctggaaggcacgccctatgccgagcagccggtggaaagcctgctgcggcaactggctggtctgccggagaagctgcgcaccccggttgtcaacaatggcggtgggcatgccaaccactcgctgttctggaccgtgatgtcgccccagggcggtggccgtcccgatggcgacctggggcgggccatcgatgagcagctcgggggcttcgaggcgttcaaggatgcgttcaccaaggctgcgctgacccgcttcggcagcggctgggcctggctcagcgtgactccccagggcagcttgctggtggagagcagcggcaaccaggacagcccgctgatgaacggcaatacgccgatcctcggcctggacgtatgggagcacgcctattacctgaagtaccagaaccgccgcccggaatacatcggcgctttctacaacgtgatcgactggcgggaggtcgcgcgtcgctatgcgcaagccctggcctag

SEQ ID NO: 347083 - DNA, 450 bp, Pseudomonas aeruginosa; identical to SEQ ID NO: 342794

SEQ ID NO: 347084 - DNA, 2025 bp, Pseudomonas aeruginosa; identical to SEQ ID NO: 323985

SEQ ID NO: 347085 - DNA, 1371 bp, Pseudomonas aeruginosa
atgatggggcagttaccgggaggacagcagcgcctgttctactcgttcaacctagaagatcacgtcccggctcaacacctcctgcgcagcatcgaccagtgcctggatcttagtgatctgcgcgcctacctggcggacttctatagtcccatcggacgcccctcgattgacccggaattgatggtgcgcatgctggtcgtcggctactgctatggcattcgttccgagcggcgattgtgcgaagaggtgcacctgaacctggcctatcgctggttctgccggctgggtctggaagacgaagtccccaatctctcgaccttctcgaagaatcgccatgggcgttttcgtgacagcgatctgttccgctggttgttcaatgaggtgctgcggcgttgcatggcagccggcctagtcaagggcgaaggttttgccgtcgacgctagcatcatcaaggcggatgccagccggcaacgtggggtagcgggagatgaggtcgattggaacgatccaaagctcagcagccgcgcagtgcgcgagtacctcgaagcccttgatgaagaggcgctggctgaggctcttcccaagaaaatttcgctcacagatcctcagtcccgttggacagcagcgccaggtgggccggccttttttgcctactccacgaattacctgatcgacactgagcacggtgtgatcatggacgtggaagctaccccggcgcaccgtaccgccgaagtcgattcgactaggacgatggtcgagcgtgtcaaagctcagttcgatctcacaccggaacgccttatcggcgataccgcttatggcaccgccccgatgctggcctggatggtcgaagaaaaggacatcgagccgcatgtgccggtgtgggacaagactgagcgcaaggacgacagcctctccagtaacgacttccactggaaccaggaggccaatgaataccgctgcccagccggcaaaccactacgcagtgagtggcgcgccttcacccagaaaagatcgcgggtgaccaaggccaacaccatcatttatcgctccagccaaaccgactgcactacctgtccgctgaaagcgaaatgctgccccaacacgccgaatcggaagatcgtccgcagtatccatgaggctgcccgcgatgtggccaggcgcatcgccaagacaccggaatacctcgtctctcgctgcgaacgaaagaaggtggagatgctgttcgcccacctcaaacggatcatgaaactcgatcgtttacgactgcgcggcctgacaggtgccactgacgaattcactttggcggcggcggtgcagaacctgcgacgcatggccaagcttttgcctcaagggccaccgctcacgggatag

SEQ ID NO: 347086 - DNA, 141 bp, Pseudomonas aeruginosa
atggccgactcctttggcgccaacctcatggccgggcagttgtctgtggatgaagcgagtcccgagtctcgcttctccatgagccgcgagcacttttcagtagctcaagtcagtggtagccgccatgtgctcaatgtgtaa

SEQ ID NO: 347087 - DNA, 738 bp, Pseudomonas aeruginosa; identical to SEQ ID NO: 241786

SEQ ID NO: 347088 - DNA, 312 bp, Pseudomonas aeruginosa; identical to SEQ ID NO: 241775

SEQ ID NO: 347089 - DNA, 1428 bp, Pseudomonas aeruginosa
gtggtccctcatgaacgccatggccgccgaggtcatgctgccgctcgtggtcgggcggtagccgtcttcgatcatccgcccaggcagggctcggaacagcaggtagaacaggtcgtccccgtagccgcccatcagcgtgcctgtcagcagcaaggtcttgcgagccttcgccgccagcacgcccatggcctggccctgggcactgccaccgttcttgtactcgtgggcctcgtccgcgatgcacaggtcgaacgtgccttgaggcaggtagcgcttgatgaactcggacggctggtagccgccttcgccgaagccgaactccatgttcgccatcgctctttccatgcgatgcgcctggcggtcagagaagaccagttcgccgttgccgtccatgaggttgatgaactcatggatgttgtcgcccagcatcgacgcgaggaagccttcgccgaacttctgcatcagcttctgcgcggtgacttccccgatcgtcgggatgcgcttgagggctttcagcacggccgaggactggtcgctgccggacaggctgcgcgggcggatcagcgtccacaggggggcggcgcaatggctgcacttcctgcggtattcctcggcttggagcgcgaccggattgaccggctcgccgtcgaggtcggtgatgaccgtgccgcagtccgggcacgccgccacgttgccgtgacgggtgcgccgctgggtgaagacgggcttccagtggaaccccatccgcatcctgacccggcccaagacgaagaactcctggcccgtgggctggacattcaactgctcgcgcagcttgatgagcttgatgagcgtgtccggcccgttgagcacccacaccttggcgcctgccaccgtctcctggatctcgcgccgccacttgtaaacaaggtgcggcggcgaaagaaccagggtgcggcgatagccttcggcgttgagcacggcggccgtggcgatgccgacggtcgtcttgccgcagcccatttcgccattgacgatcgcggcgcgttcgccacggtcgatcagcagctcggcggcggcgtggacgacttcggcctgggccggaaacagcttgcgcttgaggctggcgacgacgagttgccggtgcgcctgcggctggccgttatagaccggcgggttcgcgctgttgagggcgtcgagcagttcgtcgccgaactcgccgacgaaatcctgaaggctcagggtcagaggggaagattccgcatcgagcagttcgccctgtacgggcgcggcttcagcggcagtggtttcgagatcgagggacatggtgatgctccaaagaaaatggggcatgcaccacccccgcggggcgatggcatgccccgtggtgggatgaagagacggcaggcggccgtcgtctgggagagatcagtactcgctgggcagtag

SEQ ID NO: 347090 - DNA, 162 bp, Pseudomonas aeruginosa
atgcgaatctcacgtggcctctatgtggcgccggtcactgggcgcttcggcaaacgtgcgccggcgacggagaaggtcattagtgcgatagcttcgaaaagccatcaggtaatcgctttaagcggtgcccgcgcagcgaaccttctagggctaacgcaatag

SEQ ID NO: 347091 - DNA, 879 bp, Pseudomonas aeruginosa
atgcaccacggtctccgaccggaagcagcaatccggccaggccagcagcacgttgaggaccacacccagcaaggtcgtatcgcgtcgcgccagagcctgtttcagctccgcggtcagccgacccgccagatcgcggtaggccgcggcttgcgccgtgtccatcgcgacttcacggaactcctcgtcatacggcggcaggacgttgccaccgatgtccttgagcttgagaaagatcgtgaacggcaggatgcagcgcagcacgcccttggggccaaaccccggggccttgaccgtgcgcaccgataccttggtgcccttggccgtcttgtgcgccgtgccggtgctctcggagtagatgtccttcaacaccccgtgatcgcgcatgaacgccatcgcagccgaggtcatgctgccgctcgtggtcgggcggtagccgtcttcgatcatccgccccggaagggctcggaacagcaggtggaacaggtcgtccccgtagccgcccatcaacgtgccggtcagcagcaaggtcttgcgagccttcgccgccagcacgcccatggcctggccctgggcactgcccccgttcttgtactcatgtgcctcatcggcgatgagcaggtcgaacgtgccttgcggcaggtagcgtttgatgaactcggacggctgatagccgccctcgccaaagccgaactccatgttggccatcgcacgttccatgcgcgtggcctgacggtcggaaaacaccagctcgccgttgccatccatgaggttgatgaactcatggatgttgtcgccgagcatcgacgccaggaacccgtcaccgaacttctgcatcagcttctgcgcggtgacctctccgatggtcggtatgcgctttaa

SEQ ID NO: 347092 - DNA, 618 bp, Pseudomonas aeruginosa
atgtctggctgccggaaatgcgcggccatggcctgtcgattcgcaacgatggttaccgggacaaccgggtcgccgactacgcgcgctacgacctgccggcgctggcctccttcatccacgagcagtgcgggcagccggcgcactggattggccactccctcggtggggtggtgctggcggcgggactgggcgggggctacctggaccaggcgcggatcgcttccgtggcgttgttcggtagccaggtcagcaccgcgcactggctgttcaggttgcccatggcaggcatcctcgcgcgcctgctgctgcgccgcgtcgatgcgctgtccggaagccgttggcggcaggggccggaagacgagccggtcggcctggcgctggaggtcctgcgttggcatgggctgttcggccgcttcggcgagccgggcaacgactggtggaaggggctcgccgcagtcgacgtaccgctattggcggtcgccggggctggggaccggcaggacccgtcctgggcctgtcgcaagttgttcgagcagttcgcctcgtccgagcgcgaatacctgttgctcggacacgaggctggctacgccgaggactacgggcatatcgagatgctga

SEQ ID NO: 347093 - DNA, 159 bp, Pseudomonas aeruginosa
atgtacatcaagaaagacgtcatcgaggtcatcaagtacgcggcgatgatggcggcctgctctcgccagtcctggggaatctaccccatgaaccagggctacaaggccatgcccttccgtggcgactatcaccgtgtcgtcgaagtctgccatccctga

SEQ ID NO: 347094 - DNA, 561 bp, Pseudomonas aeruginosa
atgagtgtcgaagaggcagtcgcgatgtacagcaaaccggcctacccggcgctgccatcgctattgggtgcggggaggcgattgctggtgatccagaacgccagtctggcggaagcggcgcgtctgcatgagcagctgagcgccgacggccagccactggagctggctagcctgcacggcgaggcggcgtggaccggccagcaggtcagttgtggtgcgttcgcgctactcgaagggcgcctactgatcctgttgtcatcagcgcccgtcggcacccgcctgtatatctgcggtgacgagagctttctctggcaggtcagccgcctggcacgcgagagcggcctgctggatgaagagatcgagcgggtcaaggtgggtagcgcccgcgagctgtattgcgtgcactgcgccacgcagcagtgcatcggaacggaaactacggtgatctgcagcggctgcggtgtgcatctgatggtgcgcgagcacttctcccgccggctcggtgcctacatgggcgtctgcctcgatgcgcagcggccacatggggagggccggccatga

SEQ ID NO: 347095 - DNA, 723 bp, Pseudomonas aeruginosa
atgctcaagaaactgactctcgccaccgctgccgccagcgccgtgaccgccagcagcttcgccgtcgccgaaaccctctccagccctgttggcgacttcgacgtcagcatgaacgtcggcctgacctcggactacatcttccgtggcatttcgcagacccagggcaacggcgcgatccagggcggtctggacgtggcccatgaaaatggcctgtacattggcacctgggcttccaacgtcgacttcggcggtgacgcttcggtggagttcgactactacctgggctttggcaacgacatcaccgagaacatttcctacgacctgggctggatcaagtacgactacccaggcgagagcgcgctgaacttcagcgagtactacggcagcctgagcgcctacggcctcacggtcggtgcggcctattccgatgacttcggcggcagcgacaccaccctctactcctacgtctactatgagtacgccctgccctacgacgtcggcctggccctgcagtacggcaagtacgatttcaaggacgccaccttcggcaacgacgattcctacaacgactggtccatcggcctgagcaagacgctggtcggcctcgacttcggcctgacctacagcgacaccagcctgagcggcagcgaatgcgcaggcttcgtcggcaaggacgactactgcgacgcgaccttagtggtctcggtttccaagaccctgtaa

SEQ ID NO: 347096 - DNA, 312 bp, Pseudomonas aeruginosa
atgaagatcatgccctgcccgctcaacgggccccgcaacatcagcgaattcacctacggcggcgagctcaggcagatgcccgaccccgccgcctgcaccgacgccgaatgggccgactacgtgttcaactgcgaaaaccgggctggcgtggtgatcgagtggtggatgcacaccccctccagctactggttcctcgccgaacgccatacggtgaccgacgaaatcatccgcaccttcgatccgaaggaaatcttcagccagcgcctggacttcaaggccaccgctgccgcatccgggagggtcagcgcatga

SEQ ID NO: 347097 - DNA, 2910 bp, Pseudomonas aeruginosa
atgagcgccttcaaccgcctgcctgcgcccatgggcctgctgatcgaccgctctcagccactgagcttcagcttcgaaggcgagcgctaccagggcttcgctggcgacagcatcgccagcgcgctgctcgccaaccagcgctggctgctctcgcgctcgttcaagtaccaccgcccgcgcggccccttgagcatggccggccaggacgccaacaccctggtccagctgcccagcgagccgaatgtgctggccgacgcgcatccgctcagcgccgagctgcaggtgaccgggcagaactacgccggctcgctggacaatgaccgcgacgccctgctcggcaagttctcgaaattcatgccggtcggtttctactaccgctccttctacaagcccaaaggcatctggaaggtctgggagccgctgattcgcaggaaggccggcctcggcgtgctcgacctcaagttccagcccgagtaccacgacaaggccttcctgttcgtcgatgtcgccgtggtcggcgccggccccgccggcctgcaggcggcattggatgccgccgacgccggcgcccgggtgctgttgatcgagcagcagccggtcctcggcggctcgctcaactgggcgcgcttcgacgtcgaccccgctgttgcggcgcgactgcgcgagcgactggtcgcggcggtcgaagcccatcccaatatccaggtgctcaccgatgcggtgtgcaacgcctggttcgccgaccactacctgccggtcattcagggcacacggctgtacaaggtgcgcgctggccagtgcatcgtcgcctccggcgccttcgaccagccggtgatcttccgcaacaacgacttgccgggcgtgatgctgaccagcgccgcgcagcggctgatcaagctctatgcggtgaagcccggcacccgtgcggtgctgctgaccggcaacgacgacggctacctggccgccctcgatctgctggaggcgggcgtcgaagtcgccgcgctggtggacatgcgcgacgcgccagcggatgccacgctgctggaagtcctggaggcgcgcggcattgcctgccagctcggcagcacggtctacgaggcgcagcatgaaaagggcatgcgccacatcagcggcgtcgacatccggcgcatcgtcgacaagggcgaggtcgcaagccaaggcctgcgcctcgactgcgacctgctctgcatgtcggcgggctacatgccggcctatcagttgctctgccaggcgggcggcaagctgagctacgaggattcgcaggcgaccttcagcctcagcggcctgccggccgggctgcgagccgccggttcggtgaacggctacagcaatcttaagaacgtgctgctcgatggcgcccaggctgcccgccaggcggccagcgggctcggaatcgatcctgcagcgcccatctccggcggcttcgtcgccgaggcacaggtcaacttcccctggccgatctttgcgcaccccaagggcaaggaattcgtcgatttcgacgaggacctgcagatccgcgacatcatcaacgccacgcgccacggctaccgcgatgtgcagttggtcaagcgcttctccacggtcggcatggggccgtcgcagggccgccactcggcactgccgacggcgcgcctggtggccgcggcgaccaaccgttcggtcagcgagactggcgtgaccaccgcgcgaccgcccttcgtcgcggaaaaactcgcccatgtcgccggccgcggtttcgacccgtaccgccagacaccgctgcaccagcgccaccaggaactgggcgcgaagatgatgcccgccggcgtctggcagcgcccggccttctatggcccggcgcagcaacgcgagcgctgcatgcaggaagaggctgtacatgtgcgcagcaaggtcggcctgatcgacgtgtccaccctcggcggactggacgtgcgcggcccggatgccgccgagtttctcaaccggctctacaccttcgccttcgccaagcagccggtaggccgctcgcgctacgcgctgatgaccgacgagcagggcgtggtaatcgatgacggcgtctgcgcgcgcttcgccgatgaccatttctacgtcaccgctaccaccagcggggttgatcgcatttaccagcagatgctcaagtggaacgcccaatggcggctgaacgtggacgtcaccaacgtcaccgccgcgctggcggctgtgaacctggccggcccgctgtcccggcaggtgctgcgcaaggtctgtcatgacgtcgacctgtccgccgacgccttcccctatctcggcgtgcgcctaggcaccgtgctcggcatccccgcccggctgatgcgcgtcggcttcgtcggcgagttgggctacgagattcacgtcccggcgcgctacggcgagtacctctgggattcgctgatgcaggccggcgagaaggacggcatccgcccgttcggcgtcgagacccagcgcctgctgcgtctggaaaagggccacgtgatcatcagccaggacaccgacggcatgaccaccccggccgagatcgacatgacctgggccatcgcccgcagcaagccgttcttcgtcggcaaacgctcggtggagattctggaaaagcagccgctgcgccgcaagctggtcggcttcaccctgcccaagggcgccagccagccactggaagggcatctggtgctgaacgggccggacatttccggcaacgtcacctcctgtgaatacagccagaccctcggccagatcatcggcctggcctatgccggcgcgcaccaggccgagcccggcagtctcattcccattcgcgtcgaaggcggcgaagtggtccaggcgaccgtcgtcaagctgccgttcttcgatccccagaaccaacgtcaggagctgtaa

SEQ ID NO: 347098 - DNA, 900 bp, Pseudomonas aeruginosa
ttgcccagcgaccagaaggactggctggcaaaactggccttcaacgggatcgagatttgcttgcacaaggccatgccggatctcgggatgctcgggctgaacatcaccctgcaggggccacaaggaagcctcgcctgggccagcgacaatgcgaacctgagcgcacctgggcgcacctgggatctggcggcggccggtgtgcggatcgtctgcggcacactccccgtcctgccggcagagcgcgtgctgaacgcacccgatctgatgcttcctacgcgccccggtctggtcaaggtcgagatcagcgatcagctggatggttcgctcgatggctttgcccgccgcttctgggagaacctcaggcatgacgccggcagcctgctggatgatgccctgacaggcaaggatccgatcaccgaactgatctacagcgaccgttatgtatgcagcccgctagtcgtaaatctgctggtcaacgttattcatgagctgggcaggcatagcgatggagacttcgccatccgcatccaggggcgtcagtaccagaaagatgacaaccgctcaccttggcagtgctggcacgactggcggacatctcaggagcgcgatgaagctatccgtcaggctttggagtactgcggcttcgaaggcgaggtgctcagcctcccatctttgccgcactaccgtcagctgcaactgcagttgcgctccggaaggcagctgaccgtccagctcgatcagggactttcatattgggaggccgagcgtagcgagaagtcctacctgctcaggttcgacttcgcagcgcgtcagttaggagaggaaatcatggagcgcatccagtgcaaggttgtagctaccggtgatgaatgcacccagattttcatttacgtgacctaa

SEQ ID NO: 347099 - DNA, 1623 bp, Pseudomonas aeruginosa
ttgaataggaccttattccgtcagatccagaccggatctaggctgttggctattggaaacttgttcagagcccctactcctggggcgcagtggcgactggcggcactcttcgagggtaatggccagtcgcaattgaagcggtttccactggaaatgtcctgtgtccttgcggttggtcgcgagtttcctggcgaagaaggggccccttaccggtccagtggtttcaagaaggcggtggtgctgcctccaatagatagctggcgggaaaggcaattgggtgactgtccaaggctcgccagaaggctggctgcaaatcctgagatatctggacagcgatgctttgtgttcgaggttgacggtctgaccgtctggttaccgaaattcgagctggcacgcaaactgttcttccacgcagctttcatagtccgtgcagccttcgagccgaatggtctagacatggctttcacaatctacaaagagggcgatgctgttcatatccatacgcctacgaagacgggcgcgccaagtcagcttctcaaaattaagggatatagggaccacttcagttggctgctactgaatcaggatgtgaagcgatccttcgagtcaatctggcaaagcctcaaccaagagcaagagcgcacatcgcaagagtcggcatatgccaggtggaagttcgacttcatggcacccatttccctagcgggtaccaccatgaatatgcgaggcccttttgatccgaaaagcaacgagttgctggtctgggaaatcgaagcgcttcaaggcctcagcttcagccatcgaggcgatatttttttccaccatcctgccctgaagcaaccagtgaggggagagggtactggctgtgtatccgtgccatcgggagctgaagaggtggaagtagatgctatcgaagagccgactgctgccaaggaaccaaggctgattcatctacccgttgagggaattacttttgatgctcagttgagcaccaggattgcctacaacggggagcgtgccagcggtcatggcaagaagatcgacgatgagcaatgcccgagcaaagaaggccaactcttaggcgtggctgatcctgtgagcggtggcagcatagcgccaggggaattccagcaattgggcgagggtgatagggaggagcatgagcggtttgcaaatcgcttctcgttgctccgtgaggtcattgaacagatcgctcaggagcctcgaattacgctggtatcactggaggtgagaccattgccacccgttccgcgctgcagctatcacatgctcgatcacgaaaaaccacgctgttatttgctggcaaaattcaaactgccaaacggcaatcagcgctaccttctagaaatagacacctcagacaaccgcaagaccatgtcaacacggatcatgggcttcaaagcaggtgttgaggccgagaaatgcatcgacaggatcttgaggcagacagtgaaaggttcgttgcgctggccgcacactatggcgaagttctgtgagcctttgcgctctgtacatcacccgaaagaaagctcattcggtgtcaatcatgccaaggtgttcgaatggaagcagcgtatacaagcctgtcttagtcgggagtaa

SEQ ID NO: 347100 - DNA, 1503 bp, Pseudomonas aeruginosa
gtgtactttcccaggctctatccggacgagctgctctacagcggcattgctcgctgccgggtccatctggggatcagcaatcacaaaactctgcttcatatggcgttcggtgacagcaaggtcgccgccatcaccgacctgcccacgcacttggccgctctggcgaacaacactgggctggatacggcgaacgtgatcatgcatcacacgctgtttccgctctatgcccccttcattccagcgaagcggcgtaacgatctgttccaggccatgcttgcttccgaccggtcgaccatcggtctggctgggtcttcggcggctttggtcaagtggcccgactggctgcgttactgccctgtctgttttgaggaaatggctgcccgtttcggtgagacttattggcggcgaagctggcagattaaaggggtagatgcctgtcccgagcatggctgtcagctcctgaactcacctatcccgttccgtcgagcgcagcggcatgaatttcatccggcctcgccattgtttctgccctgtgactctcgcacgagcccggcgagcgaagaagctatcaggctcgccaagactgccacgcaactgctggcgcttgaagaggcgcaatcgcctggctacggtcgctggaccaacctgtacaggtacctggccacagagtgcggtgccaggcgtggccggcaagttagggctgaagtcatatgggaaaagatcctggaatctcactgcaggaattggcttactacgaatggtctgctttcccacgaagagcctccgccctggctgctggcgatgttcaggaagcatcgcaagggattcagtgcgctgcagcatctgatcgtctggactagcctgcgcccgggccagcatgctggcgagctgatcggcgaggcgaagacacgccaggccgacgtttctcccgatcagtttgccaggcaacttccggcaagggcaggccaaacacagatgtaccgtaccctttggctgcaagcactggataatcacggtggagccaaggcagctcgacaaaatggcggggatgcgtgttatgcctggctctatcgtcatgatcggcactggctgatggctgcgaaccaagccaggcagcgtcgacagggcaacaacagccacatcgattggcgagcgcgcgacaggaagctagtacgtctgctgatccggcttggcaaagacagcgaagatgacctgaccttgccacgcaggagccgcaactggttcctgcagcagctaccccatcgggcatcaattgagcaccatctcgatcaaatgcctctgtgccgcaccttcctgaatcgctatgccgagtccgtcggcgagtttcagattcgccgcctgactgcagcgatgcaggaggatattcgggtcggcatatcatccaggcgctgggagttggaaaagcgttgtgggctggaaaaaagcagtatggcaccgctgaccactgcgttcattcgattgataggaagatggattgaatag

SEQ ID NO: 347101 - DNA, 603 bp, Pseudomonas aeruginosa
atgctcagcactgatcaagcccagtcggtatccgcccggattgcgcaacgagtcaagcgcctacctaaagggcagccgttcagcattagccgtttcacagggtttggaacgaaaaacgccgtatccaaagcaatagctcgactggtcaaccgaggcgagctcgaacgggtgtatcgcgggatctatatgcgcccgaaacccggacgctacgttgccagggctcgccccaatccctggaaattgattagcctgattaccaagcagaaacgcttgtctctgcagatccacggcgccaatgccgtcagaaggtttgggctcagcacccagatgccactcattccaatctattacaccaacggagccagccgttcagtattcattgggaacgctgaaatcaggctgatacatgcggcccctatggtcatgcagcatgcagggactgagatgggtgccgctatcagtgcattgttttatctcggtaaaggcggctcaactcctgaatgtattgcggcgatcaagaaagggctccgacctgaagacttagtcaaattgctggcctgcaaactgccgaaatggatgcgaacggcattggaagcgcaatag

SEQ ID NO: 347102 - DNA, 498 bp, Pseudomonas aeruginosa
atgcctacgatcctccgctacctttccgtctcccttgcttccgccctggtggccgcttatacggccctgtggttggcctaccccgcgcccctggaacagccccatgcggttgttcgcccgccgctgatcattcagcagcagggggacgatctgttgttgtggggtggctggaatacggtggccggttacgagccgcccggggtgaatgcagtggagattcgctgcaaccgcggccgcggcacctgccaggaggcttttgcctcgatccaccatcacgacgagggcgaagacctggaagcccaggtgttcgactacgaagtggtggagtggacggagcagatgctgcatgccacggcgaccatgcccgaggccgagtgcgtgacacgcagcctggtggtcgcactgccggccggctccgcctcgctggagctggtgccgcagggcgatgactgcgagttcgaggtcagcgctgcgatgctggagggtgacccgctctag

SEQ ID NO: 347103 - DNA, 1260 bp, Pseudomonas aeruginosa
atgccgacctatgccctggtggactgcaacaacttctacgtgagttgcgagcggctgttccgccccgacctgcgcacggtgccgatggtggtactgagcaacaacgacggctgtgtggtgagccgcagcaacgaggccaaggcgctgggcattggcatgggcgagccgttcttcaagatccgcgacctggtgcaggcgcatggcgtgctggcgttcagcagcaattatgcgctgtacggcgacgtttccgcacgggtggtacgggtgctgcgcgggctggcaccgcgtctggaggtttattcgatcgacgagagctttctcgacctggcgggcctcggccggccgctggccggttacggccggcacattcgcgcggaggtgcaactgctgacgggcatgccggtgggggtgggcatcagcaccacgaagaccttggccaagttggccaactgggccgccaagcggcgtagccagagcggggtggtggtggccacccggcccgagcagcaggcggcgttgctcaaggacgcgccgctgggcgaggtgtggggcgtggggcgcaagctgcaggcgcacctgggcgcgctgggtgttaaaaccgcctgggatctggcgcagcaggacgcctggacgatgcgcaagcagttctcggtggtgctggagaagaccattcgtgagctgcgtggcgagccgtgcttcgccctggacgaggggtcggagccgaagcagatgatcacctgcagccgcagcttctcgcgccgggtgacggagctggcgccgctgcgcgaggcggtggccagctacgcctgccgcgcagctgagaagctgcgcgcgcaaggcgatgtgtgccagctgctgcaggtgtatatccgcaccggggtgttcaacccggacgagccgcgctacgcgcgcaccgccagcgtgccgctgcacacgccgagcaacgactcgcgcgacctggtgcaggcggcgctggccgggctggagggtatctaccggcccggctaccggtaccagaaagccggggtgatgctgatgaacctggccagccccgggcaggtacaggccgacctgttcgccccggcgccgcggccgcgcagcgcggcgctgatggcaaccgtggacaggatcaacaccagcatgggccgcggcaccgtgcgcctggcgcgcgtgccggccctgggcggctggtcgatgaagcaggagctgcgttctccggggtacacctgccgctgggacgagctgccaagggtacgttag

SEQ ID NO: 347104 - DNA, 432 bp, Pseudomonas aeruginosa
atggcaaaccctttcaatttgttcacgcggatcggtgacaaagccgggtccgttggcgtgctgatttctgccataggctgtgcctcgtgtttccccgcccttgccggtctgggggccgcgatcggtctgggctttctgagccagtgggaaggcctgttcatcaccacgctgctgccgttatttgccgggctggccctgctcgtcaatgccctcggcgggttcagtcaccggcagtggcgacgcgctgcgcctggcctgatcggcccggccctggtgctgatagcggtgtatttgatgctggctcacggctggcggagcggctggctgctctatatcggcctggccctcatgtttggggtgtccatctgggatctcgtgtcgcccgcccaccgccgttgctccccgacgtcctgtccgactccgccaaaatga

SEQ ID NO: 347105 - DNA, 462 bp, Pseudomonas aeruginosa
atgaccatcgaaaccctcaaggcctaccaagtaggagacaacgacatcgtggccgcctacgatcaagtcggcgccatcaaggtgctctgcatcttctgcagctatccggatgatgaatacggcttggatgaagttcagctcgtggaaaacgaggtgcaggacgcaacagaagccaacgaccagaacgaagtggcaaccgtcaccctggagaagaccctacgacaggaactctctgagctcaccgagccagcgtaccttagccgcccggccatcatccttgctcgatgcgcggctggcgggtggactgtgaattcagccgctttgcctgtcgaaccaatgctgaagctcgtcgactggccggggatgtctaccggagcgggggtagtccaacttagaaatcccggcaaaatgtggacatcgtgtgtctcaaaagctgggccgattcactacctgcagccataa

SEQ ID NO: 347106 - DNA, 708 bp, Pseudomonas aeruginosa
gtggtaggaattactcagctggcccagtaccaagaagcctataaagttgctttgtctttgcatcggcagatggaaggcctagatgctcccgccctgctggtaatctttcgccagtttgagaacctgatcgttcccctggtgacggaggtcgatgaggggtgggctcattgcggctcgcttggcaggcacatgacattcctgaggcgctacctcgaacagggcaataaggcttactgtgcaagcgatgcgttcgatatagtttttcatgacatgcctgccttggctgattacctttttcaggcggcagcccgtcctcaccaccttgatgagaggcttgcggaggcgacctcccggctatttgaaatcgaagactatggttctgtcataagggcaacttttcctgtcctttcctcccgcattagaaggctatttggggttgaccctggtagcgatggtgagaatttggtcaatgaagtttttgccagaagtgggggcactaacccggttgtgcttcctgcggaagttaaaacagcctatcgaaatctgcttgctggcttctatgcgatttttcgcaataggctgaatcatgaagatttccggccaagtttcacccaggctcgcggggtggttgaaatggcaaactctttaatcaaagacttagaggcggttgccgaagagtctctgcaagccaactcgcaagagctatag

SEQ ID NO: 347107 - DNA, 207 bp, Pseudomonas aeruginosa
atgactactcgagcgagcgggacgttcaccgtcaaggaaaccggagacgggaggccgtatatcgtgtttgagccggacactgctgaaccaggtttccccaaaggccaactcggtatcgaactgggacacgggaccgatatcgaagaggcccaagaaattgccaagtatcttcgccagaaagttaggggagtttcattcacatcttga

SEQ ID NO: 347108 - DNA, 237 bp, Pseudomonas aeruginosa
atgactgactgcctgatctgtggtgccaatgccagaaagattgaatccggcctggacggcgaagaactgaattgcccggactgcggacattacggggtatccgggactttcttagccacgaaacgagaccggcgatttgacattaatcaaacccgcatgtggctggagcggcataggcatgcacgtccaggcaacctgccggtgattagtgatctatccgctttatgggcgatctga

SEQ ID NO: 347109 - DNA, 954 bp, Pseudomonas aeruginosa
atgcgctgcctctttttcatcttctccacaattgcatacctaaccacaacctctgcactagcagaggtacgtatcgtagccagcatcaagcccttacaactcattgcagcagcggtacaggatggcgttggcacgcctgaggtactactcccgccaggcgcatctccccatcatttcaccctgcggccttccgacatccgcaaggtgcgggaggccgatttgttctattggattggccctgatctcgagacgtttatgccaaaggttctggaagggcgaaatgcacccagcttggcggtacagcacatcgatggtcttcacctgcgtcgctttggcgacgaacatcggcacgacgaccacgcagacgagcatgcaaatgagtcacaggctgatggggatgcggagggcgcgcatgatgagctccaccgacctggaactctggatgcccacctctggctggcacctgacaacgcacgactgattgccaagcgcatggcagacgatttatcggcttctgacccaagcaatgcacgtcgatatgacgccaacctcgctgcattcaacgagcgtctttcgaatcaggatggtcagttgaaagcccggctcaagccgctcgcaggcaagccgttctttgtctttcatgaggcgttcgactatttcgaagaagcctacgctctgaagcacgcgggagtgtttgcagtcagcgctgatgtgccccccggcgccaggaaggtggccaatatgcgtaaccgcttggtttctgctggccccagttgcgtgtttagtgaaccgccagtacagcttcgtctggcccaaaccttgagtgaaggcttgccggtgcgaatggcggtgctggatgcgcttggctatgacatcgaagtgagtgcagttgggtatgagcgcttactgtcatcgcttggcagtgatctggcggagtgccttgagcagctgtaa

SEQ ID NO: 347110 - DNA, 1305 bp, Pseudomonas aeruginosa
atgctttccgttttggccaatcgcacttaccggcatttgttctttgcccaggtaatcgcgttagtcggtacaggcctggcgactgttgctctcggattgttggccttcgatcttgccggggcgcaggccggtgccgtattgggtacagcgctggccatcaagatgctcgcatacattggcgtggctcccgttgcggcagcctttgccgagcgcctgccaagaaagggcatgttgatcaccctggatctgattcgagcatctgtggcagtcgtgctgccgttcgtcacggagatctggcaggtctacgtgctcatcttcgttctgcagtctgcgtccgcggcctttacgccaacgttccaggcgaccattccagacatccttcctgacgaacgagagtacacgcgggcgctctctctttcgcggctggcctatgacctggagagtgtcatcagccccatggcggcggcgctgctactcaccgtggtcagcttccacagcctgttcggcggaaccgtcgtaggcttcctgatttcggcagcaatggttgcaagcgttaccttgccggctgtgcttgccgggcccaagaggagtatctacgagcgcaccaccagggggatgcggatatttctggcgacaccgcgcctgcgcgggcttctggcactcaatctggctattgctgcagccagcgccatggtcatcgtcaataccgtggtactcgtgcaatcccgatttggcttgccgcaaagttcgacagccacagccctgatggcctttggggctggctccatgctggtggccctgattctgccgcgcttgctggatcggcttgatgatcgcaaggtcatgctggccggcggcggtattctggttgcaggcctcttcctggggatactcctgcccagttacccgagcctcttggtgctatggctgctgctcggcgcaggctactcactggctcagaccccatccggtcgggtgttgaggcgctcatcgagtactcaggatcggccggcgctgtttgctgcacagttcgccctgtcccacgcctgctggttgatcacttatccgctggccgggtgggtcggggcgaattggggaatgaccgcatccttcgttggactgagcctgctggctctggccgctctccttgtcagcctgcgaatctggcagccagagcatgaccgtgatgtggttgaacatcgccatgaggatctgccggaaagccatccccatgttgccagtggcaaaacccatgctcataccttcgtcatcgacgatgagcaccaacgctggccaaaggactga

SEQ ID NO: 347111 - DNA, 1020 bp, Pseudomonas aeruginosa
atgcctgttaaaaccattcttccgagcctgattgccggccttctggcgatcaatgctcaagccgacaacttccgctatagcgacacgcacctgcatttcgtcgacttcttccagagcacggcagggacagcgtcactgctcaaggaaatgacggctgccaggattgatcacgccatgcttactggtatctcggtcgccaaggagtgggatgaaaacgagcccactcgaccccgctactacgcaggtgacgatgccagagcctactggtacagcgcgaccgacacattgattgcccacgcgtacaaacagttgcccgaggatgagcgaaggcgctttcacccattcatctccggattcaatccgaacgacatgaatgccgatgttcaagtgcgacgtttattggagctcgatcctggcctatggcaaggaatcggagaggtctttacccgtcacgactacctgacagccttggtctacggcaaggcaccgcgggcaaacagcaaggcgcttgcgagagtctatcgggtcgctgccgaattcgacctgccggttctgatgcactccaacatcacctccaagcgagaacgctatccgctctacctggaagagtttgaagcggcattacgcgacaacccggacgtgcgcttcatctgggcccatgcaggaacgagcatggaaatccatcgcacacagggcaagatggacttccttcttccagccctggcgcagttgcttgcccggtacccgaacctctacatcgatctgtcctggacggtgctgaccccttatctgctggatgagcaaggtgacccagatccagcctggatacagctggttagccgctacccgactcgcttcatgctgggctccgatgtcgtgggtacttttggcagcctgaaaaagtacatgttcagcttcgcccccttcctgaatgcactcccacaccaggtggcacaccaggtcgctctgtcgaacttcctcgctatcttgccggcagagcgacgcaggtcgattcagtga

SEQ ID NO: 347112 - DNA, 441 bp, Pseudomonas aeruginosa
gtgtgggacttgccggcctacctcggcctgttcatcgcagccttcggcgctgcgacccttctgcctctgcagtcagaagcggtgctggttggcctgctgctgacaagcgattactccattactgcactgttgctggtggccactgccggcaacgtcctaggctcagcagtcaactgggtactcggtcgctatatcgagcgataccggagtagacgttggtttccgctcagtgaagaaaagctaggccgtgcacaacgtgcctatcaccgatacgggcgctggtcgctactgttgagctgggtgccagtcattggtgatccgctaaccatgatcgctggggtaatgcgcgagccactctggagcttcctgttgatcgtcttggtcgccaaagctactcgctacatggtacttgcagcgctgactctgggtatcgcgggatga

SEQ ID NO: 347113 - DNA, 708 bp, Pseudomonas aeruginosa
atgaggcgtgacgcaggcctagatctcatcaagtggctggccatgctgacgatggtcgtcgaccacctacgctacctgtggccacaagcagaaggatggttgttttttattggccggctggcctttccgctgttctgcctgggtattgctgccaacgtatcccgttcacgcccagggcagttttacaccacaggtaatgctcgatacctgatatggctggcggttttctcggttgtatctgagctgccttatcacatgctttccaccgaaagcagttcgatgaacatcatgcccacgctcatgctgggcttgttgatagcttggagcgtccatcatcaaggacgtgacggcttgcttatcggtgttgtgagcctagctgtcgcattcattctgcatgaccggctcatgtatggctcttttggagtactgcttcctgccgcattggttgtggccatacagcgcccgggcccagccgggcttctacctgcagtgctctgtgtcttggccaacagccgtaatcgctggattgaaggctgggggctcgaatctgcgggggccagtatcgttgcggagttcatggcccctctgatcggtttatggctactgcgtgcgcccatcatgtggcgtatctggccggtgaggcggtggggatacttcttctatcccgctcatttgctcatgctctcaggccttcggtcagtggtgtaa

SEQ ID NO: 347114 - DNA, 888 bp, Pseudomonas aeruginosa
atgcgggcgtggcgtgcgctgaaggccagcggcgccgccgtccttcgcgacggcgtataccttctgccgaacaatgaagagtgcctagaagccttgtctgctgttgagcgcgatattctctctatcaacggcacggcctttctgcttcctatcgatgatccgcagggctctcggtttgttgagctgttcgaccgtaacgaggattacgccaagttgcgaatcgagatcgaggcgtgccaagcgcaactcacaccggacaacgcccttgccagtaccaagcaggtacgcaagctgcgtaaggcgtttgctcagattaccgccatcgacttctttcccacggcggttcgacagcacaccgacgctgcgctgcaagcgctggaactcgccattagccgagcgctgtcgcaggacgaaccgagcagccatgaccatcccatcgagcagcttgagcgacacagctatcaaggacgagtttgggcgacccgcaggagaccctgggtagatcgcctggccagcgcctggctgatacggcgcttcatcgacccgaaagccacgatcctctggttggagtccccaggtgattgcccgcctgatgcgctaggtttcgacttcgatggtgcggccttcagtcatgtcgggccgctcgtcacattcgagaccctgcaagccagctttgccctgaatgagccgggcctggatcgcgtttcagccttggtgcactacctggatgtagggggctcgcagccgcccgaggcctcggggatcgagcgagtattggctggactgcgggaaaccattaccaacgacgaccacttgctgacagcagcttgcgccatcttcgatgggctactggcggccttcgagaaagaagagaaaggcgatgagtga

SEQ ID NO: 347115 - DNA, 1713 bp, Pseudomonas aeruginosa
atggaggagctcagcaactcggacccggtattccggacgaacctgatgctggtgcgtaccgtgttctcgcagccgatcggcaatatgcccggcaccagcaccaccgaggaactcgaaaaggacctggtgacctcccggggcgagttggttaaaagccgtgaggagcagctcatcgcggattggttgttctttcacggggtggactacaagtacgaagcgccctacccgcacaggactgctgacgccgagcacagccagtaccatcccgacttctactacccagaggtggatctgttccacgagcactttgcgctaaatgctcagggcgagccgccgaaggagttcaaaggctacgcagagggcgtcgtatggaagcgtgcgcttcaccagcagcacgagaccgccctgttcgaaaccaccagtcataccctgcgctcaggcgaagggctgccagcattgaaagaggccctggaaagccgtgggctcaaactaaaacccgactccaaccgcattcctaccggacgccccgcccttgagactgacgtgctggcgcggatcattcggaacctgatgcagcacgccaaaggtaaccagctctcgcctgaagaactcagccaacgggcatctaggctcgatcctattcgaggccccctcatcatcgatctgtacgccaaggttttgcagcgctggcaggatgagctcaaggccaccggtacagtcgacttcgacgacatgatcaacctggccatcgagcatgccgagtcaggccggtaccggtcaccgtacaagctggtcattgcggacgagtaccaggacgcctcggccgcccgcgcacgcatcctgaaggccatcaccgctcgccccgacaccttcctcactgctgttggtgacgacgcgcaaagcattaaccgcttcgccggtgccgacatcagcgttatgcgtaacttcctggtgttctatggctctgggacgattcttcagctgaccctgacttttcgctgtccggatcagatttgcaaagtctccagcgagtttgtgcaggaaaaccccaagcagatccccaaagaggtgcgaaccagatcatcggtgcagggcaaggctatccagtgttttgccgccaagcatgagcgcgagctcggctcactggtgaaggaccgtctaaccaagatcgtgatgaagctacgtgccgtgtgggaccagccgcgcaaaccatccatcatgctgctgggtcggtaccggagtgaccgcccgcataacatgaatgacctcaaacagatttgtggccccgatatcgacctctacttcacaacggtgcacagcagtaagggcacagaggccgactacgtgctgatgctcaatgtcgtgggtggccgcaagggcttccctagccagattgaagatgatccggttcttcaatgcgccatgccagaacccgaagacttcccctttgccgaggaaaggcgcctgttctacgtggcgctcaccagggcccgccgcggcgtgttcatcttcacggtctccggccggcgctcggcctttgtcactgagctggccaacaaaggtcatatcaacattgtcgacaaggatggccaggcggtttcgtcccaggcctgtccgtcctgcggaaaagggtttcgtacgcaacggactggaaagtacggagattttataggttgctcggaatacccacggtgcaattggaaggccaaataa

SEQ ID NO: 347116 - DNA, 1359 bp, Pseudomonas aeruginosa
atggcccttagtgactattggaagggacctgagcaccggaggcgggccgatgatcttgacctgcaactgactgaccttcaggcgcgctatcagcaacttcaggcactcaccaggcagatcggcgccatggaagtcgtagaggtcaaaaatctgatcgctcaggagaaaagaaagctggcggccgtgcaccaggaggttcagcgagctgagcaagatgcagctgcgctcgcgcaacgctcctctgacttgcagagggagatcctcgtctgggaagagacactgcttcttgaaagctttgcgctctacgagcccaagttcaagttgaactccagccatgagtacaaagcccgactggtcggggttcgcgagcagcagaaagccttaatcaaaagtggaacggcagcgagtggaaacactaactgggaggtgaatgggagcaaggtagaaggtcggaagctggtcaacgacatgatcaagttggtgctccgatcattcaacaatgaagctgactactgcgtcgacaatgtaaaattcgacaacgtagagctgggcgaaaagcgcattctgaagtccttcgaaacctgcaaccgtctcggcagagtgatgtccgttgagctatcgcggaagtacctgagcctcaagattgacgaactgcaccttgcccatgagtttcaggttaagaagcaagaggaaaaggaagatgccaagcgcgcccgagaagagctgcgggaacagcagaagctagagcaggagattcgcgccgctcgggagaagatcgctaaggagcgcaaacacttcgcgaccgcaatgcgcgagctacaggctcgcttggaaaaggcacaatcggaggaggaacgcgcgccgcttgtggccaagttggcagagattgaagcaggtcgcgctgcgctggaaagcgaagagaagcttatcgactatcgcgaacagaacgccaaagctggctacgtttatgtgatctccaacgtcggagcattcggggaaggaatttacaagatcggtatgacccgccgcctggagccaatggatcgcgtcgatgagttaggtgatgcgccggtgccattctggtttgacgtacatgcgatggttttctcggataacgccccagcattggaagcaaagcttcatgaacgttttgcggccggtcggttaaataaggttaacgggcgcaaggagttcttccgcgccgacattgctgaaatagaggcggtcattcgagaaaactacgatgctgctgtcgaggtcactcacgaagctccagcagagcagtatcgagagagcctacggatggaatcacccaaggctacagttcagcaattagaaccagctgcagcacagagctga

SEQ ID NO: 347117 - DNA, 1311 bp, Pseudomonas aeruginosa
atggtcgcctatgtgctgtccttcatcgaccggcagatcctcaacctgctggtcggcccgatccgccgcgacctggccatcagcgatacggaaatgagcctgctgatgggcttgtccttcgccctgttctacaccctttgcggtatcccgctcggacgcatggccgacaaccgcagccggcgcggcctgatcctgttcggcgtgctggtgtggagcgcgatgaccgcggcctgcggtctggcgcgcagctattggcaattcctcaccttccgggtcggcgtcggggtcggcgaggcggcgctgtcgccagcggcctattcgctgatcgccgacagcttcccgcgcgagcgtcgggcgacggcgatcagcgtctactcgatgggcatctacctgggctcggggctggccttcctgctcggcgggctggtgatcaagttcgcctcggcccagggcgacgtgcatctgccgctgttcggcgaggtgcgcccgtggcaactgatcttcctcatcctcggcgccgccggcgtgctcttctgcctgttgctgctggctatccgcgagccggcccggcgcggagtcggcgcaggcgtggcggtgccgctgggcgaggtcggcgcctacctgcgggccaaccgcaagaccgtgctctgccacaacttcggtttcgcctgcctgtccttcgccggctacggcagcggcgcctgggtgccgaccttcttcgtccgcacccacggctgggacgccggtcatgtcggggtggtctacggcagcatcgtcgcggtgttcggctgtctcggcatcgtcttcggcgggcgcctggccgactactgggcgaagcgcgggcgtagcgacgcgaacatgcgcgtcgggctgctcgccgcctgggcggtgattcccttcactctggtctatccgctgctggacaacgccaattgggcggcggcgctgatggcgccgacggtgttcttcctgagcatgccgttcggcgtggccccggcggcgatccaggagatcatgcccaactcgatgcgcggccaggcctcggcgatctacctgttcgtggtcaccctgttcggtctcggcgtgggcccgacggcggtggcgctggtcaccgatttcgtcttcgccgacgacatggcgctgcgctactcgctgctgctggtgaccctggccgcggtgctcggtgcggtggtcctgctggggatcggcctcaagccctatcgcgccagcctggagcacctgaaggactggagcctgcgacgggaaggcgagggcggcgaggattggaaggcgtcccggcagccggcctga

SEQ ID NO: 347118 - DNA, 330 bp, Pseudomonas aeruginosa
atgctgaagaaaagcttcaactccctgctcaccacctggctcgccggcctgctggtgatgctgccgctggtactcaccctagccttgctggcctgggtggtcagcttgctgaaccgcttcgtcgggccatccagcctgatcggtcgcggcttcgccgccatcggccagccgctcgccggcgattcgccactggcctacctgctcggtaccgcgctactgctggtagccatctacctgcttggcctcggcgtacagctaggcctgaagcggccgctggccaacctgttcgacctgaccctgcggcgcaccccgctgatcggcaacctgtag

SEQ ID NO: 347119 - DNA, 363 bp, Pseudomonas aeruginosa
atgatcgagatccctcccgcgacttttcgagtcacaccctacggagaagtggatggtgtagcactggacaagctgcgagccagcttcgacacctcccagcttctgcgactggttgaccaattcgatgcctgtctggctgagttaggtggagttgtggctgtccgagatgagctgctgaagcttcatgcgatggccctaacccttgtagagggtgtgccactgacagtacctactgagaatgcctgcatctggacggaggctgagtcgctgcaacagaatctcgagaccctcgctgggtgggtgcgctctgctcaagctggaataatccccttggtcaatctagcgcccgaccacgaacagtaa

SEQ ID NO: 347120 - DNA, 165 bp, Pseudomonas aeruginosa
atgtgcgagttatccggctatttcggcctgttcctcgccgccttcggtgccgccacgctgctgcccatgcagccggaagcggtgctggtcggcttgctgctgaccgacccctatgccgcctggacacggctggccgtggcgaccacgggcaatgtactgggctaa

SEQ ID NO: 347121 - DNA, 1134 bp, Pseudomonas aeruginosa
atgtcgagcttcgctgaactgctgcaacagggagcctcgcaggcctggttgtacttccccagtgccatcctgctgggagccttgcatggcctagagccagggcattcgaaaaccatgatggcggcgtttatcgtggccattcgcggcacggtgaagcaggctgttctgctgggactggcctcaacgctttcccacaccgcagtggtttggctggtggccatggccggcatgtacctggggcagaacctgaatgccgaaaccaccgagccgtatttccagcttgcgtccgccgccataattatcaccatcgccctgtggatgctttggcgcacctggcgtggcgagcagatgtggcgcttcgaggaaggcgatgatcttcagcatgactatcaccaccacgatgaaatgcagcgcatcgacaccgggcatgggcgcatcgaactgtcgatcttcgaagagggcgtccctccgcgctggcgactgaatatcttgactggccatgcctggtcggcagctgaaatgagcctgctgacgacccgccccgatggcctggcccagcagtttcgcttcgtcgaccgaggtgactacctggagtcagtggacgagattcccgaaccccacgaattcacagcgcgcctgagcctcggccatgccggtcattctcacgactatgatctggagttccacgagcacggccacggtcatggccatgatcatgcagaactggagggcctggagctgtcgttggagggctaccaggatgcccatgagcgggcgcatgccaacgatatccgcaagcgctttagcaatcgcaacgtcaccacgggccagatcatcctgttcggtttgacgggcgggctgattccttgcccggcagcgatcaccgtgctgctgctctgcctacaagtgaaggaagtcgcgctgggagccgtgctggtgttgtgcttcagcattggcctggccatcaccctggttaccgttggtgctgccgccgctatcggagcacgccaggcgtccaatcgctggccctggcttggtgctgtggcgcgtcgcgctccgtacctgtccagcctattgatcatcggtgtggggatttacgtgggtgtccatggctggatcggcctgaacgcctag

SEQ ID NO: 347122 - DNA, 288 bp, Pseudomonas aeruginosa
atgagcgatcacgaacacggccatcagcaccaaagtcatagcgatatcatcaaaaggttgaagcgtgcggagggccacctgcgcagcatcgtcagcatgatcgaagacagccgggcctgcgtcgacatcgctcagcaactgcatgccgtggaaaaagccgtctgccaggccaagcgtgtgcttatccaagaccatatcgatcactgcctggaacacaccgtcgaagcactcgcgacaggtgaacgcgcatcgctcgaagacttcaagcaaatcactaagtacctctag

SEQ ID NO: 347123 - DNA, 129 bp, Pseudomonas aeruginosa
atggattcgttatccatgagcgcaatgggcgcatttgtcgtgcgtccgaatcgctcgttattactgctgctgttgtttatgggcacctcgaataacgcgaggttttcagtgaatccgaccgccaaatga

SEQ ID NO: 347124 - DNA, 174 bp, Pseudomonas aeruginosa
atgatggccatgatcgaattcggttcgatttctgcggcgaatcaccgctttctgggcggtgtcgccccgtttttcttccgaatcgccctctgcagcggcgattcggcccactccgggcgtcagaaggccttgattcccgccttctggaagtacaccagccgcttcaagttgtag

SEQ ID NO: 347125 - DNA, 1038 bp, Pseudomonas aeruginosa
atgaagaagcgcactgccatcaagacggacctgttcgctgacgaacatcatcggaagaagatcgacacgcttggagatccgctggcccagatcgagtcgtacatcgatttcgcggcacttgcggcggaagtcgatcgggtagcgccgcgccctgtcagccctcaaggcggtcgcccgccgtatccgacggagacgatggtgcggattctggtgctcaagcggctgtacaacctgtcggatgaacagatggagtaccagttgcttgaccggatgagctacaagcgattctgcgggttggccagcgcggtcaatattccggatcgaacgaccgtgtggacgttcgagaaccgcatcggcgacgccggcgcgaaggtcctgttcgacggtgtcacggcccaactgctccggcacggattcatcgcccgcggcggccaaatcgtcgatgccacgctggtgcctgctcccaagcaacgtaacagccgtgaggagaacaagctggtcagggaaggcgcgatgccggctaactggaagccagccaaacggcgccagaaggatacggatgccacctggacgcagaagcacggcaagaaccacttcggctacaagctctcggtcaacgtggacaagaagtacaagatcatccgcaaattcgagactgatacggccagcgtccatgacagcaagcacttcgatgcgctcatcgaccggagcaacacgagccgcgatgtctatgcggaccgaggccacaccagcgcagaccgggagggctggctcaaggatcacggctatcgtaatcagatccagaggaaggggtaccgcaacaagcccctttccgagtgtcagcaacggcgcaaccaccgcatcgccaagacgcgtgcccgagtggagcacgtgttcgcgagcatcgagcagatgggcggcaagttgatccgtaccatcggacaggggcgcgcgaactttgcgatgacgatgatggcggcctgctacaacttgaagcggctggtgtacttccagaaggcgggaatcaaggccttctga

SEQ ID NO: 347126 - DNA, 396 bp, Pseudomonas aeruginosa
atgagcaacatgccacagagcgacgaattggatgccctctcgttgaaaggccgcagtggctttacccgcattatttatgccactagatactcgctggcaggcttgcgggcagcgtttcaaggcgaagccgctttcaggcagctgctgttattaaatgcagtgcttctgccgctggcttgtctggtggatgcaacgcccagtgagcgcgtgttactgatactcgtgccgatgctggcgttgatagtggagctactcaactcagccatagagagcactgttgaccgtatttccctgagcatccacccactgtctaaacaagccaaggatatgggaagtgcggcgcaactcattgcactgatactgattgcccttacttggggtttgatcctgttatag

SEQ ID NO: 347127 - DNA, 1653 bp, Pseudomonas aeruginosa
atgcctccccgcataccagcgtccgctgatgcctccaatgcgaaagaaaaacttggccttagcgaacacctggcctccctttttggcagtgcagcgctgttagtagctttgctgaccctgttacgcgtggccctattacttttcaaccgagagctgattggagctaccgcgtggaccagcctggcagaagcgttttttaatggcctgcgtttcgacttgcgcttagtggtctatatctgcgcaccactgaccctggcattggcatatcgcccggcaatggtctgccggacatggcaacgcatttggctggggacttgcgcagcggtagctatcctgctcggcatgattgaactgaacttctatcgagagtttcatcagcgtctcaacgcattggtctttcaatatttgcaagaagacccggcaactgtgctgagcatgctctggtatggctttccagtgctgcgcctactgggtgcctggctggcgttgagcgctctctttttcgtactgctgggttggctggatatacgcactcgtggcaagggccgctcaaccgtcgagtcgcgccgaacaatgaataagctcggtcatggtatggcgctgctgctttgtctggctatatcggtcgttgtggcgcgaggtactttgcggcaagggccgccactacgctggggggatgcatttaccacagactcaatgtttgccaaccacctaggcctcaatggcaccttgagcctttatgccgcggccaagaaccactactcaggtgatcgcgccgacaaggtttggaagagccgcatgcccgcagatcaagcgacgaccctgacacgcgatctcttattcaccgaacacgaccgcctagcagaccagaacacagcagcgatccgccgcgatttccagcccccacaagacaggcgcctgccgatccgcaatgtcgtagtgattctgatggagagttttgctgggcactttgttggcgcgctcggcagcgaagctggcatcacaccgaacttcgaccgactggctcaggagggtgtgctgtttcgccgcttcttcgctaatggcacccatacccatcaaggcatgtttgccagcatggcctgtttcccaaatttacccggtttcgagtacttgatgcagactccggaaggaggccaccaattctccggtctggctcagttgcttagcactcgcgacttcgacgatctgtatgtctacaacggcgattttgcctgggataaccaacgtggctttttcagcaaccagggcatgacacggtttatcggtcgtaatgactttgttgaccccgtggtatctgacccgacatggggagtggctgaccaggatatgtttgatcgcgctgcagaagaactgttcaagcaagacccgaagaaacccttctatgcactcctgcaaacgctttcaaaccatacgccttacgcgctgccaggtgtgttgcctgttgagcccgtgacagggcaaggttcgcttgatcagcacctgacagctatgcgttattctgactgggctctgggacgattttttgaaaaggctcgtaaagcgccttatttcaaagacaccctattcgtggtcgtgggtgaccatggctttggtgctcaagagcagttaaccgagatggatctgtaccggtaa

SEQ ID NO: 347128 - DNA, 267 bp, Pseudomonas aeruginosa
gtgaagacatcgcgtttttcggacagccagatcatcgccatcctcaagcaggctgaagccggcagcccagttccggcgctgtgccgcgagcatggcatcagttcggcgaccttctacaagtggcgtgccaagttcggcggcatggatgcatcattgatgaccaggctgcgtgaactggaagaggagaaccgtcggctcaagaagatgtacgccgaggagcgcctcaaggccgagatcatccaggaggccatggcaaaaaagtggtaa

SEQ ID NO: 347129 - DNA, 312 bp, Pseudomonas aeruginosa
atgagcaagcacaccaaattttcccctgaagtccgtgaccgggccatccgtatggtttatgaggtccgggagtcccgcacatcgcagtgggccgccattgaggccgtggccagcaagatcggctgcaccgcccagacgttgagcagttggattcggaaggcggctgcgcctgcggccccctccgcctcgggcactgatgcccgcgtcaaggaactggagcgcgaggttcgtgagctcaagcgagccaacgaaatcctcaaggtcgccagcgctttttccgcccaggcggagctcgaccgccgtttgaagtga

SEQ ID NO: 347130 - DNA, 312 bp, Pseudomonas aeruginosa
atgatcgtaatcgcttatgccctaagcccaatcgatctgattccagacttcattccggtccttggctacctggacgatgtgatcttgctacctttggccatctggctagtaatcaagctgatgcccgatcacgtactggacgaatgccgccagcaggcccttgaatgggaaagcacacagcaacaccgcccagtgagccggggcgctgcgctggtggtcatcttgctctggctggctctgttgatcggagcctggaaactctatacccgctctgcgccgggtcggctttctcgcacttgggctcctgagtga

SEQ ID NO: 347131 - DNA, 237 bp, Pseudomonas aeruginosa
atgaaccgcacggtcgttggtgcggggctaaccagcacccttggtgatttctgctatgaaactaccacagtgatcttgcccagcttcctcgctgtactgggcattccggcggcggcacttggcaccatcgaagatattgctgatgcattggccagctacaccaagatggcctccggctacgtcgccgacaaactcggccaccgcaagctattggcgctggttggctacggattctag

SEQ ID NO: 347132 - DNA, 360 bp, Pseudomonas aeruginosa
atgaccacgacgacccgcaccagcaccgcagaacgcctcggccgcacctttggccgcggatggcgtgcctatgcgcgcggcgaacgacgggcgtcgaactggttgatctccaagggagtgccgatagctggcgctgtcgcgctcgtgtgggtggtcaagttggccgcgctcggggcgctgctgtacaccaccttctggctggctctgctgctggtgtgcgtcatagtcgttgcctggatggcccgcaataccgacctgggcgaggagttgcccgagccagaatggcgaaacggaccagccgggttcggcttgtacacctacgacggttttcgcattgatcctcatgtcgaggatgactag

SEQ ID NO: 347133 - DNA, 495 bp, Pseudomonas aeruginosa; identical to SEQ ID NO: 241755

SEQ ID NO: 347134 - DNA, 786 bp, Pseudomonas aeruginosa; identical to SEQ ID NO: 241756

SEQ ID NO: 347135 - DNA, 930 bp, Pseudomonas aeruginosa; identical to SEQ ID NO: 241765

SEQ ID NO: 347136 - DNA, 762 bp, Pseudomonas aeruginosa
atgaaggacgccgcctcgactgcacaacgggagcagaaccagcgccagggcctgatcgtcggcaccatcaccttgccgttccggctgctcggggtgctgatcggctcgctgctgttctcgatcgtcgtggagtgcgtcggcatgcacctgttctggaaggaccagggctggcggcactcgcagcagatgttgcagtacgaactggggcacctgtccagccacttcacgcgcagcgtcgtcgtgcaggagccggggcgcaccgcgcacgaactggtggataccggctacgaatgggtattcgttcgctccgggctgctggagcgcatgagccagaccgccgagcgcgcccgcgcgccgagccacgggaggatccaggacggggggcgcaactttcgctactacatcagccaggtctatgtctggaccgagaactacctgattgccgcggccttcaccaccctcacgtttctggtgcgcctgctggttctggtgctcacgttgccgctgatctgcaccgcggcgttcgtcggcctgatcgacggtcttgtgcggcgggacgtgcgccggttcggcgcaggccgggaatccggcttcatctaccaccgcgcgaaagccagccttatgcccctggccgtgctgccgtggatcacgtacctggcactgccgatctcggtgcatccattgctgatcctgttgccgagcgccgccttgctgggactggccgtgagcctgactgcgggcagcttcaaaaaatacttgtga

SEQ ID NO: 347137 - DNA, 642 bp, Pseudomonas aeruginosa; identical to SEQ ID NO: 241771

SEQ ID NO: 347138 - DNA, 600 bp, Pseudomonas aeruginosa; identical to SEQ ID NO: 241772

SEQ ID NO: 347139 - DNA, 870 bp, Pseudomonas aeruginosa; identical to SEQ ID NO: 241773

SEQ ID NO: 347140 - DNA, 1656 bp, Pseudomonas aeruginosa
gtgcgcccgacgtccccctggctattcgccaccggcccgacccaaggagtcctacatgccgctctccccgcccttcgccctgcgcccctgcctggccctgctgttgctcagcccttccctggccctggcggggaacgccgtcccgctgaccccgaccaccatcaccgccacccgtaccgagcaggcagtggattcggtgccaagcaccgtcagcgtgcagacccgcgaacaactggaccggcagaacgtcaacaacatcaaggaactggtgcgctacgaaccgggagtctcggtcggcggcgccggccagcgtgccgggatcaccggctacaacatccgcggcatcgacgggaaccgcatccttacgcagatcgacggggtcgaactgcccaacgacttcttcagcggcccctacgcgcagacccaccgcaactacgtcgatccggacatcgtaaagcgcgtggaaatccttcgcggcccggcctcggcgctgtacggcagcaacgccatcggcggcgcggtgagctacttcaccctcgacccgtcggacatcatcaaggacagcaaggacgtcggcgcccggctgaaggccggctacgagtcggccagccactcctggttgacctcggccaccgtcgccggccgcgccgacgacttcgacggcctgctgcattatggctaccgccagggccacgagaccgaatccaacggcggccacggcggcaccgggctctcgcgcagcgaagccaacccggaagacgccgacagctacagcctgctcggcaagctgggctggaactacgccgagggcagccgcttcgggctggtcttcgagaagtacaagagcgacgtcgataccgaccagaagagcgcctatggcggcccgtacgacaagggcaagccggccatcccgccgagcatgctgccgggcggcatgtaccagtggcgcaagggcaacgacaccctgactcgcgagcgctacggcctggagcaccatttcctgctcgacagcccggtcgccgatcgcatccagtggagcctgaactaccagttggcgaagaccgaccaggcgacccgcgagttctactacccgatcacccgcaaggtcctgcgtacccgcgacactacctacaaggaacgcctgtgggtcttcgacagccagttggacaagagcttcgccatcggcgagaccgagcacctgctgagctacgggatcaatctcaagcaccagaaggtcaccggcatgcgcagcggcaccggcaccaacctggacaccggcgcggacagcccgcgcgatgccctggaacgcagcagcgactttcccgatccgacggtgaagacctacgccctgttcgcccaggacagcatcagctggaacgactggaccttcactcccggcctgcgttacgactacacgcgcatggagccgcacatcaccgacgagttcctgcgcaccatgaagcagagccagaacaccgcggtcgacgagtcggacaagaaatggcaccgggtttcgcccaagttcggcgtgacctacgacttcgcccagcactacacctggtacggccaatacgcccagggcttccgcacgcccaccgccaaggcgctgtacggtcgattcgagaacctgcaggcgggctaccacatcgagcctaa

SEQ ID NO: 347141 - DNA, 516 bp, Pseudomonas aeruginosa
gtgcactttctgttccgttgctccccaaaccccatcgacctgccggggctggtggcgcggccgctggcgccgaaccagatcgtgctttgcgccagccccgcctacctggcgcggcaacccgcgccgcaagacccggaggacttcgagcggcacgcctggctggtcttccagcacccttcgctgaaccagaacttctggtggatggaacgcgacggcgcccgccagcgtatcgaccagccgcgcccgcgactggccagcgacaactacgacttcctgctcgcccacctgctggccgggctgggcctgcagttctgtccgcagtggagtgtcgcgccgctgctcggcgaagggcggctggtgcgcctgctcggcgactaccacttcgacccggggccgttcgggccctccatccatgtcctctatccggggcaccggcgcaacacgcggaaggtccgcgcgttcctcgagcacctgcgcgccagcttgcagcgacaggggctgtgccatcggctgtaa

SEQ ID NO: 347142 - DNA, 2880 bp, Pseudomonas aeruginosa
atgaccgataacctgaacctcggcgccatcgacctgggcaccgacgacgaattcatcgcccgccatatcggcccgcgtgccgccgacacccaggccatgctccagcgcctgggctacgactcgctggacgcgctgatcggcaacgtgatccccgacagcatcaagggcagcagcgtgctcgacctgccggccggcatgggcgaggccgaggcgctggccagcctgaaggcgatcgccgcgcgcaatcgcgcgttgcgttccttcatcggccagggctactacaactgccacaccccggcaccgatcctgcgcaacctcctggagaacccggcctggtacaccgcctacacgccgtaccagccggaaatctcccagggccgcctggaggcgctgctgaacttccagaccctggtcagcgacctgtccggcctgccgatcgccaacgcctcgatgctcgacgaggcgaccgccgccgccgaggccatgaccttctgcaagcgtctgtcgaagaaccgcaccagccaggcattcttcgcctcccgccattgccacccgcagaccctcgacgtgctgcgcacccgtgccgagccgctgggcatcgaggtggtggtcggcgacgagagcgccatcgaagacttctccgcctacttcggcgcgttgctgcaataccccacctgcgacggcgagatcgtcgactatcgcgaactggtcagccgcttccatgcggtcgatgcgctggtcgcggtggccgccgacctgctggcgctgaccctgctgaccccgccgggcgagttcggcgccgacgtagccatcggcagcgcccagcgcttcggcgtgccgctcggcttcggcggcccgcacgcggcctatttcgccacccgcgacgccttcaagcgggacatgccgggacgcctggtcggcgtctccatcgaccgccacggcaagccggcctaccgcctggccatgcagacccgcgagcagcacatccgccgcgagaaggccaccagcaacatctgcaccgcccaggtgctgctggccaacatcgccagcatgttcgccgtctaccacggcccgcagggcctgctgcgcatcgcccggcgcacccaccggctgaccgcgatcctcgccgccggcctggagcgcctgggcgtggccgtcgagcagaagcacttcttcgacaccctgagcctggccaccggcgcgcgtaccgcggcgatccatgccaaggcccgcgccgccgggatcaacctgcgcgagatcgatgccggccgtctcggcctgtcgctcgacgagaccgtccgccaggccgacgtggagaccctctggggcctgctggccgaagagggccaggcgctcccggacttcgccgcccttgccgccagcagcggggaccgcctgccagtcgagctgctgcgccagtcggcgatcctcagccacccgatcttcaaccgccatcactcggaaaccgagctgatgcgctacctgcgcaagctggcggacaaggacctggcgctggaccgcacgatgatcccgctgggctcctgcaccatgaagctgaacgccgccagcgagatgatcccggtgacctgggccgaattcggcaacctgcacccgttcgccccggccgagcagagcgaaggctaccgccagctcaccgacgaactggaggcgatgctctgttccgccaccggctacgacgccgtgtcgttgcagcccaacgccggctcccagggcgagtacgccggcctgctggcgatccgtgcctaccaccagagccgcggcgacagccagcgcgacatctgtctgatcccgtcctccgcccacggtaccaacccggctaccgccagcatggtcggcatgcgcgtggtggtggtggcctgcgacgcgcgcggcaacgtcgacgtcgaggacctgcgcaacaaggccagcgagcacaaggaacgcctggccgcgctgatgatcacctatccgtccacccacggcgtgttcgaggaagcgatccgcgagatctgtgccatcgtccacgactgtggcggccaggtgtacatcgacggcgccaacatgaacgccatggtcggcctgtgcgccccgggcaagttcggtggcgacgtttcccacctgaacctgcacaagaccttctgcatcccccacggcggcggcggcccgggcgtcggcccgatcggcgtgcgcgcgcacctggcgccgttcctccccggccacgctcgcggcgagcgcaaggaaggcgcggtgagcgcggcgccgtacggcagcgcgagcatcctgccgatcacctggatgtacatccgcatgatgggcggcgaaggcctcaagcgcgcctcggaaatggccatcctcaatgccaactacatcgcccatcgcctggaggagcactacccggtgctctacgccggcggcaacggcctggtcgcccacgaatgcatcctcgacctgcgtccgctcaaggacagcagcgggatcagcgtcgacgacgtggccaagcgcctgatggacttcggcttccatgcgccgaccatgtccttcccggtggccggcacgctgatgatcgagcccaccgagagcgagtcgaaggccgagctggatcgtttctgcgacgcgatgatccgcatccgcgaggaaatccgcgcggtggaacgcggcgagctggacaaggaagacaacccgctgaagaacgcgccgcacaccgccgccgaactgctcggcgaatggaaccacgcctacagccgcgagcaggctgcctatccgctggccagcctggtggaggccaagtactggccgccggtgggccgcgtcgacaacgtctacggcgaccgcaacctgacctgctcctgcccgccgatcgaggcgtacagcgaggagtga

SEQ ID NO: 347143 - DNA, 273 bp, Pseudomonas aeruginosa
atggcgaaaacggcacggcgcagcggcatggactcggcttccgtaacggggacctgttgttccgaccacctggcgaaacgcttcgttcaggttgaaggcgggcccccggccacgccaaggcgcaggctagcccaccagttgttccagcgcctgcgcctcgtcgaaggcggggtgaaccgctgctcccggcagatccaccgcatctccctgctggccatcccggccgggctgctggcccagggctgcggcccgtacctgatgcggcaacgctga

SEQ ID NO: 347144 - DNA, 1038 bp, Pseudomonas aeruginosa
atgacaaagattattacgctctacaaccacaaaggcggcgtatcaaaaactacaacaacctatcacttagctcatgcgcttgttgaaagccaagggaaaaaggtattggttgttgacgccgaccctcaatgcaatattacagagctttttctttttaaaataatagaagaactggatgaacaagaagcacaggggaaaagtactgctctaccaggaacatccctgaaagatgcactctggcctcgactagatggcgaaagacccgatgtcgatgttgagaacataaagctcataaagcccaatgaaaatgaggagctttatattttcagaggggatattgcccttagcgaagcagaagaccgactttcttatgcccacagtcaaagaatgacgtcagacatgcatcaaaagcgaaatcatattgctatacacgacatgctaagacgactgggagagcgagactcatttgactatatcctcgtagatgtaggaccaagcgcaggggctcttactagagcatttttcttgtcatgcgatgaatttctaacaccagttgctcctgacagatataactatcaagctataaactctctatctgagattctaaaaaaatggatagacgagcatcgcggaattgttgcagatttcaagaaattaaaacttaacattgcagaagaaccccctgtattcaaaggactaataatgcagcgcttccagcgacacaatggaaacgctaagcctagctacaaactttggatagataaaatttctgaaagagcaacagaaaagcttctaccttctttaatggaagcaggaggagaagactctgtccatctcatcaaaaaggataatccaacaacaattgaaatacccgactttgcgagtatagcacctatgatgttgcagcttggaaaacccgcttggagactcgaaaagaaggaaacaggttggcaaggggctgtatgggatgatcgagagaaagcgatggctgaaattcgtgaactgttcttcaacctagctgatcatgtcagtaactaa

SEQ ID NO: 347145 - DNA, 711 bp, Pseudomonas aeruginosa
atgtcagtaactaatatgtatagctgggaatatggaatcgttagcttcattgatatacttgggttttctagcatcgtagagcgcgatgctagaaaaatagagcctgaggacctcaagagaataaacgaggggttaaacgaagtacgcgaaatatataaggactccgggctcaatacaattctattctcggatagcatcatcatctcaacaagcctagacaaccaatctattatcaacataataaaaaatagcattgccatacaaaagagcttgctctcaaaaaaaatcttaaccagaggtggaattgcatttggaaaacactaccaagacgaaaagactttatactcagaggccttaataaaggcatattacctagaaacccaaaaagcaaaattcccaagagtaatcatcgataaagatttaattgattggctaaaacacgacaaagacacttctacagttcaaaaaaaagaagcccaagagctacttctcaaagacaaagacggggagatttttctagattatttatcagatgaaaatctagagcagtctctagagatactgactagcgcctctaaacaaataaaaagcgccaacattctagagaagtaccaatggttagattcataccataaccacaagtgccaacaagaccaccaagaactagcctgccatgcttatagccaaggactttcaaaatcgccactataa

SEQ ID NO: 347146 - DNA, 2946 bp, Pseudomonas aeruginosa
ttgattaccgttgatgagattttttcatgcctacaacaagaagaatcaccagtaattgaatttaaacgtgattggtactggaatgacaatacgccacaacaagaattttctcggcaatggggtgagcttcaaaaggatttgatctcactatgtaatgcctatattggatattgcggagtagacagatatcttattgttggtttctgtgaaaccgatagaaaaatacatccaatagatatatccagcattaagaagctgaaagacctaaaagcattcaagaaagacctagtctctaaactcgaaaaacttgtcaaaaatcccccactgaatctagagatagaaacagttcttatagagggccaaaccttattagccttcaaaatcccctgccccacatccattacagaactgaagaacgaattacaaaccaagacgattacaataatgtctgggatagtgatcgttagaaaaggccaagacgccgattcagttcgggctgcatctccaagcgaaacaaatgatttaatttctgaattttcatcatacaaagaactgctcgccaagcaaaagcctaaacaagaggtaaagagagatagaagtatcaagagcaccgtagacctgtacattgacaagaatagaagccttactattgacgatgattatccagtagccaacaaagactggaacgaaaatatattgtttgagatattcaagcttaaacaacaattctcacctcccacctacttcctctacatacacgaacacgccgcccaaaacaaaacctacgaatatattcaaagaaacaaactaattgagcctaacactacgatcatcattcttacagagcgaccatcagatctaaaagatcttgagcgtagaaaaagcaatttaaaaacacgtttcaaaaccgaacatgtattcttcattgatgagttcggctacaaaaatctctactctgaacacatgcttgagtaccagccttatcgcgtagaaaactacgttgaaggcattgcagatattggcggggatgataagaagaaagcacttgatcaactaaaggactggtatgactcagtctctaatccactaatggtcataaaaggctttggtggaattggaaaaacgacactcgtcaaacaattcctagatagtgtttatgacgctaacgaagatacaggaatcctctttatcgactcaaacgagattgtggatgaactaattaaaatcgcacgctctgatcatagaattgacgacatctatgatttctatctcgctcaaatgaaaaagcgagatttcgacggaaagggtttcagcaaggaattactaaagctctccgttgacaatggaaatttactaatagtcctagacggcatagatgaagtaatagccaaacttggtactggattcgatgtatcatcattcatctcgtccatctctacaagctatacaacaaacctagaaagaacaaaaatcgtcatcacttgccgagactatttctgggacactctacagtataaaacacaaatagaagagataactcttgagcctttcgatgaaggcttagcaaaagacttctttgaaaaatacttcaacaacgagcagacaaaagttaacaaagccttgaaaatggcctctgaatttagtcttagcgttgagaacaaagaaggcgaccttatttacatcccctatgttcttgacatgatcgcctatctgatcaagcaacattcagagtttgggggaactgaaaaatctgcggcccccgcaaaactccttctacataccatccccaatgactttctaattctcagtgtatgcgagcgagaagtagagaaactagggaactttgggattgatgaccaagtagacttccttataaatctctctattcaagacaatggctatgtaactgactatgatattaaaagcatatcgccgtgcgagatagacgatcaaaccatagagaagctaaaaggccacccacttcttcgccacaaccaaggcaaactgaattttagatacgatttctttaatgattatttcaaaggcctttatatctatagctacttcctaaatcaagaaagcacaaatctaaatgaaaaactcatagatctgattggatcatatattagacatggcaatcaactgtgcaacaccttgtgcaaaaaactagaatacagtgatgagctagtctttttcacaatggagacaattgagaagctacatgaactaatagatagtgcagaaccatcggagaaagccaaatatctttccgccatttcttctagcttcatattgaacctaactctcctaatggactctggagacatcaaatatgacatttcctcagcaacagacctattagttacaatatttggaaagtccccaggggaaattagcgggcttgcattaatgaacgttattgcaggagaatcaaaaaaactgacatttgacttaaaatctaaagtcataaaaaaatctcacttcgagagttatgactacttttgggattgcccaatggatgaaaacacttatttcataggctctagtttctctcaattagatcctagaaaagggctacgcccatcaataataccaacatttgaagactgcgacacggttgacatccaacacataataaacaagaaaataaaagaagatgatgagcagcaagagaagctcaaagagactatcaaagacatatttgaactattcaaagagcgtggaaatttctacccccaaaaacaacaatatattgagtcaaaaatattcactggaaagaccttaagaatacttgttaaaaatggagccatcgaagagtacatcgataaaaagaagcccacattacgtcaatatagagtaagtgatgactatcgaggcatacagaaattcgttgaccaagggacactttgtattgaattagataggattcttagtttcttcaaatga

SEQ ID NO: 347147 - DNA, 1059 bp, Pseudomonas aeruginosa
atgaataccctgttgatgcactgccggccaggcttcgaaggtgaagtctgcgccgaaatcgccgagcatgcagccactctcgagattcccggctatgccaagagcaagccggccagcgcccacgtcgagttcgtctgccaggacgccgacggcgccgagcgcctgatgcgccgcctgcgtttcgccgacttgatcttcccgcgccagtgggcgcgcgggcccggcttcatcgaattgccggaaagccagcgcatcgaggtactgctggcggaactggcgagttatccggtttgcggcagcctctggctggaggtgctggacaccaatgccggcaaggaggtgtcgaccttctgccgcaagttcgagaaaccgctgcgcgcggcgctggtgaaggccgggcggttgcaggaggacccggcgctgccgcgcctgctgctgaccttccgctccggccgggaagtcttcgtcggcctcgccgagccgcgcaacagcgcgctctggccgatgggcatcccgcgcctgaagtttccccgcgaggcgccgagccgttcgacgctgaagctggaggaagcctggcaccagttcatcccgcgcagcgaatgggacaagcgcctggcgccggacatgctcgccgtggacctcggtgcggcgccgggcggctggacctggcaactggttaaccgggagatgcgggtgaccgccgtggacaacgggccgatggcggagaacctgatgtattccgggctggtcgaccaccagaaggtcgacggctaccagtaccgcccgcgccagcgggtcgactggatggtctgcgacatcgtcgagaagccggcacgcaccggtgcgttgatcgagacctggatcggcgaagggctttgccgcgaggcggtggtcaacctcaagctgccgatgaagcagcgctacgccgaggtgcgcaagatcctccagcgcctgcgtgagagcttcgacgcgcgcggcctgaaggtagcgatcggctgcaagcagctgtatcacgaccgcgaggaagtgacctgccatctacgccgcctcgaacgctga

SEQ ID NO: 347148 - DNA, 240 bp, Pseudomonas aeruginosa
atgacccattctgtcgacgccattctcgacgccaccggcctgaactgtcccgagccggtgatgatgctgcacaacaaggtccgcgacctggcgcccggcggcctgctcaaggtgatcgccaccgatccctcgacccgccgcgacatccccaagttctgcgtgttcctcggccacgagctggtcgagcagcaggaagaggcgggcacctatctctactggatccgcaagaaggccgactag

SEQ ID NO: 347149 - DNA, 1311 bp, Pseudomonas aeruginosa
atgaacgcagcaatccatccccgttcggccgcggaacgcgcgccgtcctactacgccgccacgctcaacgaggaaaccgactatccgaccctgctgggcgcggtgacggtcgacatcgccatcatcggcggcggcttcaccggcgtcgccacggcggtcgaactggccgagcgtggctacaaggtagccctggtcgagacccatcgcatcggctggggcgccagcgggcgcaacggcggccaggtcaccggcagcctgtccggcgacgcggcgatgcacaagcagatgcgccaatggctgggcgccgaggtcgaggacttcatctggcacctgcgctggcgcggccacgagatcatccgccagcgggtggagaagtacggcatcgcctgcgaccttcgccatggccacatgcacgcggcgatgaaggccagccacatgggcgagctgcaggcctcctacgaggaggcggtgcgccgcggcatgggcgaccaggtggtcctgctggacaaggccggcgtccaggcccacctggagaccgagctgtactgcggcgcgctgaagaacacccgcaacatgcacctgcacccgctcaacctgtgcatcggcgaggccagggcggcggccggcctcggcgcgctgatcttcgaacattccgaggtgctggatatcgtccacggcccgcggccggcggtgattacccgcgagggaaggatcgaggcgcagcagatcctgcttgccggcgatgtctaccacaagctcgaacgcaggcagctcaaggggatgatcttcccggccatgggcggaatcgttaccacccggccgctgggcgagctggcacgggagatcaacccgcaggggctggcggtctacgattgccgcttcgtcctcgattactaccgccccaccgccgacggccgcctgctgttcggtggcggcgccaactactcgggccgcgactcgcgggacatcgccgccgagctgcggccatgcatcgagcgcaccttcccgcgcctgaagggcgtggagatcgagttccagtggagttgcgccatgggcatcgtgatgaaccggatcccccagctcggcaagctctccgacaacgtctggtactgccagggctactcggggcatggcgtggccaccagccacatcatgggcgagatcatggccaaggcgatgagcgggagcctggagcagttcgacaccttcgcccgttgcaagcacctcagggtgccgctgggcgacctcttcggcaatccgatgctggccgccgggatgtggtactaccagctcatggagaagctgcgctga

SEQ ID NO: 347150 - DNA, 1365 bp, Pseudomonas aeruginosa
atgaacttcgcctgcgaacaagaagcccaggatttcctggccgccaaccccgacatcgaactcttcgaactgttcattctcgacgccaacggcgtgccgcgcggcaagctgctgcaccgcgacgagctgctggccgtctaccgcagcggccggccgctgccgagcaccatcctcgggctgacgatgaacggcgaggacgtcgaggactctggcctggtctgggacgtcggcgacatcgactgccgcgcctaccccctgtccggcagcctggtgcgcctgccctggcgacagatcccgacggcggcggtgcaggtcagcatgcacccgagcgagggcctgcccgccagcgtcgccgatccgcggcacctcctggtgcgcaccatcgacgcgctgaagagcgagggctatcacccggtgatggccgccgagctggagttctacctgctcgaccgtgagcgcgacgccaacggccgcccgcaaccggcccgcgacgccgatggcggccgcccacgggcgacccaggtctacggcctgcgcgaactggagcagatcgagccgttcctcgccgacctctatgccgcctgcaaggcgcagggcctgccggcacgcacggcgatctcggaatatgccccgggccaggtggaaatcaccctcgaccacggcgacgccctcgtcgccatggaccaggcgatccgctacaagcgcctggtcaagggcatcgcgcacaagcacgggatgctcgcctgcttcatggccaagccgttcgacgacctggccggcactggcatgcacctgcacgtcagcctggccgacgaacaaggccacaacctgttcgccagcgacgaccccgccggcacgccgttgctgcgccaggcggtcggcggcatgctcgccagcctgctcgactcgctcctgctgttctgtcccaacgccaactcctaccggcgcttccaggccaacagctacgcgccgctggcgcagacctggggcgtcgacaaccgcaccgtgagcctgcgcgtgccgggcggcccggcctccagtcggcatatcgagcaccgcatctgcggcgccgacgccaacccctacctggccgccgcggcgctcctcgccggggtccaccgcggcatccgcgaaggcatcgatccgggtgcgccggtggagggcaacggctacgcccaggccggcaagcgcctgcccaccgactggctgaccgccctcgataccctgcaaggctccgagtgggcgcgggaagccttcggcgagccgttcctcggcgtctacctggcggtgaagcgcgcggaataccggcaattcatgggcgaggtcggcgagcaggactggcgctggtacctgacccaggcctga

SEQ ID NO: 347151 - DNA, 1398 bp, Pseudomonas aeruginosa
atgaccttccgacccttctggctggaccaggccctacgctccgaacatgcggcaccctgcccgccgctggccggggatacccgcgccgacgtgtgcatcgtcggcggcggctacaccggcctgtggaccgccatcatgctcaaggagcacgatcccgggctcgacgtggtgctggtcgaggccgatctctgcggcgccggcgccagcggccgcaacggcggctgcgcgctgtcctggtcggccaagttcttcaccctggaacggctgttcggactaaccgaggcgatccgcctggtcaaggcctccgaggacagcatccgggccatcggcgccttctgccagcgctacgacgtcgaggccgactaccggctggacggcaccctctataccgccaccaacccggcccaggtcggcagcaccgacagcgtgatcgccgctctggagcgccacggcatcaactccttcgccaagcgcccgctggccgacgtgcagcgcctggccggctcgcgcaggcacctggagggttggttctcgccggctgccgcgacggtgcaaccaggcaagctggttcgcggcctgcgccgggtcgccctgcaactgggggtacgcctgtacgaaggcacgccgatgcgaggactggagcacggccgcccggcggaagtggtcaccccccacgggcgggtcgtcgccggccgcgtggtgctggcgctgaacgcctggatggcgagggccttcccgcagttcgaacgcagcgtggcgatcgtctccagcgacatgctcatcaccgagccacgaccggacctgttgcaggagatcggcctgaccagcggggtcagcgtgctcgactcacggatcttcgtgcattactaccacaacaccccggacggccggctgatgctcggcaagggcggcaacaccttcgcctacggcggacgcatgctgccggtgttcgaccgcccctcgccgtatctcggacaactgcgtggcagcttgcgggagttcttccccgagttcgccgaggtcgccatcgaggccagctggaacggtccgtcggatcgctcggtgaccggcctgccgttcttcggccggctcgacggccgcgacaatgtgttctacggcttcggctactccggcagcggcgtcggtccatgccacatgggcgggcagatcctttcttcgctggcgctcggcctggacaatccctggacccgttcgccgctgacccaggggccgctcggccgcttcccgccggagccgatccgctatgtcggttcgctgatggtgcgcaacgcgatccgtcgcaaggagcacgccgaagacgccggccggcgcccgcgtcatctcgacgtacgcctggccaggttcgccgccgccgcgggcaaggccgacaagggttga

SEQ ID NO: 347152 - DNA, 354 bp, Pseudomonas aeruginosa
atgcatatcgaacgtttcgaagtcgtcaagcgtcgggccgagatggccctgcacggcaacacggtctacatcggcggccaggtcgcagacgaccccagcggtgacatccaggaccagacccgccagattctggagaacatcgaccggctgctccagagcgtcggcagcgaccgcggccaggtgctctcggtacgcatactgctagcccaccgggaggactacgccggtctcaaccaggtctgggaccagtggtttcccgaaggccgggcgccgacccgcgcctgtagcctggccgagttgatcgacccgcgctggcgggtggaaatgatcgtcgtcgccgcccgcccgcagtga

SEQ ID NO: 347153 - DNA, 1362 bp, Pseudomonas aeruginosa
atgaatcaacgtcccgggacggcgctgccgtcctctcccgtgtccagcttccagcgctggcgcctgcagatattcgcgatcacctggctggcctacgccgccttctatttcacccgcaaggccttttccgtcgccaagctcggcatcgccgaagatccgggcttccagttggacaagatggcgatggccgatctcgacgccatctatctcgccgcctatgccgtcggccagttcacctggggcgtgctggccgaccgcttcggcccgcgcatcgtggtgttcggcggcctgctgatctccgcactggccgcgctggtcatgggcaccttcgccaccctgccgatcttcgccacctgcatggtggtccagggactggcgcagtccaccggctggtcggggctgtgcaagaacatcggcagtttcttcgccacccacgaacgcggtcgggtgctcggcctgtggagcacctgctacgccttcggcggcctggtcgcctcgccgttcgccggctggtgggcgtacagcgtgttcggtacctggcacgcggcgttctactccagcgccgcggtggtcggcggcgtggccctgctgttcctgctgttgcagcgcaaccgcccggaagacgtcggccatcctcccgtcgaaccgcaggccgcgagcgaagccgtgcgctatgccggcttcaggccggaaggcggcaacggcggcagcctgcaggtgctcgccaaggtggtgcgcaaccgcacggtgctctgcctcggcctggcctacttcctgctcaagccggcgcgctacgcgatcctcctgtggggaccggtgatcgtctacgaacgcatgccggcgctcggcaaggtcggcgcggcgatcgttcccaccgccttcgaggtagccggcctgctcggcccgatcctgatcggcttcgcctcggacaagctgttcggcgcacggcgcatgccggcctgcgtgatcagcctgctggcgctgaccgtctgcctggcgctgttcgtcccggcgatgaccaccggcagcattccgatagtggtcggcctgctgttcatgatgggactgaccctgtacggcccggactcgatgatctgcggctccgccgccatcgacttcggcaccagcgaggccgccggcaccgcctccggcttcgtcaatggctgcggttcggtgggcgcgatcctcggcggtctgttgcccggctatttcgacacctacacggtgttcatcggcttcaccatcgcagccctgatcgccaccgcggtgctcctcccgcactggaacagccggcccggcggcgcacgggaaagcctgcggaatatccccagcctggcggacttccgtcccatccgctcctga

SEQ ID NO: 347154 - DNA, 882 bp, Pseudomonas aeruginosa
atgtcggtatcccatgcacagttgaaggctttccatgcggtcgccgtgtacggcagcttcacgcgcgccgccgagcgcctgtttctcacccagccggcggtttccgaccaggtgcgcaagctggaggagcgttacggcgtgctgctgttccaccgtaacaagcgctcggtgcgcctgagcgaactgggcgagcgcctgctcgcggtgacccagcggttgttcgcgatcgaggccgaggcggaggagctgttgtccgcctccagcgccctgcagaccggcaccctgaccctggcggtggatgcgccggtgcacgtattgccgcagatcgcgcgtttctgcgagcgctatccgggcatcgcggtgcgggtggagaccggcaataccgacgagtctctgcagcgactgttcagctaccaggccgacctggccctgttgggccgggacgtcagcgacgagcggttgctttcgctgaccctgcgcaacgatccgatcgtcgccttcgtttcgctcagccatccgtgggccgggcgcgagtcgatccgcctcgccgatctcgacgacatgccgctggtgctgcgcgagcagggctcggtgacccgccagaccctggaggaggagatgagccgcgccggcctgcggatccgtccggcgatccaggtcgagggccgcgaggcctcgcgcgaggcggtggtggcggggatcggcgtgggggtggtgtcggccgcggagttcggcgccgacacgcgggtccatgcgctacccatcgtcgattgccagcgacgcctgaccgagaccctggtgtgcctgcgcgaacagcgttcgcggcggatcgtcgagaccttcctcgacctggtcggcgaggacctgccggcgccgagctag

SEQ ID NO: 347155 - DNA, 180 bp, Pseudomonas aeruginosa
atgaattcgcaacacaccgataccgccaagcgccgcgtgatccccttcaatacgcagcagcacagcggtggcgccatcatcgacgcccagggccgggagatcccgatcaccgaggtgatgatccagcgcgcctgccgcgaactggacaggtccctggagcaggaacagaagcaggcctga

SEQ ID NO: 347156 - DNA, 1146 bp, Pseudomonas aeruginosa
atggacatgtttcgcctggggttggtggtcaatcccctggccgggctgggtggcccggtcgccttgaagggtagcgacggggtggccgccgaggccctggccagaggcgccgaaccacgtgcgctggagcgcacccggatagccctggagtgcctgttgccgctggtcgagaagatcgagttcctgacctttcccggggccatgggtggcgagttgctcgagcgcatgggcttccgccatcgcctgctcggcgagtggcagggagcggtcagcagcgcggcggatacccggttggcgatcgagcgcctgcaggaggccggtgtcgccctgatcctgttcgccggtggtgatggcacagcacgggatgttgccggggtggtgcgcgagcaacagccggtgctcggcattccggccggggtgaagatccactccggggtctatgccatcagtccgcgcgcggccggcgaattggccaggcgcctggtcgagggcggcctggtgcgcctggccagcggcgaggtgcgcgacctcgacgaagaggcgctgcgcgccggccgcgtcgccgcgcgttggtacggcgagatgacagtgccggaggagggccacttcatgcagcacgtgaagcaggcagggatggagtccgaggagctggtgctggtggacctcgccgactggctggcggaaaactgggaagacggcgtgcgctatgtgctcggaccgggctcgaccttgcatggcctggcgcgcaacctcggcctggaaaccaccctgctgggcgtcgacgtgctggagaatggcgcggtgattgcccgcgacgtcgacgaggcgcggctgttcgaactggtggacggtcatccggcgtacctgctggtcaccgccatcggcggccagggccacgtgatcggtcgcggcaaccagcagatcagtccccgggtgttgcgcgccatcggcctggagcgcatgcgggtggtcgccaccaagcgcaagctggggaccctcgggggccgcccgttgctggtcgacagcggcgacccggtgctggacgacagcttcccggacgccatccgggtctgggccggctacaaggaagaactgctgtatccgctgggatacgcgaaggaccaggacgcgcccgcgggcgcttag

SEQ ID NO: 347157 - DNA, 597 bp, Pseudomonas aeruginosa
atggacaaggacgtatccggcgcgctgcgccgcctgttgctgctcgccatgctcggactgccgctggtggcggccgctgcggtcgaaccgcagcgactggtggatgcggcgcgtgcccaggtgggcgttaccctgggctacgacccggcctaccggcaactggactatccgggcggtgacgtgccgctgcagaccggggtctgcaccgacgtggtggtccgtgcgctgcgcggacaggggctggatctacagaaggcggtgcacgaggacatgcgtcgccacttcgcggcctacccgcagcaatggggaatgaaaggtaccgaccgcaacatcgatcaccgccgcgtaccgaacctgatgacctggttcagccgccagggcctggccctggcgcctagccgcgacgcttccgcctaccgggccggagacatagtcgcctggcgcctggacaacggcctgctgcatatcggcgtgctttccgatcgcaggctggagggcaggccgctggtgttgcacaacatcggtgccggcgtgcgggaagaggacctgctgttccgctaccaggtcatcggccactaccgcttcccgcagggctga

SEQ ID NO: 347158 - DNA, 282 bp, Pseudomonas aeruginosa; identical to SEQ ID NO: 319761

SEQ ID NO: 347159 - DNA, 552 bp, Pseudomonas aeruginosa
atgcctcactggctggtaatcgatctggaggccaccaccgcggaaggcggctggcccctggaggaaatggaaatcatcgagatcggcgccaccctggtcgccgccgcggacgcccgcgaactggaccacttccagcgtttcgtacggccggtcaggcggccgctgctgacccacttctgccgcgacctcacgcatatcagccaggccaacgtcgatggcgcagcccatctcaatacggtctgggaagccttcgagcgctggctcgcccagcatcgtccgcgactggccggctgggccagttggggcgactacgaccgccgccagttggagcaggaatggcgccagcacgggctgaccagccagctcagcgaagtgccgcacgtcaatctcaagcaacgcttcggcgaagtccgccagttgccccgcccggtcggcctgaacgcggccctgcaactggccgggatgagtttccagggccagcagcaccgcgccctggaggatgcccgcaataccgcacggctgctgccgctggtattgccggtggagcattga

SEQ ID NO: 347160 - DNA, 867 bp, Pseudomonas aeruginosa; identical to SEQ ID NO: 319763

SEQ ID NO: 347161 - DNA, 342 bp, Pseudomonas aeruginosa
atgcccgtctggctgcaaaccgccttgttgctagcctgttccaacctgttcatgaccttcgcctggtatggtcatctgaagactctcaacagcaagccctggatcatcgccgccctgatcagttggggtatcgcgctgttcgaatacctgctgcaggtaccggccaatcgcatcggctacaccgaactctcggtcggccaactgaagatcatgcaggaagtcatcaccttggcgatcttcgtcccgttcagcgtctacttcatgcagcagccgctgaaactggactacctctgggccggcctgtgcctgctcggcgcggtgtacttcatcttccgcgcctga

SEQ ID NO: 347162 - DNA, 756 bp, Pseudomonas aeruginosa; identical to SEQ ID NO: 319765

SEQ ID NO: 347163 - DNA, 255 bp, Pseudomonas aeruginosa
atgcaatgtagagccggctgcggcgcctgctgcatagcaccgtcgatttcctctccgctgccgggtatgccggccggcaagcccgcgggcgtacgctgcctgcacctggacgaaaaccatctctgcgggctgttcggccgaccggagcgaccggccgtatgcggccagttcggcgccgatccggaaatctgcggcgacagccgtgagcaggcgctagccctgatcgcggagtgggaagtcatcactgccgcttga

SEQ ID NO: 347164 - DNA, 609 bp, Pseudomonas aeruginosa; identical to SEQ ID NO: 333786

SEQ ID NO: 347165 - DNA, 1287 bp, Pseudomonas aeruginosa
atggctgacaaaaaagcgcagttgatcatcgagggctcagcccccgtcgaactgcccgtcctatccggtaccatgggtcccgatgtagtggatgtacggggcctcaccgccacgggccacttcaccttcgatcctggcttcatgtcgaccgcctcctgcgagtcgaagatcacctatatcgacggcgacaaaggcgtcctcctccatcgcggctaccccatcgagcaactggcagagaaatccgactacctggaaacctgctacctgctgctgaacggcgagctgcccaccgccgcgcagaaggaacagttcgtcggcaccatcaagaaccacaccatggttcacgagcagttgaagaccttcttcaacggcttccgccgcgacgcccacccgatggccgtgatgtgcggcgtgatcggcgccctctcggccttctaccacgactccctggacatcaataacccgaagcatcgcgaagtctccgcgcatcgcctgatcgccaagatgccgaccatcgccgccatggtgtacaagtactccaagggcgagccgatgatgtatccgcgtaacgacctgaactacgcggaaaacttcctgcacatgatgttcaacaccccctgcgagaccaagccgatcagccccgtgctggccaaggccatggaccgcatcttcattctccacgccgaccacgagcagaacgcctccacctccacggtgcgtctggccggctcctccggcgccaatccgttcgcctgcatcgcctccggcatcgccgccctgtggggaccggcccatggcggcgcgaacgaagcggtgctgcgcatgctcgacgagatcggcgacgtgtccaacatcgacaagttcgtcgagaaggccaaggacaagaacgatccgttcaagctgatgggcttcggccatcgtgtctacaagaacttcgacccgcgcgccaaggtcatgaagcagacctgcgacgaggtcctccaggagctgggcatcaacgacccgcaactggaactggcgatgaagctggaagaaatcgcccgccacgacccctacttcgtggaacgcaacctgtacccgaacgtcgacttctactcggggatcatcctcaaggcgatcggcattccgaccagcatgttcaccgtgatcttcgccctggcgcgtaccgtcggctggatctcgcactggcaggagatgctctccggcccctacaagatcggccgcccgcgccagctctataccggccacacccagcgcgacttcaccgccctcaaggatcgcggctga

SEQ ID NO: 347166 - DNA, 387 bp, Pseudomonas aeruginosa; identical to SEQ ID NO: 319769

SEQ ID NO: 347167 - DNA, 375 bp, Pseudomonas aeruginosa; identical to SEQ ID NO: 319770

SEQ ID NO: 347168 - DNA, 1773 bp, Pseudomonas aeruginosa
atggctagcattcgtacactttcctttgacgccatcatcgtcggtggcggtggcgccggcatgcgtgccgcgctgcaactggcccagggcggccacaagaccgccgtggtgaccaaggtcttcccgacccgttcccacaccgtatccgcacagggtggcatcacctgcgcgatcgcttcggccgacccgaacgacgattggcgttggcacatgtacgacaccgtcaagggctccgactacatcggtgaccaggacgcgatcgaatacatgtgttccgtcggccccgaggccgtgttcgagctcgagcacatgggcctgccgttctcccgtaccgaaaccggccgcatctaccagcgtccgttcggcggccagtccaaggacttcggcaagggtggccaggccgcccgtacctgcgccgccgccgaccgtaccggccacgcgctgctgcacaccctgtaccaggccaacctgaagaatggcacctcgttcctcaacgagtggtacgcggtcgacctggtgaagaaccaggacggcgcggtggtcggcatcatcgccatctgcatcgagaccggcgagaccgtctacatccgttccaaggccgtggtcctggccactggcggtgccggccgtatctacgcctccaccaccaacgcgctgatcaacaccggtgacggcgtgggcatggccctgcgtgccggcgtgccggtgcaggacatcgagatgtggcagttccacccgaccggcatcgccggcgccggtgtactggtcaccgaaggttgccgcggcgaaggcggttacctgatcaacgcccacggcgagcgcttcatggagcgttatgcgccgaacgcgaaggacctggccggccgcgacgtggtcgcccgttccatggtcaaggaagtcctggccggcaacggcgtgggcccgaacaaggaccacgtgctgctgaagctcgaccacctcggcgaggaagtcctgcacagccgcctgcccggcatctgcgaactgtccaagaccttcgcccacgtcgacccggtcgttgcgccgatcccggtgatcccgacctgccactacatgatgggtggcgttgccaccaacatccatggccaggccatcacccaggacgccaacggcaacgaccagatcgtcgaaggcctgttcgccgtaggcgaagtggcctgcgtatcggtacacggcgccaaccgcctgggcggcaactcgctgctcgacctggtggtattcggccgtgccgccggtctgcacctggaaaaagcgctgaaagagggcatcgacgcccgcggcgcttccgagagcgacctggaagcctccttcaagcgcctgaacggcgtgaacgagcgcaccagcggcgaagaagtcgctccgctcaagcgcgagctgcaaagctgcatgcagaactacttcggtgtgttccgcaccggcgagtacatgcagaagggcatcgcccagctggccgacctgcgcgagcgtatcgccaacgtcaagatcaacgacaagagccaggcattcaacaccgcgcgcatcgaagcgctggaactgcaaaacctcctcgaggtggccgaggccaccgcgatcgcggccgagcaccgcaaggagtcccgtggcgcccacgcccgtgaagacttcgaggagcgcgacgacgagaactggctgtgccacaccctgtacttcccgggtgagaagcgcgtatccaagcgttccgtcaacttcgcgccgaagaccgttccggcattcgaacccaaggttcggacttactaa

SEQ ID NO: 347169 - DNA, 708 bp, Pseudomonas aeruginosa
atgttgcaagtgagtgtttatcgttacaaccccgacaaagatgctgcgccgtacatgcaggatttccaggtcgacaccaacggcaaggacgtgatggtcctcgacgtgctggcgctgatcaaggaacaggacgagggcttctcctaccgtcgttcctgccgtgaaggcgtctgcggctccgatggcatgaacatcaacggcaagaacggcctggcctgcatcaccccgctgtcggccgccggcctgaagggcggcaagctggtgatccgtccgctgcccggcctgccggtcattcgtgacctagtcgtggacatgagcatcttctacaagcaatacgagaaggtgaagccgttcctgcagaacgatacgccggccccggccatcgagcgtctgcagaccccggaagagcgcgagaagctggacggtctgtacgagtgcatcctgtgcgcctgctgctcgacctcctgcccgtccttctggtggaaccccgacaagttcctcggtccggccgcactgctgcaagcctatcgtttcctggccgacagccgtgacaccaagaccgaagagcgcctggcttcgctggacgacccgttcagtgtgttccgctgccgcggaatcatgaactgcgtgaacgtttgcccgaagggtctgaacccgaccaaggcgatcggccacgtgcgtaatatgctgctgcagagcggaacctga

SEQ ID NO: 347170 - DNA, 2832 bp, Pseudomonas aeruginosa
atgcacgaaagcgtaatgcagcggatgtggaacagtgcccatctatccggtggtaacgctgcctacgtcgaagagctctacgagctctacctgcacgaccctaacgctgtgccagaagagtggcgcacgtatttccagaagcttcccgccgatggcaatcccgcccccgacgtctcgcactccacagtgcgcgatcatttcgtcctgctggccaagaaccagcgccgtgcccagccggtttccgccggtagcgtgagcagcgagcacgagaagaagcaggtcgaagtccttcgtctcattcacgcttaccgtctccgcggccaccaggcttccaccctcgacccgctcggcctgtggcagcgtcccgcgcctgccgacctgtcgatcgaccactacggtctgacgggtgccgacctggacaccactttccgcaccggtgagctttacatcggcaaggaagaggcgaccctgcgtgaaatcgtcgacagcctgaagagcacctactgcggtaccttcggcgccgagttcatgcacatcgtcgattccgagcagcgcaagtggttcctccagcgtctggaaagcgtgcgtggtcgtcccggcttctccgccgaggcgcgtgcgcacctgctcgagcgcctgaccgcggccgaaggcctggagaagtacctgggcaccaagtacccgggcaccaagcgtttcggcctggaaggcggcgaaagcctgatcccgatggtcgacgagatcatccagcgctgcggttcctacggcgccaaggaaatcgtcatcggcatggcccaccgcggtcgcctgaacgtcctggtcaacaccctgggcaagaacccgcgcgacctgttcgacgagttcgaaggcaagaagatcgtcgagctgggctccggtgacgtgaagtaccaccagggcttctcctcgaacgtgatgaccagcggtggcgaagtccacctggcgctggcgttcaacccgtcgcacctggaaatcgtttccccggtggtcgagggttccgttcgtgcccgccaggaccgccgcaaggacagctccggcgacaaggtggtaccgatttccatccacggcgatgccgccttcgcggggcagggcgtggtcatggaaaccttccagatgtcgcagacccgcgcctacaagaccggtggcaccatccacctggtgatcaacaaccaggtcggtttcaccaccagccgccaggacgatgcgcgttccaccgagtacgccaccgacgtggcgaagatgattcaggcgccgatcttccacgtcaacggcgacgatcccgaagccgtgctgttcgtcacccagctggccgtcgactaccgcatgcagttcaagcgtgacgtggtcatcgacctggtctgctaccgtcgccgcggccacaacgaggcggacgagccgagcggcacccagccgctgatgtaccagcagatcgccaagcagcgtactacccgcgagctgtacgccgatgccctggtgaatgccggcgtgctcagcgccgagcaggttcagtcgaagatcgacgactaccgcgacgccctggacaacggcctgcacgtggtgaagagcctggtcaaggaacccaacaaggaactgttcgtcgactggcgtccgtacctgggtcatgcctggaccgcgcgtcacgacacccgcttcgacctgaagaccctgcaggaactgtccagcaagatgctggaagtgccggaaggcttcgtggttcagcgccaggtttcgaagatctacgaagatcgccagaagatggcggccggtggcctgccgatcaactggggcttcgccgagaccctggcctacgcgaccctgctgttcgaaggccatccggtacggatgaccggccaggacgtcggccgtggcaccttctcgcaccgtcacgcggtgctgcacaaccagaaggatgactcggtctacgtaccgctggccaatctgttcgacggccagccgcgcctggatatctacgattccttcctttcggaagaggccgtgctggcgttcgaatacggtttcgccaccaccacgccgaactcgctggtgatctgggaagcccagttcggcgacttcgccaacggcgcccaggtggttatcgaccagttcatcaccagtggcgaaagcaaatggggccgactctgcggcctgaccatgctgctgccgcacggctatgaggggcagggcccggagcactcctccgcgcgcctggagcgctacctgcagctctgtgccgagcagaacatccaggtctgcgtgccgaccaccccggctcaggtctaccacatgctccgccgtcaggtgatccgcccgctgcgcaagccgctggtggtgatgacgccgaagtccctgctgcgtcacaagctcgccatctcgaccctggaagatctggccaacggttccttccagaccgtgatcccggaaatcgacagcctggatccgaagaaggtcgaccgcgtcgtgctgtgcagcggcaaggtgtactacgacctgctggagaagcgtcgcgcggaaggccgcgaagataccgcgatcgtccgtatcgagcagctgtatccgttcccggaagacgacctggcggaagttctggctccgtacaagaacctcaagcacatcgtctggtgccaggaagagccgatgaaccagggcgcctggttctgcagccagcatcacatgcgtcgtgtcatcgccgcgcacaagaagggcctcaatctcgagtacgccggccgcgaaggctccgctgctccggcttgcggctacgcctcgatgcacgccgagcagcaggaaaaactgctgcaagacgcctttactgtttaa

SEQ ID NO: 347171 - DNA, 1230 bp, Pseudomonas aeruginosa
atggctatcgaaatcaaagccccaaccttcccggaatcggtcgccgacggcaccgtcgccacctggcacaagaagccgggcgaagcagtcaagcgcgacgaactgatcgtcgacatcgagaccgacaaggtggtcatcgaggttctcgccgaggctgacggcgtgctggccgagatcatcaagaacgaaggcgacaccgttctgagcaacgagctgctcggcaagctgaacgaaggcggcgccgccgctccggccgctccggctgccgctgtgcccgccgccgctccggctgcacaggccgccgctccggccgccgctggcggcgacgacgccatcctgtccccggccgcgcgcaagctggccgaggaagccggcatcgatccgaacagcatcgccggcaccggcaagggcggtcgcgtgaccaaggaagacgtggtcgctgcggtcgaagcgaagaagaacgccccggccgccccggccaagcctgccgccccggctgccgaggcgccgatcttcgccgccggcgaccgtgtcgagaagcgcgtgccgatgacccgcctgcgggccaaggtcgccgagcgcctggtcgaggcgcagtccgccatggccatgctgaccaccttcaacgaggtcaacatgaagccgatcatggacctgcgttcgaagtacaaggacctgttcgagaagaagcacaacggcgtgcgcctgggcttcatgtccttcttcgtcaaggccgccaccgaggcgctgaagcgcttcccgggggtcaacgcttccatcgacggcaacgacatcgtctaccacggctaccaggacatcggtgttgccgtttccagcgaccgcggcctggtggttccggtactgcgtaacgccgagttcatgagcctggccgagatcgagggcggcatcgccaacttcggcaagaaggcgaaggaaggcaagctgaccatcgaagacatgaccggcggcaccttcaccatctccaacggtggcgtgttcggttccctgctgtcgaccccgatcgtcaacccgccgcagaccgccatcctcggcatgcacaagatccaggagcgcccgatggccgtgaacggccaggtggtgatcctgccgatgatgtacctggcgctgtcctacgaccaccgtctgatcgacggcaaggaagcggtgagcttcctggtggcgatcaaggacctgctggaagatccggctcgcctgctgctggacgtctga

SEQ ID NO: 347172 - DNA, 1437 bp, Pseudomonas aeruginosa
atgagccagaaattcgacgtggtagtgattggtgccggccccggcggttacgttgccgccatccgcgctgcccagctgggcctgaagaccgcctgcatcgagaagtacatcggcaaggaaggcaaggtggcgctcggcggtacctgcctgaacgttggctgcatcccgtccaaggcgctgctggacagctcctacaagtaccatgaggccaaagaggccttcaaagtccatggtatcgaagccaagggcgtcaccatcgacgttccggcgatggttgcgcgcaaggccaacatcgtcaagaacctgaccggcggcatcgctaccctgttcaaggccaacggcgtgacctccttcgaaggccacggcaagctgctggccaacaagcaggtggaagtgaccggcctggacggcaagacccaggtcctggaagccgagaacgtgatcatcgcttccggctcccgcccggtggagatcccgccggccccgctgaccgacgacatcatcgtcgactccaccggcgccctggaattccaggccgtgccgaagaagctgggtgtgatcggcgccggcgtcatcggcctggagctgggttcggtatgggcccgcctgggtgccgaggtgaccgtgctggaagccctggacaagttcctcccggctgccgacgagcagatcgccaaggaagccctgaaggtcctgaccaagcaaggcctgaacattcgcctgggtgcccgcgtgaccgcttcggaagtgaagaagaagcaggtcaccgtgaccttcaccgacgccaacggcgagcagaaggaaaccttcgacaagctgatcgtcgcggtcggccgtcgcccggtgaccaccgacctgctggccgccgacagcggcgtgaccctggacgagcgtggcttcatctacgtcgacgaccactgcaagaccagcgttccgggcgtcttcgccatcggtgacgtggttcgcggcgcgatgctcgcgcacaaggcctcggaagagggcgtgatggtcgccgagcgcatcgccggccacaaggcgcagatgaactacgacctgattccgtcggtcatctacacccacccggaaatcgcctgggtcggcaagaccgagcagaccctcaaggccgagggcgtcgaagtcaacgtcggcaccttcccgttcgccgccagcggtcgcgcgatggctgccaatgacaccaccggcctggtcaaggtcatcgccgatgcgaagaccgaccgcgtcctgggcgtccacgtgatcggcccgagcgccgccgagctggtacagcaaggcgcgatcggcatggaattcggcaccagcgccgaagacctgggcatgatggtcttctctcacccgacgctgtccgaagccctgcacgaagctgccctggcagtgaatggccatgccatccacatcgccaaccgcaagaagcgctga

SEQ ID NO: 347173 - DNA, 1167 bp, Pseudomonas aeruginosa
atgaatctccacgaatatcagggtaagcagctgttcgctgaatacggcctgcctgtatccaagggctttgccgtagacacccccgaagaggccgcagaagcctgcgacaagatcggcggcagcgagtgggtcgtcaaagctcaggtgcacgccggcggccgcggtaaagcgggcggtgtgaagctggtgaagagcaaagaggacgccaaggcgttcgcccagcagtggctgggcaagaacctggtgacctaccagaccgacgccaacggccagccggtcagcaagatcctggtggagtcctgcaccgacatcgacaaggagctgtacctcggcgccgtcgtcgatcgttccagccgccgcatcgtgttcatggcttccaccgaaggtggcgtggacatcgagaaggtcgcccacgacactcccgagaagatcctcaaggctaccatcgacccgctggtcggcgcgcagccgtaccagggccgcgagctggccttccagctgggcctgaagggcgaccagatcaagcagttcacccatatcttcgtcggcctggcgaagttgttccaggactacgacctggccctgctggaagtgaacccgctggtgatcaagaaagacggcaacctgcactgcctggatgccaagatcaacatcgacagcaacgccctgtaccgtcagccgaagctgcgcgccatgcacgacccgtcccaggacgacgcccgtgaagcccatgcgcagaagtgggagctgaactacgtcgcgctggaaggcaacatcggctgcatggtcaacggcgccggcctggccatgggtaccatggacatcgtcaacctgcacggcggcaagccggccaacttcctcgacgttggcggcggtgcgaccaaggagcgcgtgaccgaagcgttcaagatcatcctgtccgacagcaacgtgaaggctgtcctggtgaacatcttcggcggcatcgtgcgttgcgacatgatcgccgaaggcatcatcggcgccgtcaaagaagtcggcgtgaaggttccggttgtcgtccgcctggaaggcaacaacgctgaactgggtgccaaggtcctggccgaaagcggcctgaacatcatcgcggcaaccagcctgaccgacgctgcccagcaagtcgtcaaggccgcggagggtaagtaa

SEQ ID NO: 347174 - DNA, 888 bp, Pseudomonas aeruginosa
atgagcgtcctgatcaacaaagacaccaaagtcatctgccaaggcttcaccggtagccagggtaccttccactccgaacaggccatcgcctatggcaccaagatggtcggcggcgtgacccccggcaagggcggcaccacccacctcggcctgccggtgttcaacaccgtcaaggaagccgtggaagccaccggcgccgaagcctcggtcatctacgttccggctccgttctgcaaggactcgatcctggaagcggcattcggcggcatcaagctgatcgtctgcatcaccgaaggcatcccgaccctcgacatgctggacgccaaggtcaagtgcgacgagctgggcgtacgcctgatcggcccgaactgcccaggcgtgatcactcccggcgagtgcaagatcggcatcatgccgggtcacatccacctgccgggcaaggtaggcatcgtgtcgcgttccggcaccctgacctacgaagccgtgaagcagaccaccgacgccggcttcggccagtccacctgcgtgggcatcggcggcgacccgatcccgggctccaacttcatcgacatcctgaagctgttccaggaagatccgcagaccgaagccatcgtcatgatcggcgagatcggtggttccgccgaagaagaagccgcggccttcatcaaggctaacgtgaccaagccggtggtgtcctacatcgctggtgtgactgcccctccgggcaagcgcatgggccacgccggcgccatcatctccggcggcaagggcaccgcggacgagaagttcgccgccctgcaggacgccggtgtgaagaccgtgcgttccctggccgacatcggcaaggccctggccgagctgaccggttgggaagtgaagaaggcctga

SEQ ID NO: 347175 - DNA, 1314 bp, Pseudomonas aeruginosa
atgactcatttgaaagggttcgacctgctcgcccttggcttcatgacgttcgcgctttttctcggcgcgggtaacatcatctttcctcccagtgccggcatggcggcgggcgaacacgtatggagcgcggctttcggcttcctccttaccggtgtcggcctgccgttgctgacggtggtcgccctggcccgggtcggaggcggtattggccgcctgacccagccgatcgggcggcgcgcgggagtggcgttcgccatcgccgtctatcttgccatcggcccgctgttcgccaccccgcgtacagccgtggtgtcctttgagatgggcgtcgcgcccttcaccggggacggcggcgtgccgttgctcatctataccgtcgcttacttctccgtggttctgttcctggtgctgaacccgggtcgccttgtcgatcgggtcggaaaggtcatcacgccggtgctgctgtcggccctgctggtccttggcggcgcggcgatcttcgcgccggcgggagagatcggcagcagttccggcgagtaccagagcgcgcccctggtgcagggcttcctgcagggctacctgaccatggataccctcggtgcgctggtcttcggtatcgtcatcgccaccgccattcgcgaccgcggcatcagcgacagccggctggtcacgcgctattccatgatcgccggggtcatcgccgccaccggcctgtccctggtctacctggcgctgttctatctgggcgccaccagccagggcatcgccggcgacgcccagaatggcgtacagatcctcaccgcctatgtgcagcagacctttggcgtttccggcagcctgttgctggcggtggtcatcaccctggcctgcctgaccacggcggtagggctgatcacggcgtgcggcgagttcttcagcgacctgctgccggtttcgtacaagacggtggtgatcgtgttctcgctgttcagcctgctggtcgccaaccagggactgacccagttgatcagcctttcggtaccggttctggtgggactctatccgctcgccatcgtgctgatcgccctgagcctgttcgaccggctctgggtgtcggccccgcgggtgttcgtgccggtgatgatcgtcgcgctgctcttcggcatcgtcgacgggctgggggcggccaagctgaacgggtgggtgccggacgtcttcgccaagcttccgctcgccgatcagagccttggctggctgctgccggtatccattgcgctggtcctggcagtcgtttgcgatcggctgctgggcaagccgcgcgaagcggtcgcctga

SEQ ID NO: 347176 - DNA, 765 bp, Pseudomonas aeruginosa
atgaccgccgaactcggcattttcaacgggcacctgctgcaacacctgctggcggcgctctggttcctgttctgctgggtgggctacacccgctacgccacctggaagggtcgcgacaccgcctgcctggccagcgtcctgcacctctaccgggaggactggatgcgccggttgctgctgcgcgacaaccgtatcgccgacgccagcgtgatcggtaacctggagcgtaacgcgtcgttcttcgcctccagcacgctgatcatcctcgccggcatcctcaccctgctgggctccaccgatcgcgccgtctcggtactggccgacctgccgttcgtggaggaggccagccggggactatcggaactgaagctgctgtgcctggcagtggtcttcgtctatgccttcttcaccttcagctggtgcatgcgccaatacaacttcgcggcgatcctggtcggctcggcaccgatgatcggcgagcgcaacgtcggcgagctggagcgcaaatcctttgccgagcgtgccgcccgggtcatctcgctggcggccaaccagttcaacttcggcttgcgctcgtactatttcggcctggccatgctcgcctggttcatcaattcctggttcttcatgctggtgacggccggcgtggtgctggtcctgtatcgccgcgaattccattcggacgtgctggaggtgatggtctacaccgagaccgcaatcgccgaaagcccgcgggaaggcgagggcgaggtgcccaggggctga

SEQ ID NO: 347177 - DNA, 237 bp, Pseudomonas aeruginosa; identical to SEQ ID NO: 319780

SEQ ID NO: 347178 - DNA, 474 bp, Pseudomonas aeruginosa; identical to SEQ ID NO: 319781

SEQ ID NO: 347179 - DNA, 447 bp, Pseudomonas aeruginosa
atgagcccgaccagcctcgagcaactggtccgcgacgcgcgtcggaacaacgactacagcccgctggtggagctgatcccgtacgccaagctgctcggcatcgaatgcctgcgcctgggcgacgacatggtcttccgcctgccggcgaacaaggacaacatcggcaacccgaccctgccggccatccatggcggcgtgatcgccggcttcatggagcatgcggcgatgttgcacctgctgaccttcatgagcattccgcacctgccgaagatcatcgatttctccatcgattacctgcgtgccgggcacttccgcgatacctacgcgcaatgccaggtctggcgccaggggcggcgggtggcgaacgtcgcgatcaacgcctggcagaccacccagggcgagcccatcgccaccgcgcgggcgcatttcaaggtggacgagccgtga

SEQ ID NO: 347180 - DNA, 1233 bp, Pseudomonas aeruginosa
atggatgccttgctgattctgggcggcctgctgctgatggtcgccggctatatctgggtcatcgtcctggccttcggtaccggtctgctgtggggttacggcagccttttcccgccggtggcgctggcctatatcggcgtgcactggcgtacggcgcgcaagggcgtcgggctggccgcgctgggttgcatcccgctggtggtcggcctggcgctgctggccagtcacgacgctgcgcggctggaggcgatcctcagcctgcgctggctgaaaccggaggccaggccgccggcggaactgtccatcgcgctcagcggggagttcaacggcaagcctttcgcgccgcagagcggcgagttgattggcggcgtgctgagcctgcgccaggggcacgatttctacgcccagcgcgagctgcagatccgccttccggcacagccgctcggggcgctgcgcctggatgtgctgcccgaggacggcggcgcgttgccagaagtcgagctgagctggctgcaaccggatcaggacctgcccgaggcgcgtcgtctcctgcgtggctataccttgcacctggacctgcggcccaaggcgccgaaccgcctggagggcgagttccacctgagcctgccgagcgactaccggaccaccctcagcggccacgtcgagctgtataccgaccggctgcgctatcggcacggcaaggtcgacctgggctacgactccgacgataccctggccctggtcttgcgcgattatctgcagcgacgtttcgccagccgcgacgtcagcctcgtgcgggcgccgtcctggcgcgcggccagccatgcgcggccgctgcgtatcgaggccctggtggccggccaggctcaggtgctggagctgacgctggagaagaacgcccggcgggagtggacggtgcgcggcgacgcgttccccgccttgccggcggagcctgcgaccgtggccgcggcggcggcgccgcccgagccgcaggcgctgccggcgccgggtaacgccaccctcgacctggagctggtccaggtcgaaccgcagcgctacagccagcgcctggtcaaggccactacggtacgcgggcgtatcgccgagggccgtttcaccggcctcgacagcgaggggcgcctggtgatccgccgggaaatgcccggtgcgggggaggcgagctacctgttgcgcccggcggagatcgcccgtctcgaactgctcgaacgctag

SEQ ID NO: 347181 - DNA, 1905 bp, Pseudomonas aeruginosa
atgagcgtggaaacccaaaaagagacactgggctttcagactgaagtgaagcaactgcttcacctgatgattcattctctctattcgaacaaggaaatcttcctccgcgaactgatttccaacgcctcggacgccgccgacaagctgcgtttcgaagccctggccaatcccgagctgctcgagggcggcgccgagctgaagatccgcgtcagcttcgacaaggaagccaacaccgtcaccctggaagacaacggcatcggcatgagccgcgaggatgtggtgactcacctgggcaccatcgccaagtccgggaccgccgacttcctgaagaacttgtctggcgaccagaagaaggattcgcacctgatcggccagttcggcgtcggtttctacagcgccttcatcgtcgccgacaaggtcgatgtctactcccgtcgcgccggccagccggccagcgaaggggtgcactggtcgtcgaagggcgagggcgagttcgacgtcgctaccatcgacaagcccgagcgcggtacccgcatcgtcctccacctgaaaaagggcgaggaggagttcgccgatggctggcgcctgcgcaacgtgatcaagaaatactccgatcacatcgctttgccgatcgagctgcccaaggaattccacggcgaagaggccgacaagccggccgagccggaatgggaaacggtcaaccgcgccagcgcgctgtggacccgtccgcgcgccgaggtgaaggacgaggaataccaggagttctacaagcacgtcgcccatgacttcgagaacccgctgagctggagccacaacaaggtcgaaggcaagctggaatacacctcgctgctctacgtgccgggccgcgcgccgttcgacctgtaccatcgcgaagcgccgcggggcctgaagctgtacgtacagcgcgtgttcatcatggaccaggccgacgagttcctgccgctgtacctgcgcttcatcaagggtgtggtcgactccaacgacctgtcgctgaacgtctcccgggaaatcctgcagaaggatccggtgatcgactcgatgaagtcggcgttgaccaagcgcgtgctggacatgctggagaagctggcgaagaacgagccggagcagtacaagaccttctggaagaacttcggccaggtcctcaaggaaggcccggcggaagacttcggcaacaaggataagatcgccggcctgctgcgcttcgcctccaccggcgacgattcgggcgagcagagcgtagcgctggccgactacatcggtcggatgaaggaaggccaggacaagatctactacctcaccggcgagagctactcgcaggtgaagaacagcccgcacctggaagtcttccgcaagaagggcatcgaggtgctgctgctcaccgatcgcatcgacgagtggctgatgagctacctgccggagttcgacggcaagcagttcgtcgatgtcgcccgcggcgacctggacctaggcagcctggactcggaagaggacaagaaggcccaggaagaagtcgccaagagcaaggaaggcctgatcgagcgcctgaagaaggtgctcgacgagcaggtcagcgaagtccgcgtttcccaccgcctgaccgattcgccggcgatcctcgccatcggcgaacaggaccttggcctgcagatgcgccagatcctcgaggccagcgggcagaaagtgccggactcgaagccgatcttcgagatcaacccgcagcatccgctgatcgagaagctggatgcggagccggacgaggaccgcttcggcgagctgtcgcatattctcttcgaccaggccgccctggccgcgggggacagcctcaaggatccgggcgcctacgtacgccgactgaacaagctgctggtggagctgtccgcttaa

SEQ ID NO: 347182 - DNA, 726 bp, Pseudomonas aeruginosa
atgagtgagattcgtgtagagccggtcgcctacgacatcgatgggcagccgtacgaaggtcaactggtgtacgacgccagccacgcggggccgcgcccgggcctgctgatggcgccgaactggatgggcgtgagcgccgccgcgctggacatcgcccggcaggtcgccggccgtgggcacgtggtgctggtggcggacctctacggcagggacgtgcgtccgcagaacggcgacgaggcgggcgcggcgatgatgccgctgaagaacgaccgggccctgctgcgcaagcgcatgcaggcagcgctggcggccttgcgcggacaggcgctcgcggctgtcgatacgacccgccaggctgccttcggtttctgcttcggcggttgctgcgcgctggagctggctcgcgacggcgccgagctgaaggccttcgtgtccttccatggcaccctggatacgccggacccggcgcatgccaggaacatcaagggcgcggtactggtcctcgacggcgcctccgatccgctggtgccgcgcgagcagttgccggccttcgccagggagatgaccgatgccggcgtcgactggcagctcaccagctacggcggcgcggtgcattccttcaccgatccgaacgccaagctgccgggcaagatgcactatgacgccaggacctcccggcgtgccttccaggcgatggacgacctgctggcggaagtcttcgcctga

SEQ ID NO: 347183 - DNA, 822 bp, Pseudomonas aeruginosa
atgagcagtcatcgcccgcaacatcgcctgtccgttcccgatatccagcgccgcaagggtgccggcagcctggtggcgctgaccgcctacagcacgcccatggcccgcctcctcgatccgcatgccgacctgctgctggtcggcgattcgctgggcatggtgctctatggcatgcccagtaccctgggagtgagcctggagatgatggtcgcccacaccctggcggtgatgcgcggcagccggcgcgcctgcgtggtggccgacttgccgttcgccagctaccaggaatcgccccgacaggcgttccgcaacgccgcacgcctgctggccgacagcggcgcccaggcggtgaagctggaaggcggtgaggaaatggaagaaaccgtggacttcctggtacgccgtggcataccggtgctcgcccatatcggcctgatgccgcagcaggtcaacgccatgggcggcttcaaggcccaggggcgtgacccggaaagcgccgaacgggtacgccgcgacggcctcgccatgcagcgcggcggcgccttcgcggtggtcatcgaaggcgtaggcgagccgctggcccgtcgccttagcgaagaactggcgatcccctgcatcggtatcggcgcctcgccggcctgcgacggccaggtactggtcagcgaggacctgctcgggctaagcggcgaacaggtaccgcgcttcgtcgaacgctacgcgcgcctcgaccgggaaatcgacgaggcggcccggcgcttcgccgaggacgtgcgcgaacggcgcttccccgaggccaggcattgcttcgccatgcgcgagtga

SEQ ID NO: 347184 - DNA, 783 bp, Pseudomonas aeruginosa
atgctgcaaacgggacaagaacgcgacctgccgcgattccgcagcctgccctgcgcggtgtacctgcgcgccttcgagatgcccgccgggcaccgggtggagatgcacgagcacccctggggccaactgatgtacgccgccagcggcaccttgcgcgccagcaccgagcggcacagctatctggtgccggcgcagcgggcgctgtggattccgccgggcgtccggcacgccgcggaggcttgcaaccctgtgctgttccgcagtctctacctggatcgttcgctgcccggcggttgccgggtactggaggtgtccggcctgctgcgcgaactgttgctgcgggcggcggaatttccccgtgaatatccgccgggtggcgaggccgagcgtctcatgcaggtggtcgccgatgaggtcgggcgccttcgcgaggcgccgctgaacctgccgttgcctggcgacccgcgcttgcgccggatcaccgacgcgctacaggcggatcccgccgatccgcgcggcatctcggattgggcgggactggtgggggcttcccgacggaccctggcgcggttgttccgcgagcagacccagttgtcgtttcgcgagtggcgccagcgcctgcgtctgctcaacgcggtcgccgcgctggaggagggcgccagcgtgacgcgggtggccagcgaccttggctacgactccacctcggcgttcatcagcctgttccagcgtcatttcggccagacccccggttgcttcgcccgctccctgcgcttgcccaactga

SEQ ID NO: 347185 - DNA, 1302 bp, Pseudomonas aeruginosa
atgaagaaggcaacacgcatcggcctctgggcctccggcagcctcgtcgcgctcgccgccatcgccctcggctacgcctggcaaccggccatcgggccactggaaggcacacccggtcccttcagcgccgagcagatcgcccgcggcgaacgcctcgccgccctcggcgactgcgcggtctgccacactcgcgaaggcggcccgcgcaacgccggcggacgggccttgccgacgccgttcgggacgatctacagcagcaacctcacgccggatcgcgcgagcggcatcggtggctggtcctaccccgccttcgagcgggccatgcggcatggcgtggcccgcgacggcagctacctgtatccggcgttcccttacaccgccttcaccaggactagcgacgaagacctgaaggccctgtacgcctacctgatgagccagccggcggtgcacagcgaaacgcctgccaaccagctgccgttccccttcgaccaacgccagctgatggccggctggaacctgctgttcctggagcccggcgcctaccgcgacgagccgacgcgcaaccagcaatggaaccgcggcgcctatctcgccgaaggcctcggccattgcagcgcctgccactcgccgcgcaatgcgctcggcgcggaaaagtccggcagcgcgcacttcgccggcggcgaggcggagggctggaccgcgccagccttgaacgccagttcgccggcgcccatcgcctggagcgaggaggccctctacgcctacctccgccacggctattcggcctaccacggggtcgccagcgggccgatggcgccagtggtcggcgaaggcctggccaagcagtcggacgaggacctgcgggccctggcccattaccttgcgtcctacgccgctgctccggccggggaaaccgatcagcaacaggcgcaacgcctcgaccggcagggctacggccgcgtgcaaccgcccagcggcagcggcgcgcgcctgttcgccggggcctgcctggcctgccaccatgacggcgacggaccgcgcttcttcggcgtgcgtccatccctggcgctgaacagcaatgtgcatgcggacagcccggacaacctgctgcggatcatcctcgacggcatccacagcccggccaccggcgacctcggctatatgcccggcttccgccacagcctcgacgaccggcaagtcgccgccctggccaactacctgcgcgagcgtttcgccggcaagcccgcctggccggacctcgcggccaaggcggcaagcctgcgccgacaggcggcgccctga

SEQ ID NO: 347186 - DNA, 2247 bp, Pseudomonas aeruginosa
atgagcctggccaatccctcgcgacgcggcttcctcaaggccggcggcctgctgctggtcaccgtcaacctgcccgccccgctgctcgcccttgccgagcagggcgccaccgacctgccgctggaccaggtcgactcgttcatcgccattgccgcggacggcaaggtcaccgccttctgcggccacgtcgaccttggtaccggcatccgcacggcactggcgcagatcgtcgccgaagagttggacgtcgcgttcgagcaggtcgagatgatcctcggcgacacccgtcgcacaccggaccaggggccgaccatcgccagcgccagcatccaggtcagcgccgtgccgctgcgccaggccgccgccgaagcccggcgcttcctcctgcgccaggccggaagccatttcccggtgcatccggacagcctgcgcagcgaaaacggccaggtcttcgccgccgccaatccgcagcgacggatcggctacggcgagttgctgcgaggccagcgcttcaacctgaacatcgacggcaaggcgccgctcaagccgcgcagcgagtaccgtctggtcggcaagccggtgcgtcgggtggacatcccggcgaagctgaccggtcaactgacctatgtccacgacatgcgcttgcccggcatgctgcatgggcgagtggtacgcccgccctataccggcgcggatgtcagcgccccgctcggcagcggcctgctggcggtggacgaaagctcggtcgccgggctgccggggctggtcaaggtggtcgtgatcggcgacttcgtcggcgtggtctgcgaacgcgaggagcaggcgatccgcgccgcgcgccagctcaaggtgcgctggaaggactggcagggcctgccgccgctggaacccgaccggctcgaggacacgcttcgccggcatccgaagaagccacgcacgctgcacgactcacccggtctcgagcagcacctcgcgggcatcgcccggccgctgtcggccacctatgtctggccctaccagttgcacgcctccatcggcccttcctgcgccctcgccgaggtcgatgcgcagcgcgctcgcgtctggtccggcacgcagaacccgcacgacctgcgcaacgacctggccaggctgctgcagcgcgagaccggggacatcgaggtgattcgcatggaagccgccggctgctacggacgcaacggcgccgacgacgtcagcgccgacgccgtgctcctggcgcaggcagtgggccggccggtgcgggtacaactgatgcgcgaacaggaacatggctgggaaccgaaaggcaccgcgcaactgatcgaggtccgcggcggtctcgacgagcaaggccgggtggcggcctacgacttcgccacctgctacccctccaacggcgcgccgaccctggccttgctcctcaccgggcgaatcccggccaccccgcaggtggccgacatgggcgaccgcaccgcgatcccgcaataccgctacccgcggatgcgggtggtggccaacgacgccgcccccatcgtccgcgcgtcctggatgcgcggcgtctcggcgctgccgaacgtgttcgcccatgagtcctacatcgacgaactggcgcacctggccggcatcgaccccatcgccttccgccgccgctacctggacgaccagcgcgccctggcgctgatcgacgccctggtcgcccgcgccggctggcagccacgcacctcccccaacccagaggcgcgccgggacggcttgctgaagggacgcggcttcgcctatgcgcgctacttccacagcaagtttcccggtttcggcgccgcctgggccgcctggatcgtcgacgtcgaggtgaacccggagaacggcgcggtgcgcgtcgccaaggtctgggtcgcccatgactgcgggcagatggtcaatcccgatggggtcaggcaccaggtccacggcaacgtcatccagtccaccagccgggtactcaaggagttcgccaccttcgaccgccgtggcgtcaccagcctggaatggggcggctacccgatcctcggcttccccgaactgccggagatcgacgtactgctgctcgaccgccccgagcagccaccgatgggcgctggcgagtcagcctcggtgcccagcgccgcggccatcgccaatgcgatcttcgacgctaccggggcgcgcctgcgacaggtgccgttcactccggaacgcgtactcgcggcgctgcgcagcgcgcaggcctga

SEQ ID NO: 347187 - DNA, 492 bp, Pseudomonas aeruginosa
atgagcgatgcccttgccctgaccgtcaacggtcagtccctgcgcctcgatgtcgcccccgatacccccctgctctatgtcctgcgcaacgacctgcaactgaacggtcccaagttcggctgcggcctcggcgagtgcggcgcctgcaccgtgctgatggatggcgtcgccacccgctcctgcatcaccccggtggaggccgccgtaggccgccgggtggttaccctcgaaggactcggcgatgccgcccatccccatccgctgcaacaggccttcatcgacgaacaggccgcccaatgcggctactgcatcaacggcatggtgatgaccgccaaggcgttgctggatcgcaacccgaaccccagcgacggcgagatccgccaggaactggcctacaacctgtgtcgctgcggcacccatgtggagattctcaaggccgtgcggcgtgccgccgagagcctgaaggagcatcaggaggagcacccggcatga

SEQ ID NO: 347188 - DNA, 423 bp, Pseudomonas aeruginosa; identical to SEQ ID NO: 319791

SEQ ID NO: 347189 - DNA, 906 bp, Pseudomonas aeruginosa; identical to SEQ ID NO: 319792

SEQ ID NO: 347190 - DNA, 897 bp, Pseudomonas aeruginosa
atgccgcggctgctggaggcgatggacaaaggccgggtcgaccatgtgatgctcagcggcgtcgcggtcgccaagaaatggcacgaggacgagccgaagcggccgcgctactacgctggtgacgatgccggagcctattggtacagcgccaccgacgtgatcgtggcggcggcggtgaaatccctgccagccgagcagcggcggcgcgtgcatccgttcctgaccggtttcaacccgaccgacaagaacgccgacgcgcacatccgtcgcatgctggagctggacccgggactctggcagggcatcggcgagatctttacccgtcacgacgacctcaccgcgctgacctacggcgacgtgccgagggccaacaacgaggcgctggcgcgggtctatcacctggccgccgaattcgacctgccggtgttgctgcacgccaacgtcacttccaagcgcgaacgcaacccgctgtacctggcggaaatcgaggagcccctgcgcaatcacccgcatgtgcggttcatctgggcccatgccgggaccagcatggagatccatcgccaccagaagaaactggacttcctcctgccgacccttcggcgtctgctacagcgctacccgaacctctacatcgacctgtcctggtcggtgttgcgcccgtacctgctggacgagcagggcaagcccgatccgcagtggctggcactggtcgagcggtttccgcaacgcttcatgctcggttccgatgtggtcggccagttcgacagcctgcccgagttgatggcgagcttcgatccgttcctcgacgccttgcccgagcaggtcgctcgccaggtggcgcgggacaactttctggcggtgctgccgcgccagcccgccgatccgcgaggcgaataa

SEQ ID NO: 347191 - DNA, 477 bp, Pseudomonas aeruginosa; identical to SEQ ID NO: 319794

SEQ ID NO: 347192 - DNA, 441 bp, Pseudomonas aeruginosa
atggtcaagcgcaccagccacaagcaagccagttgtccagtcgcccgcccgctggacgtgatcggcgacggctggtcgatgctcatcgtgcgcgatgccttcgaaggactgacgcgcttcggcgaattccagaagagcctcggcctggccaagaacatcctggcggcgcgcctgcgcaacctggtggagcacggcgtgatggtggcggtcccggccgaaagcggcagtcaccaggaataccgtctgactgacaagggacgcgcgctcttccccctgctggtggcgattcggcagtggggcgaggactatttcttcgccccggacgaatcccatgtccgcctggtcgagcgcgacagcggccagccggtgccgcgcctgcaggtacgcgccggcgacggcagtccgctcgccgcggaagatacccgggtcagcagggactga

SEQ ID NO: 347193 - DNA, 1626 bp, Pseudomonas aeruginosa
atgtctttgcgcagtatgcccatcgcgacccgtgccgccctgagtttcgccctgatcaccgctctgctggtcatcaccggcatcttttccctgaaccggatgggttcgctcaacgaagcctcttcggacatcagcgacaactggctgcctagcgtccgcgaaagcgccgagttgaacgttctgctcgccgaactgcggcaggtgcaactggcccatgtgctggcggcggacgatagcagcaagcgcttcctggaaagccgcatgacggaaatcggcaaggaactgaccgatcgcgagggcgcctaccaacggctgatcagtggtgccgacgagcgctcgatctacgagcgctacctggctacccggcagacgctcctgcaaagccagcagaccctggtgcagatgtcgcgcagcaagccgctggaagagacccgccagtacaccgaaagcaccttgctcgaccagtaccgcgccacccagcagcaactgcaggcgctgatcgacttcaacgtcaagggcgccagccaggccagccacacggccgatgaggtctatgacagcgccttcgccgcagtgatcggcgtactgctggtcgccggcctcgctaccgtggtactggcctggctgttcacccgcagcatcacccaaccgatcggcgaggcgctgcgagtggccgaggtgatcgcttccggtgacctcaccagccgcatcgacacctctggccgcgacgaaccggccaagctgctggtcgccctccagggcatgcaggcacaactgcgccagaccatccagcagatcggcagctcggcgacccaactggcctccgccgcggaggaactcagcgccgtcaccgagcagggcaaccgctcgctgacccagcagaacgacgaaatccagatggccgccaccgcggtcaacgagatgaccgccgccgtcgaggaagtggcgcgcaacgccagctccacctcggacgcctcgtccgcctccgagcaatcggcgcagaacggacgccagcgggtactggagacggtccaggcgatccgcctgatgagcgaagaagtggacaatacctcggcgctggtcggcggcctggcggaaaaggcccaggacatttccaaggtcctcgacgtgatccgcggtatcgccgaacagaccaatctcctggcgctcaacgcggccatcgaggcggctcgcgccggcgagcagggccgcggtttcgccgtggtcgccgacgaggttcgcgccctcgcccatcgcacccaggaatccacccgcgagatcgagcagatgatcgccaacatccaggaaggcaccggcgccgcggtcggcgccatggacagcagcagcgtacgcgcccgcaacatgctggagatcgccgaagccgccggcctggcgctgaacgagatcgcggagcgggtcggccagatcaacgagcgtaccctggtgatcgccagcgcctccgagcagcaggcccaggtggcccgcgaggtcgaccgcaacctggtgaacatccgcgacatctcgctgcagacgtccgccggctccaaccagaccgccgccgccagccaggaactgtcgcaactggccatcgacctgaacaacatggtcacccgcttcgtcgtctga

SEQ ID NO: 347194 - DNA, 1218 bp, Pseudomonas aeruginosa
atgcgtcgcgtcgttatcaccggtctgggcatcgtttcctgcctcggcaatgacaaagacaccgtttccgccaacctccgtgcgggtcggcccggcattcgcttcaatccgtcctacgccgagatgggcctgcgcagccacgtttccggttcggtcgacctgaacctcgaagagctgatcgatcgcaaggtcttccgcttcatgggcgatgccgccgcctacgcctacctggcgatggagcaggcgatcaaggactccggcctgactccggaacagatttccaacccccgcaccggcctgatcgccggctccggcggcgcttccaccctgaaccagatggaggccatcgacaccctgcgcgagaaaggcgtcaagcgcatcggcccataccgcgtgacccgcaccatgggcagcaccgtatcggcctgcctggccacaccgttccagatcaagggcgtcaactactcgatctcctccgcctgcgccaccagcgcgcattgcatcggccaggccatggaacagatccagttgggcaagcaggacgtggtcttcgccggcggcggcgaagaggaacactggagccagagctgcctgttcgacgccatgggcgccctctccacccagtacaacgagacgccggaaaaggcctcccgcgcctacgacgccaagcgtgacggcttcgtcatcgccggcggcggcggcatggtggtggtcgaggagctggagcatgcgctcaagcgcggcgccaagatctacgccgagatcgtcggctacggcgccacctccgacggctacgacatggtcgccccgagcggcgaaggcgcgatccgctgcatgcagcaggcgctggccaccgtcgacgcgccgatcgactacctgaacacccacggcacctccaccccggtcggcgacgtcgccgagatccgaggcgtgcgcgaagtgttcggcgacaaggcgccggccatcagctcgacgaagagcctgtccggccactcgctgggcgccgccggcgtacacgaggcgatctattgcctgctgatgatggaaggcggcttcatcgccggctccgccaacatcgacgaactcgacccggaagtggccgacctgccgattctccgcgagacccgcgagaacgccaagctcgataccgtcatgagcaacagcttcggcttcggcggcaccaacgccaccctggtcctcaagcgctggcagggttga

SEQ ID NO: 347195 - DNA, 516 bp, Pseudomonas aeruginosa
atgaccaaacaacacgccttcacccgagaagacctgctgcgctgcagtcgcggcgagctgttcggcccgggtaacgcgcaacttcccgcccccaacatgctgatgatcgatcgcatcgttcacatcagcgatgtcggcggcaagtatggcaagggcgagctggtcgccgagctggatatcaacccggacctgtggttcttcgcctgtcacttcgaaggcgatccggtcatgcccggttgcctgggcctggatgccatgtggcagctggtcggtttctacctcggctggcagggcaaccccggccgcggccgcgccctgggttcgggcgaagtgaagttcttcggtcaggttctgccgacagcgaagaaggtcacgtataacattcatatcaagcgcacgatcaatcgttcgctggtcctggccatcgccgacggcaccgtcagcgtcgatggccgcgaaatctacagtgccgaaggcctccgcgtcggcctgttcacctccactgacagcttctaa

SEQ ID NO: 347196 - DNA, 930 bp, Pseudomonas aeruginosa
atgcgtcgcttgcgccccgcccgccgggctttccaggcgctgctcgcgctcgtcttctgctgtctcccgcatgtcggcgaggccgcgcaactggtcctggtcagcgccaaccagggggccgcggtgaacgcctttcgcgatgccctggcgcagcgacggccgcaggaccaggtggaactgcgcacgcccgcggccctggcggaggggatggtcttcgccgacgacacccgcctgctcctgctcggccccgaggccctggcctggcgcctgcgccagcaccgggcgccgccgaccctggcgctgctgctcaaccgggtcgatggccagcgcctgctgccaggcgccaacggacatggcggacacggcgtcggaggtctctgcgtactctggagcgacccgccggcgtcccgccagctccgcctggcgcgcctgatcctgccgggcatccagcgcatcggcgtgctctacggcaaggacagcgaattcctcctcgacgagcttcgccgcgaggcccgcagccaggggctccagctgttcgtcgccagcagcagcggcaacgacgacccgcgcccgctgcagttcctgctcggcaatagtgacctgctgctcggcatcgacgacaaacagctgtacaactcgcagagcatcaagagcctgctgctcggaagctacgccaagaaccgcgcgctgctcggccccaccgcagccttcgtcaaggccggcagcctggcgagcagctacagcgaccaggaggattggctggacaccctcgacgaattgctcggccaggcgcccaggcactggcccctcagcctctatccagggcatttcaaggtgctcggcaatcggcaggtagcccgttccctgggtatcgacctggccagcgacgccgacctcggccggcgcctcgccgaaggagaagaaccatga

SEQ ID NO: 347197 - DNA, 1023 bp, Pseudomonas aeruginosa
atgacagagcagcaaccgattgccgtgctcggcggcggcagtttcggcaccgccatcgccaacctgctggccgagaacggccaggcggtccgccagtggatgcgcgacccggagcaggccgaggcgatccgcagccgacgcgagaacccgcgctacctgaaaggggtcaaggtgcatcccggggtcgagccggtcaccgacctggagcgcaccctggccgattgccaactgatcttcgtcgccttgccctccagcgccctgcgcaaggtgctgcaaccacaccaggcggcattgacggacaagctgctggtgagcctgaccaagggcatcgaggcgcacaccttcaagctgatgagtgagatcctcgaggaaatcgccccgcaagcccgcatcggggtgatttccggcccgaacctggcgcgcgagatcgcagagcacgagctgaccgccacggtggtcgccagcgaggacgacgagctgtgcgcccgcgtccaggcggccctgcacggccgcaccttccgcgtctacgccagccgcgaccgcttcggagtggaactcggcggtgcgctgaagaacgtctacgcgatcatggccggcctggccgcggcgatggacatgggcgagaacacccgtagcatgctgattacccgcgcgctggcggaaatgacccggttcgccgtcaagctcggtgccaatccgatgacctttctcggcctcgccggcgtcggcgacctgatcgtcacctgttcctcgccgaagagccgcaactaccaggtcggccacgcccttggcgaggggctcagcctggaggaggcggtatcgcgcatgggcgagaccgcggagggtgtgaacactctcaaggtactcaaggaaaagtccgacgagatgcaggtgtacatgccgctggtcgccggtctccatgcgatcctcttcgaaggccgcaccctggcgcaggtcatccagctgctgatgcgcggcgagccgaagaccgacgtcgatttcattcccaccaccggcttctga

SEQ ID NO: 347198 - DNA, 342 bp, Pseudomonas aeruginosa; identical to SEQ ID NO: 319803

SEQ ID NO: 347199 - DNA, 1668 bp, Pseudomonas aeruginosa
gtggtcactgcaaatcgtctgccgctcgaagtcttcttcgagcgcgaaaagcgtcatccgcaacggcgttacctggtgcagcccatcggtggcggccgggtcgaggagctgagctggggcgaggtgggcgaccaggcgcggcgtgcagccgcctggttgcgcagcctggatctccccgccggcagccgtatcgcgatcatctcgaagaactgtgcgcactggatcgtcactgacctggcgatctggatggccgggcacgtttccgtccccctctatcccaatctcaccgccgagtcggcgcgccaggtgctggagcattccgagtcggcggtggtcttcgtcggcaagctcgacgactggccggcgatggcgcccggagtccccgagggcataccgaccgtggccatgccgttgcacccggaagggcgtttcgaccgccagtggagcgacctacaggcctgcgcgccgctcgaaggcgacacgccgaccgccgccgagcaactcgccaccctgatctacacctccggaaccaccggcgtgcccaagggggtgatgcacaacttcagcagtttcgccttcgccgccagccgcggcgtggaactgttcggcacccgcgaagacgaccggatgctctcctacctgccgctgtgccacgtggcggagcggatgttcgtcgagatggggtcgctctacgggggaaccacggtgttcttcgccgaaagcctggacaccttcgtcgaggacatgaagcgtgcgcggccgaccctgctgttcggcgtgccgcgcatctggaccaagttccagatgggggtgtattcgaagatgccggcgcagaagctcgaccgcctgctgaagctgccgatcctcggccgcatcgtcggtcgcaaggtgctcgccgggctaggcctggacgcggtgcgctacgcgctctgcggcgcggcgccggtacccgaggcgctgctgctctggtatcgccgcctgggcctggatgtgctcgaggtctacgggatgaccgagaacagcggttactcccacgtctgccggcccggcaggcagaagaccggctggatcggccagaacagccccggcgtcgaggtacgcatcagcgacgagggcgaggtgcaggtgcgtagcggcgcgaccatggtcggctactacaaggagccggagaagaccgcagaggtactcaccgccgacggtttcctgcgcaccggcgacaagggcgagcaggacgccgaaggcaacctgcgcctgaccgggcggatgaaggaaatcttcaagaccagcaagggcaagtacgtggcgccggcgccgatcgagaaccgcctggcggtacacgatcgcatcgagcaggtctgcgtggtcggcgagggcctcagcgcgccgttggggctctgcgtgctctccgaggtcggtcgccgggaggccctcaacgggacccgcggggcgctggaaagcagcctgcgggcgcacctggaacaggtcaacggtgcgcttgacaagcacgagcgcctggtcggcctggtcctggtgcaggaaacctgggcggtggacaacggtttcctcacgccgaccttgaagatcaagcgcaatatggtggaaggtgcctatggctcgcgcttccacgaatgggtggaacgccgcgaggccgtgctctggcacgaatga

SEQ ID NO: 347200 - DNA, 438 bp, Pseudomonas aeruginosa
atgagcctctggcgacaaacgcccgacctggagcaactgaacgcctcgcagaagaacagcatcggcgacctgcttggcatccgcttcgaagccttcgacgacgagtcgctgaccgccagcatgccggtcgactcgcgtacccaccagccgttcggcctgctgcatggcggcgcctcggtggtcctcgcggaaagcctgggctcgatggccagctacctgtgcgtcgataccagccagtactactgcgtcggcctggaagtgaacgccaaccacctgcgtggcctgcgcagcggccgggtcaccgcggtggccagggcgatccacctggggcgcaccacccatgtctgggacatccgcctcagtggcgacgacggcaagccgagctgcatcgcccgcctgaccatggcggtggtgccattggcgggcagggcgggctga

SEQ ID NO: 347201 - DNA, 825 bp, Pseudomonas aeruginosa; identical to SEQ ID NO: 319807

SEQ ID NO: 347202 - DNA, 642 bp, Pseudomonas aeruginosa; identical to SEQ ID NO: 319808

SEQ ID NO: 347203 - DNA, 813 bp, Pseudomonas aeruginosa
atgtcgcaatcggttttcttcgcccacgccaacggcttcccgtcggctacctacgccaagctgttcgaggcgttggcgccggagtatcgggtggatcacctggaaatgcacgggcacgacccgcgttttccggtgaacgacaactgggacaacctggtggacgaactgctgcaccacctcgccagcctggaacagccggtctggggcgtcggccattccctcggcggcgtgctgcactaccacgcggcgctgcgccggccggaactctaccgcggcgtggtgatgctcgattcgccggtgctgaccctcgccgaccgcctggtgatccgtgccgccaagcgcttcggcttcatcgaccggatcactccggccgggcgcaccctggggcgtcgcgaggcgttccccgacctggaagaggcgcgggcgtacttctccggcaaggcgctgttccgccgcttcgaccccgattgcctggaggcctacgtacgccacgggctggccgacagcggcggcggttccggcctgcgcctgcgcttcgatccggccaccgagatcagcatctaccgtagcgtgccgcacagcagcccggggcgtccacgacagttgcaggtgccgctggcgatggtgcgcgggcggcacagcaaggtggtgttgccgcaccacacccggctgatccgggcgatgccgcgcggcgagttcatgtcgctgcccggcggccacatgttcccgctggagcgcccgcgggaaaccgccgaactgctgaaaggcgtgttcgatcgctggtcgcgggcgaccgaggagcgttcggcatga

SEQ ID NO: 347204 - DNA, 861 bp, Pseudomonas aeruginosa
atgagcctgcaggtcgaggaagtacgcatcagcctgccgcacatcgaactggccgcgcatctgttcggtccgccggacggcaagccggtgatcgccctgcatggctggctggacaacgccatgagcttctcgcgcctggcgccgaagctcgccgggctgcgtatcgtcgccctcgacttcgccggccacgggcattccgcgcatcgtgccgagggcgccagctacctgctctgggactacgcgctggacgtgctgatggtggccgagcaactgggctgggagcgtttttccctgttggggcactcgatgggcgccatcgtctcggtgctgctcgccggggccttgcccgagcgcatcgagcggctggcgttgatcgatggcctgattccctacactggcgaagccgacaaggcgccgcagaagctcggcgaagcgctgaaggcgcaactggcgctacgccacaagcgcaagccggtctatgccgagctggaaaaagccgtggaagcgcggatgcgcggggttggcgagatctcccgggaggccgccgaactgctcgcccagcgcggcctggaaccggtgcccggtggctatacctggcgcaccgacgcgcgcctgaccctaccgtcgccgctgcgcctgacccaggcccacgcgctgaacttcgtgcgcagcgtggaatgcccggtcagcctggtgctggccgaacagggcatgctggcggtggagccgcgcatgcgggcgctgctggagaccctgccgttcgagcggcaccacctgccgggcgggcatcacctgcatctggacgatgaggccggggcgcaggcggtggccagggtcttcgcggccttcttcgcgcgctga

SEQ ID NO: 347205 - DNA, 663 bp, Pseudomonas aeruginosa
atgatcgatctctacaccgccgccacgccgaacggccacaaggtttccatcgccctcgaggaaatgggcctgccctacagggtgcacgcgctgtcgttcgacaagaaggagcagaaggctccggaattcctcaggatcaatcccaacggccgcatcccggccatcgtcgaccgcgacaacgacgacttcgccgtcttcgagtcgggcgcgatcctcatctacctcgccgagaagaccgggcaactgatgcccgccgacgtcaagggccgctcgcgggtgatccagtggctgatgttccagatgggcggggtcggcccgatgcaggggcaggccaacgtgttcttccgttatttcccggagaagttgcagggcgccatcgaccgctaccagcatgagacccggcgcctctacgaagttctcgacggtcgcctgggcgaggccgagtacctcgccggcgactacagcattgccgatatcgccacctatccctgggtgcgcatccacgactggtccggtgtcgccgtcgacgggctggacaacctgcagcgctggatcgccgccatcgaggcgcgtcccgcggtgcagcgcggactgctggtgccgcggcgggagaaggagggcgacgacgccatccgtaccgcccagtcgatgctgacccgttga

SEQ ID NO: 347206 - DNA, 807 bp, Pseudomonas aeruginosa
atgcgagggttcctgttgctatccctgggcgttttcagcttttcggcgctggccgccgaccttcccggcagccatgacctggacatcctgccgcgcttcccgcgcgccgagatcgtcgacttccgtcaggcgccgagtgaggaacggatctacccgctaggggcgatcagtcgcatcagcggtcgcctgcgcatggagggcgaggtgcgcgccgaaggcgagctgaccgcactgacctaccgcttgccgcccgagcacagcagccaggaggcgttcgccgcggcgcgcaccgcgctgctcaaggccgacgccacgccgctgttctggtgcgagcgacgcgactgcggctccagcagcctgctggccaacgccgtgttcggtaatgccaagctgtacggcccggacgagcagcaggcctacctgctggtgcgtctggcggcgccgcaggagaacagcctggtggcggtctactcgatcacccgtggcaatcgccgcgcctacctgcaggccgaggaactcaaggccgatgcgccgctggcggaactgctgccgagcccggcgaccctgctgcgcctgctcaaggccaacggcgaactgaccctcagccatgtgccggcggagccggccggctcctggttggagctgctggtgcggaccctgcgcctggataccggggtgcgggtcgagctgtccggcaagcacgcccaggagtggcgcgacgccctgcgtgggcagggcgtgctgaacagccgcatggagctgggccagtcggaggtcgagggcctgcacctcaactggctgcgttga

SEQ ID NO: 347207 - DNA, 1275 bp, Pseudomonas aeruginosa
atgactcacgccttgaatgcccggccgggagcgcaccccggccatcctccggaagaactgctgatcgatgccgaagtcgacgacgaaccagttccgccggcgccgccactacgcccctggctgctcctgctgggcctggtgctggtggcgctgaacctgcgcccggcgctgtccagcctcgcccccctgctcaaccaggtgcgcgacgataccggcctctcggccgctgccgccggcctgctgaccaccgcgccggtactctgcctggggttgttcgcgccgctcgcgccgcgcctggcccggcgtatcggcgccgagcgcagcgtgctgctgatcctcttctgcctggccggcggcatcgtcctgcgcagcctgttcccggtgttcggcctgttcgccggcagcgtcctggccggcgccagcatcggcatcatcggcgtgctcctgccgggcatcgtcaaacgcgacttcccgcgccaggccggggtgatgaccggggtctacaccatggccctgtgcctgggcgcagcgctcgccgccggcgctaccgcgccgctggagaagctcttcggcaactgggaactggcgctggcgttctggtcgctgccggcgatcctcgccgccgccttctggctgccgcagacccgccagggccagcacgcccatcgccaggccttccgtgtcatcggcctgtggcgcgacccgctggcctggcaggtcacgctgtacatgggcctgcaatcgtccctggcctacatcgtcttcggttggctgccgtcgatcctgatcgaccgcggcatgactgcggtagaagccggcctggtgctgtccggctcggtgatgctgcaactgatcaccgccctgctcgcgccctggctcgccgctcgcgccagggaccagcgcctggcggtggtgctggtgatggcgaccaccctcgccggcctgctcggcttcctctatgcgccgctgcagaccatctggggctgggcggtcctgctcggcctcggccagggcggtaccttcagcatcgccctggcgctgatcgtcctgcgctcgcgcgacgcccacgtcgcctcgcatctgtcgggcatggcccagggcgtcggctacaccctggcggccatggggccgttcatggtcggcgtggtccacgacctgaccggcggctggaacgcggtcggctatatcttcatcggcgtcgccatcgccgccaccctgttcggcctcggcgccgggcgcagccagtacgtgggggcccgcagcgaacacctgtag

SEQ ID NO: 347208 - DNA, 648 bp, Pseudomonas aeruginosa; identical to SEQ ID NO: 319815

SEQ ID NO: 347209 - DNA, 1530 bp, Pseudomonas aeruginosa
atgcccgatattcgttgtatcgccgtggtcggtaccggtgcgatgggcaccgggatcgcccagatcgccgcccaggccggcctgaccgtatggctgttcgacagccgcgccgaggccgccgccgaggcacgccagcgcctgcggcagaccttcgagagcctgtgcggcaaaggcaagctgagcgccgccgacgccgaggccgcgcaaaaccggctgcgggtggcggaacgcctggaacaactgggcgactgcgaactggtggtggaggccatcgtcgagcgcctggaggccaagcaggaattgctgcgccggctggaagccatagtcgcgccggagaccatcctcgccagcaatacctcgtcgctgtcgatcaccgccatcgccgccgcctgcgagcggccgcagcgggtcgccggctttcacttcttcaacccggtgccgctgatgcgcgtggtcgaggtggtcgacggcctggccagcgctccggaagtcggcgacgccctgctcgccctcgccgcgcgcctgggccaccgcggcgtacggaccaaggacagccccggcttcatcgtcaaccatgccggccgcgcctatggcaccgaggccctgcgcatcctcggcgaaggcgtcgccgaatgcgccgagatcgaccgtgtgctgcgcgagtgcgccggcttccgcatggggccgttcgaactgctcgatcttaccggcctcgacgtgtcgcacccggtaatggaatcgatctaccagcagtactaccaggaaccgcgctaccgcccgcacccgctgacccgccagttgctcgccgccggccgtctcgggcgcaagagcggccagggcttctatcgctacgtcgacggccagccgcaggacaagcccggtccgcaaccggtgccgcaggccgccatccggcccccggtgtggctgggctgcgaaaacgaggacgaccgccgcacgctcgccgaactgctgcatcgcctcggcgtcgagccggaaaccggcgagcgcccttccgccgcagcgctctgcctgctggccgcctggggcgaggacctgagcagcgccgtgcagcgcttcgcctgtcccgccgagcgcagcgtcggcatcgacctgctctgcgacctcgagcgccggcgctgcctgatgctctcgccactgactaccccggccatgcgcgacgccgcccacgcgctactggctggcgacggcgtcggggtcacggtgctgcgcgacagtcccggcttcgtcgtccagcgggtactggcgatgatcgtcaacctcgcctgcgacatcgcccagcagggcattgccagcgtcgaggatatcgaccaggcggtgcacctcggcctcggctatcctcacggcccgctggaatggggcgaccgcctcggcccgcggcgcctgctgagcattctccagcgcttacagacgcttaccggtgacccgcgctaccggcccagtccctggctgcgccgacgagcgcaactgggcatgtccctgcgcgccggcgaaaccgccgccgtaggctga

SEQ ID NO: 347210 - DNA, 786 bp, Pseudomonas aeruginosa; identical to SEQ ID NO: 319817

SEQ ID NO: 347211 - DNA, 867 bp, Pseudomonas aeruginosa
atgcgcggcaacgacgagcgccggagtccggcggaaggtgccagtacggaagcggaagtgtccgccttcgaagctgtgctgatcgacccgatgcaggagaaagacgaggaactcaaggaccgccagttcgtcaccgcgctggcccgcgggttggaattgctgcgctgtttcacgccacgggaaagcctgctgggcaaccaggaactggcgaagaagaccggcctgccgaagccgacggtgtcgcgtctgacccacaccctgacccggctgggctatctgcgtcacctgccgcatagcggcaagtatcaattggaagtgggggtgatgtcgttcggctacgcgatgctctcgaacctgtcgattcgcgcgctcgcccgcccgttgatggaagagatggccggctacgccaaggccgcggtggccatggcggcccgcgaccggctgagcatggtctacctcgatgtggtgcatggcgaggccaacctgaccatgcgtcgccaggtcggcagccacctctcgctgcaccgcagcgcgatcggccgggcctgcctggcggcgatgccggaggacgagcgggaattcatcctcgggcacatccgcaagcgccacccggaagactggccggaagtgcgcaaggggctggagcgggccttccgcgactatgccgactacggcttctgcctgtcgctcggcgagtggcaacgcgacgtcaacgcggtgggcgtggccttgcaccatgagagccatgggctgctggcgttcaattgcggcgggccgagtttccatctcaagcgcgagaaactggaggacgacatcggcccgcgcctgctgcacatggtccacaacatcgaggccgccacccgctga

SEQ ID NO: 347212 - DNA, 1155 bp, Pseudomonas aeruginosa
atgattcgtgatccggaaaccctgaacctgctgctggacagcatccgccagttcgtccgcgaaagcctggtgcctcatgagcaggaagtggcggaaaccgaccgcatccccgaggcgatcatcgcccgcatgcgcgagatgggcctgttcggcctgtcgatcccggaggcctacggcggcctcggggtgaccatggaggaagaggtgagcatcgccttcgagctggggcggacctcgccggcgttccgttcgctgctgggcaccaacaacggcatcggctcccagggcatcgtcatcgacggcaccgaagaacagaagcggcgctacctgccgcgcctggcgtcgggcgaactgctcagttcgttctgcctcaccgaaccggactccggttccgacgccgcctcgctgaagaccacggcggtgcgtgacggcgagcactacgtgctcaacggtaccaagcgcttcatcaccaacgccccgcaggccggcatctacaccgtgatggcgcgcaccgacccggcgatccgtggcgccggcggaatctccgctttcgtcgtcgagcgcggtacgcccgggctgtccctgggcaagccggatcgcaagatgggacagaagggcgcgcatacctgtgacgtgatcttcgacgactgccgggtgcctgccagtcagttgatcggcggggtcgagggcgtcggcttcaagaccgcgatgaaggtgctcgacaagggccgcctgcacatcgccgcagtctgtgtgggggtcgccgagcggatgctcgaggatgcgttgcgctatgccctggagcgcaagcagttcggccagccgatcgccgagttccagttgatccaggcgatgcttgccgacagcaaggccgaagcctacgcggcgcgctgcatggtcatcgacgccgcgcggcagcgcgacgaaggccgcgatgtcggtaccgaggcgtcctgcgccaagctgttcgcctcggaaatgtgcggccgcgtcgccgaccgcgcggtgcagatattgggcggcgccggctatatcggcgactacgggatcgagcgcttctatcgcgacgtgcggctgttccgcatctacgagggcaccacgcagatccagcaactgctgatcgcccgcaacatgatccgcgccgcccagggctag

SEQ ID NO: 347213 - DNA, 1695 bp, Pseudomonas aeruginosa
atgaacagccacgagattctcttgatcctggcctttttcgccttggtcctggtgcctgcaccgttcctcgggcgctactgcttcaaggtgatggaaggccaacgcaatctcctcagcgcgccgctggcgccactggagcgcgtctgctatcgcctgttcggcgtcgatccggcgagcgagcaggactggaagacctacaccctggcgctgctggcattcaacctggccggcctggtcctgctgttctcgatcctcatgctgcagggcagcctgccgctgaacccgcagcacctgccgggcctggaatggacactggcgttcaacaccgcggtcagtttcgtcaccaataccaactggcaggcctacagcggcgaggcctcgctgagctacttcagccagatggtcggcctcacggtgcagaacttcgtcagcgcggcggtcggcctctgcgtgctggtggccctggcgcgcggcatcagccgccgctccacacgacagctgggcaacttctgggtcgacctgacccgcggcaccctctacgtgctgctgccgctgtgcctgctgctggcgttgctgctggtctggcagggcgtgccgcagaccttcttcgactatgtccatgccaccaccttgcaaggcgccgagcagaccatcccgctcggcccggcggccagccagatcgccatcaagcaactgggcaccaatggcggcggcttcttcggcgtcaactcgacccatccgttcgagaacccgagcgcctggagcaacctgttcgaagtggcctcgatcatcctgatcccggcggcgctggtattcaccttcggccattacgtgaaggacctgcgccagagccgcgcgatcctcggctgcatgctgctgctgttctgcctcggcctgggcctgtcgctgtgggccgaataccagccgaacccggcgctggcgcagttgccgatcgagcagggcgcgccgatggagggcaaggagagtcgcttcggcaccgccgccagcatgctctgggcgatcaccaccaccgccgcctcgaacggctcggtgaacgccatgcacgacagcctgagccccctgggtggcatgctgccgctgctgaacatgatgctcggcgaggtgatcttcggcggcgtcggcgccggcctctacggcatgctgctgttcgtcctgatcgcggtgttcctcgccggcctgatggtcgggcggacgccggagtacctgggcaagaaactcgaggcgaaggaggtccgcctgctggtcttcaccctgctggtgatgcctgtcggcgtgctggtgctcggcgccatcgccgccagcctgccggggccggcctcggcggtgaccaatcccggcccgcacggcttcagccaactgctctacgcctacacctcggggagcgccaacaacggctcagcgtttgccggtttcggtgccaacacgccgttccacaacctgatgatcggcctggccatgctcatcggccgcttcggctacatcctgccgatcctcgccatcgccggcagcctggcggcgaagaaggccagcccggtggggccgaacagtttcccgacccatggtccgctgttcgtcagcctgctcaccgtgaccatcctgctggtcggcggcctgaccttcctgccgaccctggccctcggcccgatcgctgaacaactgagcctcggcttctga

SEQ ID NO: 347214 - DNA, 2073 bp, Pseudomonas aeruginosa
atgaacgctcagacccaggcgtccaagaacgccttgcacaaatcgctcgaacgtcgccacaacgcgtccaccagcctcgccgccttgtggcggccggcgctgctgcaagccttcgtcaagctcgacccgcgccagttgctgcgctcgccggtgatgctggtggtcgaactgaccgccgtgctcaccaccttgctgtgcttcgtccccgaccaggcggtgccgacctcggtggcgctgcagatcgccctctggctgtggttcaccgtgctcttcgccaatttcgccgaagcgctcgccgagggacgtggcaaggcccgcgcggacagtctcaaggccggcagccagggcctctccgccaataagcggcgcgccgacggcagtttcgagagcgtcgttgccagcagcctgcgcaagggcgatgtggtacgggtccaggccggcgagatgattcccggcgacggcgaagtcatcgaaggcgtggcggcggtcaacgaggccgccatcaccggcgaatcggcgccggtgatccgcgagtccggcggcgatcgctcggcggtgaccggcaacacccaggtggtgtccgactggctgctggtacgtatcggcgccaacccgggcgagtcgaccctggaccggatgatcgccctggtggaaggcgccaagcggcagaagacccccaacgaagtggcgctggacatcctgctgatcggcctgaccctgatcttcctgctggtagtggtgaccctcaagccgttcgccctgttcgccggcggcaacctgccgctggtgttcctggtggcgctgctggtgacgctgatcccgaccaccatcggcggcctgctctcggccatcggcatcgccggcatggaccgcctggtgcgcctgaacgtgatcgccaagtccggtcgcgcggtggaggcggccggcgacgtccacgtgctgctgctcgacaagaccggcaccatcaccttcggcaaccgccgctgcagcgcgctgtatgccgcgccgggggtgagcggcaaggaactggccgagggcgcgttgctggcctcgctggccgacgacaccccggaaggcaagtcgatcgtcgaatacctgcgcatcctgcatccgatcgaggagccgcgccgcgaggagctgacgccgatcgccttcagcgcggaaacccgcctgtccggggtcgactggaacggccaggtgtaccgcaagggggcggtggatgcggcgctgcgcttcatcgacctgccgcgggagaagatgcccgaggtgctttcgcgggaggtggacaagatcgcccagagcggcggcaccccgctgctggtggtagccaacggccggctgctcggcgccattcacctgaaggacgtggtcaagccgggcattcgcgagcgcttcgccgaactgcgccggctgggcatccgcaccgtgatggtgaccggcgacaacccgctgaccgccgctgccatcgccgccgaggctggggtcgacgacgtgatcgccgaggctaccccggagaagaaactggcgcggattcgccaggagcagggcgaaggtcgcctggtggcgatgtgcggcgacggtgccaacgacgccccggcgctggctcaggccgacgtcggcatggccatgaacgacggcacccaggccgcccgcgaggcggccaacctggtcgacctggacagcgacccgaccaagctgctcgacgtggtccaggtgggcaaggagttgctggtcacccgcggcgcgctgaccaccttttccatcgccaacgacgtggccaagtacttcgccatcctgccggcgctgttcgtcggcatctacccgcagctcgacgtgctcaacgtgatgcgcctgcaaagcccgcagagcgcgatcctgtcggccatcgtgttcaacgcgctgatcatcgtcgcgttgatcccattggccttgcgcggcgtgcgggttcaggcggcggacgcttcgcaactgctgcagcgcaacctgctgatctatggcgtcggcggcctggtggcgccgttcctcgggatcaaggcgatcgacctgctgctgaccgccgtcggcctggcatga

SEQ ID NO: 347215 - DNA, 552 bp, Pseudomonas aeruginosa
atgttcaagcaactccgtccggcactggcgtcactgctggtgctgagcatggtcaccggcgtggcctatccgctgctggtcaccggtatcgcccaactggcgttccccgagcaggccaatggcagcctgctgcgcgacgccgagggcaaggtgctcggctcgcggctgatcgcgcagaaattcgacggcgaggagtggttccattcgcggccttcggcgggcgactacgccaccgtttccagtgccgcgagcaacctggcgccgagcaacccggcactggccgagcgcatcgccagggacgccgcccaggagcgtatcgccgaccaggggccggtgccgctggcgctggtcactacctccggtagcggactcgatccgcagctgccgccgcaggccgcgcgttaccaggcgctgcgggtggccacggcgcgcgggctgccgctgcggctggtggaagacctggtggaaagccacaccgagcggccgctggtggggccggcggtggtcaacgtgctggcgctgaacatggcgctggcggggttgaagcgctag

SEQ ID NO: 347216 - DNA, 2658 bp, Pseudomonas aeruginosa
atgaccgacaccgcacgcgccgacgcgctgctggccgacctgcccgctgacgggcgcggccgcctgaaagtctttctcggcgcggcgccgggggtgggcaagaccttcgccatgctgcaggccgcccaggcccagttgcgccagggcgtgaaactgcgcgccggggtggtcgagacccactcgcgggcggaaaccgagtccctcctcgcaggcgtgccgcagcagccgctgcgcagcctcgagtatcgagggatgaaactgcaggaaatggacctcgacggtctcctcgccgacccgccggcgctggccctggtcgacgaactggcccacagcaacgttcccggcagccgccacgccaagcgctggcaggacatccaggagttgctggcggcgggaatcgacgtctacacaacggtcaacgtccagcacctggagagcctcaacgaccaggtccgcgacatcaccggcgtgcaggtccgcgagacggtgccggactgggtgttgcaggaggcctacgagatcgtcctcatcgacctgccgccgcgcgagctgctggagcgcctgcgcgagggcaaggtctacgtgccggaacaggcgcgggcggcgatcgatgcgttcttctcgcagaccaacctcaccgcgctgcgtgaactggcgatgcagaccgccgccgcgcgggtcgacgccgacctcaaccaccgctaccgccagcgcggcgaggaagcgccggcgttgcgcgggcggctgctggtgggcatcgacggtgacgaacaggccgaacgcctggtgcgccacgcctgccgggtcgccgaacgtcggcacctgccctggagcgtggtacacgtcgataccggcggcttgcgcggcgagcaggcgcggatgcgcctgcagggtgcgcagcaactggccgagcggctcggcggcgagatcgtcgtgctgcgcgccggcgaggtggcgcggaccctcctgcaacatgcccgcgagcgccgcgccagcctggtcctggttggccagtcgcggcgccgctggtatcgccgggccttcggcggtggtctcgccgggcgtctgctgcgcgacggccagggcctggagatcagtgccctggacagcgaggccgacctgcgcccggcggaaccgcggccacgctatccggtggtgtggaacgactatctgctggcgctgctggcgaccgccctggccagcggcctggcctggatcgtggcgcacctgctggagctgccgaacatctccctggtgttcctgatggcggtgctgctggtggcagtgcgcagcagcctgatgccggcactgctgtgcgcggtggcgtcgttcctggcctatgacttcctgttcatcccgccgcatttttccttcgccatccatcgccacgaagacctgctgagcctggcgttcttcctgttcatggccggcctcaccggcaacctggcggcacgccagcggcgccagctggaggcgctgcgcgatacccaggaggaaaccagcctgctgctggagctgtcgcgcaagctcaccgccgccaccgaccgccaggcggtgctggccgccgccgcccagcagttcgacgactggaaggacgtcgaggtctgtctgctcggtcaggtcaatggcgagtggaagaccgaggccggcgtgcagcggcaactcgccgaccaggaacgggtcgccgcggactgggcctgggcccacgaccagccggccggcctcggtactggcacgctgcccggaggacgctggtggtggtggccgctgtcggcggaagagggaccgctggcactgctcggtgtcgcgccgctggacggccagccgctgagcccgcagcgccggcgcctgcttgccgccctcggccagcctctggcccaggccctggcgcgggctcgcctggccgaggacctggaggccgcgcgcctgcacggcgagaccgagcaactgcgcagcgccttgctcgcctcggtgtcccacgacctgcgcacgccgctgacggccatgcgcggctccatcgacagcctgctggcgctgggcgaggcgatcccgccggcggatcgtcgcgaactgctggaaagcacccgcgacgaggccgagcgactggaccgctatatccagaacctgctcgacatgacccgtctcggccacggtggcctgaagctggcgcgcgactgggtggcgccgggcgacatcgtcggcagcgcgctgaaccgcctgcgcgcggtgctggcgccgtaccgggtgcaggcgatcgtggccaacgacctgccgttgctctacgtgcatgcggcgctgatcgagcaggcgctgatcaacgtgctggaaaatgccgcgcgcttctcgccgaaccacggccggttgcgcatcgaggtcagccaggatgccgccgagctgcgtttcgcggtgagcgacgaggggccggggattcccgaggccgagcgggagaagatcttcgacatgttctacaccgctgcccgtggcgaccgcggtggccagggcaccggcctgggcctggcgatctgccagggcatgatcggcgcccacggcgggcgcatcagcgtcggcgaaggcctcgacggtcgcggcaccacgctggtcctgcacctgccgctgcatccgcagccggacctcgggcaactggagggcgacgaatga

SEQ ID NO: 347217 - DNA, 693 bp, Pseudomonas aeruginosa
atgacccaattgcagaacagcatcctgctgatcgacgacgaaccgcagatccgcaagttcctccgtatcagcctcaatgcccagggctaccgggtgctcgaggccggcaccggcgaagaggggctggcccaggccgcgctgaaccggccggacctggtggtgctcgacctcggcctgccggaccgcgacggccaggacatccttcgcgacctgcgcgaatggtcgcaggtgccggtgctggtgctgtcggtgcgcgccagcgagggcgagaaggtactggccctggatggcggcgccaacgactacgtgaccaagccgttcggcatccaggagttcctcgcccgcgtgcgcgtcctgctgcgccaggcggcgcagggcgaaagcccggaggcgtcggtggcggtcggcccgttgcaggtggacttcgcctatcgccgagtcaccctggagggtgcggaagtggcgctgacgcgcaaggagtatgcggtgctcgccgcgctggcacgccatctcggacgggtagtgacccagcagcaactgctcaaggatatctggggtccgacccatgtcgaagacacccattacctgcgggtcgtggtcggccacctgcgccagaagctcggcgacgatccggccagcccgcgcttcctggtgaccgaggcgggtgtcggttatcgcctgcgcgacagctga

SEQ ID NO: 347218 - DNA, 909 bp, Pseudomonas aeruginosa
atgcagcaactgttgaacgagattctcgatgaagtccgcccgctgatcgggcgcggcaaggtcgccgactacatccccgcgctcgccggcgtcgagccgaaccagctggggatcgccgtgtacagccgcgacggcgagctgttccatgccggcgacgccctgcggccgttttccatccagagcatttccaaggtgttcagcctggtccaggcgatccagcattccggcgaggacatctggcaacgccttggccacgagccctccggccagcctttcaactccctggtgcagctggagttcgagcgcggcaagccgcgcaacccgttcatcaatgccggcgccctggtgatctgcgacatcaaccagtcgcgtttcgccgcgccggcgcaatcgatgcgcgatttcgtccggcgcctgtgcggcaacccggaagtggtgtcggactcggtggtggcgcgctcggagtaccagcaccgctcgcgcaacgcggcggcggcctacctgatgaaatcgttcggtaacttccacaacgacgtcgaggcggtgctgctcagctatttccatcattgcgcgctgcgcatgagctgcgtcgacctggcgcgggcgttctgcttcctcgccgacaagggcttctgcaagcacagcggcgagcaggtactcaacgagcggcagaccaagcaggtcaacgcgatcatggccaccagcgggctctacgacgaggccggcaactttgcctatcgggtcggcctgccgggcaagagcggtgtcggcggcggcatcatcgcggtagtgccggggcgcttcacggtctgtgtctggtcgccggaactgaacgccgcgggcaattcgctggcgggtatcgccgcgctggagaaactcagcgagcggatcggctggtcgatcttctga

SEQ ID NO: 347219 - DNA, 606 bp, Pseudomonas aeruginosa
atgtcccgtccgatccccgtttcccgtgtcttcgcctgcctcaccgttctcgccgcctgcgcgcatgccggcgccgccgaaccggactggcgtggctacaccagcgaacagcagcagcgcagcgtgctggccgtcgagcaggacgccgaggccatcaacaagcgctactacgacagtgccttcgaggaattcctgccggaactggagcaactggaactcagcctggcgcagcccgtcgtcgccgtcgacgagaaaggcctgctgggcgactggaagtgccgctcgacccaggccgaccagtacggcatctatcgctatccgaacttccagtgccgcatccggcgtaccgaccgcggcctgttcctggagaagaccagcggttcgcaacgggtcagcggctacctgttccgcgaaggcacgcagcgctacgtgttcctcggcggcgccacggtcaacgacgagccccaggtggccttcagtggcctggcccacggcgcgccggctgagtccgacgtggtcgcgctgctgcgcccgcacgccggtggcttcctcctgctgttcccggaacggcgcggcggctacgaggtcctcgagttcagccgctga

SEQ ID NO: 347220 - DNA, 1038 bp, Pseudomonas aeruginosa
atgagcaaacaggtcgccctggtattgggctccggcggtgcgcgcggctacgcgcacatcggcgtgatcgaggaactcgaggcacgcggctatgagatcacctgcatcgccggttgttccatgggctcggtgatcggtggcatctacgccgccggcaagctgcgcgagtaccgcgagtgggtggaaagcctggattacctcgacgtgctgcgcctgctcgacgtcagcttccgcctcggcgcgatccgcggcgagcgggtgttcggcaagatccacgagatcctcggcgaggtaaacatcgaggacctgtcgattccctacacggcggttgccaccgacctcaccaaccagcaggaaatctggttccaggaaggctgcctgcaccaggccatgcgcgcctcggcggcaatccccagcctgttcacaccggtcatgcagggcagccgcatgctggtcgacggcggcctgctcaacccgttgccgatcgtgccggtggtgtcggcccacagcgacctgatcatcgcggtcaacctcaacgccaccaaccagaagcagtaccacctgccggtgatcgagcgtccggccgcgctcaaggggcgcttcgacagcatgatcgagagcctcggccacaaactctcgttcttccgccgccacggcgacgacaataccccgccggagctgagcgccgacgccctgctccatccggttccggcggaatccgaggagcccgccgagccgcaactgcaacagccggccgcggcgccgcaaggcaaggactcgccgaagtcggccagcggcaccacggtggtggaaagcagcggtccggcatcgctgctggaactggtcaaccagagcttcgaggtgatgcagacctcgctggcgcagtacaagatcgccggctacccgccggacatcctgatcaacgtgccgaagcgggtctgccgcttcttcgagttctacaaggcgccggaattgatcgccctcggccggcagatcgccagcgacaccctggaccgctacgaggaagacaacgcctga

SEQ ID NO: 347221 - DNA, 279 bp, Pseudomonas aeruginosa
atgaaaacctggatcgttctgcccgtccttgccctgaccctggccggctgcgccggcaagaccgcctaccgggagaactgcgccgaccagttggacgcggcctggaaggaactcgacctggccaaggccgaaggtttcgccggcaccgtcagctactcgaaggccctgaccctgctcaccggggccaagacccagcagcagttcgaggcctacgagggctgcaccagcaaggccgagaaggcgcgcttctatatccgcgagtcgcgcgccgggcgctga

SEQ ID NO: 347222 - DNA, 1035 bp, Pseudomonas aeruginosa
atgagcgaggcgatccgcctgacccagtacagccacggcgccggctgcggctgcaagatttcgcccaaggtactggaggtgatcctcgccggcagcggcgcgcagaacctcgatccgaagctctgggtcggcaacgcctcgcgcgacgacgcggctgtctacgccctcgacgaggagcgcggggtggtctccaccaccgatttcttcatgccgatcgtcgacgaccccttcgatttcggccgtatcgccgcgaccaacgccatcagcgatatctacgccatgggcggcgacccgctgatggccatcgccatcctcggctggccggtcaacgtgctggccgcggaagtcgcccgcgaggtgatcgccggcggccgcaaggtctgcgaggaagccggcatcccgctggccggcggacactccatcgacgcccccgagccgatcttcggcctggccgtgaccggcgtggtggagaagcgcttcatgaaacgcaacgacaccgccgaggccggctgcaggctgtacctgaccaagccgctgggcatcggcatcctcaccactgccgagaagaaggccaggctgcgcgccgaggacgtcggcgtggcgcgtgactggatgtgcaccctgaacaggcccggcgcgcgcttcggccggttggcgggggtcaaggcgatgaccgacgtcaccggtttcggcctgctcggccacctggtggaaatggccgacggcagcaagctcaccgcacgcgtggagtacgccgcggtaccgcgcctggccagtgccgaatattacctggagcagggctgcgtgcctggcggcaccctgcgcaacttcgacagctatggcgagcgcatcgcgccactgccggaagtgcagaagctgttgctttgcgatccgcagaccagcggcggcctgttggtggcggtggctccggaaggcgaggcggagttcctcgccgtggcggcggaactcggcctgcaactggcgccgatcggcgagctggtcgagcgacagagtctcgcggtacaggtgctgtaa

SEQ ID NO: 347223 - DNA, 1110 bp, Pseudomonas aeruginosa
atgcgcgacaacacccagcactaccgcgaactgtttctcgacgatatccccctgatggatgtgcgcgccccggtggagtaccacaagggcgcctttcccaacactgtcaaccggccgctgatgaacgacatcgagcggcagaaggtcggcaccagctacaagcagcacggccagcaggccgccatcgcccttggccacgaactggtctgcggggcgctcaaggccgaacggctggcggcctggaaagccttcgccgaagccaacccgaacggctacctgtattgcttccgcggcggcctgcgctcgcagatcgtccagcagtggctgaagcaggacgccggcatcgactacccacgggtgatcggcggctacaaggcgttgcgcaacttccttttcgaaaccacccgcgcggcggtcgacgagtgcgatttcgtgctggtcggcggcctcaccggttgcggcaagaccgaggtgatcgcggcgctggacaacagcctcgatctcgaaggccacgccaaccatcgcggctccagctttggccggcgagccacgccgcagccggcgcagatagacttcgagaaccgcctggccatcgacatcctgaagaagcgtcatcgtggcgtcggccagttcgtccttgaggacgaggggcggatcgtcggcagctgctccttgccgctggagctgtaccagggtatgcagggctacccgctggtctggctggaggatgccttcgagcagcgtgtcgagcgtatcctcagggactacgtgatcgatctgcgcagcgagttcgagcgtgtggtgggcgtggaggagggcttcgccgccttctccgcctacctgcagaagagcctcgccggcatcgtcaagcgcctcggcggcgagcgctaccagcggctggcggcgatcctcgtgcaggcgctggaagagcagggccgcgacggctcggtggatacccatcgcggctggatcgaggggctgctcaaggagtactacgacccgatgtacgccttccagcggcagagcaaggaagaccgcgtggagttccgcggcaaccaggccgaggtgatcggctacctgcgccagcgtcaggcgttgcggccatcgtag

SEQ ID NO: 347224 - DNA, 348 bp, Pseudomonas aeruginosa
atgaactatcgaggaagctgccactgcggaaccatcgcctacgaagtcgaaggcgacctcgaccaggtgatccagtgcaactgttcactgtgcagccggcgcggctggctgctgtggttcgtcccgcgcgaccgtctggcgctgaagacgccggccagcgcgatgcacacctacaccttcaacacccaccgcctgcagcatcacttctgccccacctgcggctgcgcgccgttcagcgaaggcataggcccggacggccaggcgatggccgcggtcaacgcgcgctgcctggaggacatcgacgccagcgcgctcccggtacagcactacgatggccgcaacgcctga

SEQ ID NO: 347225 - DNA, 609 bp, Pseudomonas aeruginosa
atgcaactggacttcaccaccatcgctcccgccgaggcctatcgctggttggcttccaccgtcaccccgcgaccgattgcctgggtctcgaccctgtccgccgagggcgccagcaacctggccccgttcagcttcttccaggtgatcagcgacgagccgccgaccctgatggtcaacgtcagcctgcgcgacgacggcagcctcaaggacaccctgcgcaacgtccaggccaccgggcagttggtgatccacctagtcggcgccgcccaggccgaaaccatgaacgccacctccgcctggctgccccatggcgtgagcgagatcgagacggtcggcatccctaccgtgtccagcgtacgcgtggcgccgccgcggatcgccgcggcggcggtggccttcgagtgcgaggtggcggagatcaagccgtatccggcggagaaccccaattgccacctgatcttcgcccgcgtgctgctggcccatgtcgacgatgccgtgctggccgacgagcgccatgtggatagcgcccggctcgacctggtcggtcgcctgggcggcagccactacagccatacccgcgacacgttcagcatgatccggcccaggtag

SEQ ID NO: 347226 - DNA, 408 bp, Pseudomonas aeruginosa; identical to SEQ ID NO: 319833

SEQ ID NO: 347227 - DNA, 1722 bp, Pseudomonas aeruginosa
atgccactcgcccgctgggtacccggactcgatagcctgctccactaccgccgcgcctggttccgtccggatgtccaggccgggctgtcggtagcggcgatccagatccccaccgccatcgcctacgcccagatcgccggcttcccgccccaggtaggcctctatgcgtgcatcctgccgatgctgatctacgccctgatcggcagctcgcggcagttgatggtaggccccgacgcggcgaccgcggcgatggtcgccgccgccatcaccccgctggcggcgggcgatccgcagcgcctggtggacctgtcgatgatcgtcgcgatcatggtcgggctgttctccatcgtcgccggcctggcccgcgccgggttcatcgccagcttcctctcgcgaccgatcctggtcggctacctcaacggcatcggccttagcctgctggtcgggcaactgggcaagctgttcggctacgaggcggcgaccagcggcttcgtcgccggcatcctcgcgctgctggagaacctgctgcacatccattggccgacgctgatcctcggcagcctctcgctcttgctgatggtgctgctgccgcggcgcttcccgcagttgcccggggcgctctgcggcgtcctcctggccagcctcgccgcggcgctgctgggcctggatcgctacggcgtggaactgcttggcgaggtaccggccgggctgccgcaactgagctggccgcagaccagcctggaggaactgaaaagcctgctgcgcgacgccaccggcatcacggtggtcagcttctgcagcgccatgctcaccgcgcgcagcttcgccgcccgtcacggctacagcatcaacgccaaccacgaattcgtcgccctcggcctggccaacatcggcgccggggtctcccagggcttcgccatcagcggcgccgactcacgcaccgcggtgaacgacatggtcggcggcaagacccaactggtcggcgtggtcgccgcgctggtgatcgccgccaccctgttgctgctgaacaagcccctgggctgggtgccgatgccggcgctcggtgcggtcctgttgctggccggctggggcctgatcgacgtgcaggcgctgaagggcttctggaagctcagccgcttcgagttcagcctctgcctgctgaccaccgtcggcgtgctcagcgtcggcgtgctgccgggaatcttcgtcgccgtcagcatcgccgtactgcgcctgctctactacacctatcgcccgagcgacgcggtgctcggctggatgcacggcatcgacggccaggtcgagctggccaagtacccgcaggccaccactcttcccggcctggtgatctaccgcttcgacgcccccctgctgttcttcaacgccgactacttcaagcagcgggtgcttgccgtggtggacggcagcgagcggccgaatgcggtgctgctcaacgccgaagccatgaccaacctcgacatcagcggcctggccaccctccacgaggtgcaacagatcctcaaggcccagggcgtgcacctgtcgctggcgcgggtgaccgggcagacgctggacctgctgcaacgctcgagcatgctcggcgagatcaagccgccgctggtgttcagctcggtgcgctccggggtcagtgcctatcgctactggctgcgccagcaggaaagactcgccgcccaggccgcggctacaagcggaaatgcctga

SEQ ID NO: 347228 - DNA, 894 bp, Pseudomonas aeruginosa
atgaccgccgatcccatcctgaccctgttcctccccatcgcactgggcatcatcatgctcggtctcggactgtccctgaccccggccgacttcctccgcgtggtgcgctacccgaagccggtgctggtcggcctggtgtgccagatcgtcctgctgcccctggcctgtttcctgatcgtccagggcttcgccctggaggcggccctggcggtcggcatgatgttgctggcggcctcgcccggcggcaccaccgccaacctctacagccacctggcgcatggcgacgtggcactgaacatcaccctgaccgcggtgaactcggtgatcgccatcctcaccatgccgctgatcgtcaatctgtcgctgcaatacttcatgggcgacgggcaggcgattcccttgcagttcggcaaggtcgtgcaggtcttcgtcatcgtcctcggcccggtggccatcggcatgctggtgcgcaaccgcctgccggccgtggcggatcgcctgcagaagccggtgaagatcctttccgcgctgctgttgctggtgatcatcctgctggcgctggccaaggactggcagaccttcgtcacctacgcgccggtggtcgggctggccgcgctggccttcaacctgctgagcctggcggtgggctactgggtgccgcgcctgctgcgcctgccgaaggcccaggcggtggccatcggcatggagatcggcatccacaacggcaccctggcgatcgccctggcgctgagtccgagcctgctgaacaacagcaccatggcgattccgccggcgatctacggagtgctgatgttcttcaccgcggcggccttcggctggtgggtcagtcgtggccaccaggccgcgccggcgcccgtgacggcgccggactga

SEQ ID NO: 347229 - DNA, 477 bp, Pseudomonas aeruginosa; identical to SEQ ID NO: 319841

SEQ ID NO: 347230 - DNA, 1167 bp, Pseudomonas aeruginosa
atggccttctctgaacgcatctcccgcctgaaaagctccttgatccgcgaaatccttgccgcggcgcagcgtccggaggtgatgtcgttcgccggcgggctgccggccgagccgatgctgccgaaggtgcagtgggagcagatgccggcctccatgggccagtacggcatgagcgaaggcgagcctgccctgcgcgaagccatcgccgccgaagcgcgcgccctcggcgtcccctgcgaggcgagccaggtgctgatcgtcagcggttcgcagcagaccctcgacctggccagcaagctgttcatcgatccgggcaccgaggtgctgctcgaggcgccgacctacctcgccgcgctacaggccttccaattgttcggcgccgattgcgtgaccgtgccgctgggtgccgagggccccgacctggttgccctgcggcagcgcctggagcgacacaagccggccttcgcctacctgatcccgactttccagaatccgtccggcgtgcgctacagcgaggaacgccgcgacgcggtggcggcgctgctagacgaattcggcgtgaccctgatcgaagacgaaccctatcgcgaactggtgttcgacgagggccgcgcaaccccgctggtcagccgcctgcgcaagtccagctggatctataccggcacggtgtcgaagaccctgctgccgggcctgcgcgtcggtttcctgatcgccaccccggacctgttcccccacctgctgcggctgaaacagtcggccgacctgcataccaaccgggtagggcagtggcaggcgctgcaatggttcggcagcgaggcctaccgccagcacctggccgaactgcgcgagttctaccgggtccgccgcgacgccatgcaggaggcgctgctggagcacttcggtgagctggccgaatggaatatcccggagggcgggctgttcttctggctgaccctcaggcagccgctggatacccgcaccctgctccagccggcgctggccgcggatgtcgcattcatgcccggcgaacctttcttcgccgagccggagcagaacctcgggcgcctgcggctgaacttcagccacgtcgccccggagcgcctgcacgaaggcctgcggcgcctggccaaggtcgtccgcgacgcccaggccgccgaagcggcctga

SEQ ID NO: 347231 - DNA, 603 bp, Pseudomonas aeruginosa; identical to SEQ ID NO: 319843

SEQ ID NO: 347232 - DNA, 1557 bp, Pseudomonas aeruginosa
atgacctattcgagcaagctctcctcgcattatctggaactcgcggaacagccgatttcaaaggatgtctttgcgggtgaggatgtgcgtttttccagcgaatacgaggcgctggaaaatgagctgggcaaggcgctctcgctccatgagaacggccagaccgactggttgaaaatcctggaaaacagcgaagcgctgcttcgtgcccaatccaaggacctgcgtgttgcagcctggttgacctgggccctctaccaacgggaatcctttcccggtttgctggccggactgggattgctggaacgtctgtgcagccggcattgggtcgagatccatccgctcaaggcgcgcactcgcgccgcggccattgcctggctggtgccccggctggagcaggcgctgaacgagaacgtaccgatcaaggagcaactccccctgttccggcgtctcgccgagcacctggaaaaactcgataccgcgctgaccgcgcaactgggcgacgacgcgcccttgttgctgccgatcagccgacgcctttcgggcatgctccagcgcgccgccgacaaccagcccgaacctggcgtggtcggcgccgtggtggcccaggtcaagcaggcggccagccagttgctggcgccgggtgcgcccatcgacaacgagcgcgacgcccacaaggccatgcgcgcccagcaggaggccgcacgccccctgtgcgcctggtggctgaagcagaaagccaccgatctgcgcgcgctgcgcctcaaccgaacgatgctttggctgcccatcgagtccatgcccgagcgcaatgccgaacaggtcaccgcgctaaggggagtgccggcggacaagctgaaaagctaccaggagcgtttcgcccagggcctgtacgccgatctcctggtggagctggaggcgagcctggcacgggcgccgttctggttcgacggccagcgcctggtctgggagtgcctgcaagggctcaacgccgagcaggcgatgcgggaagtcgaaatgcatttcgccttgctcctgcagcgtctgccggggctggtggagctgcgtttccacgacggcagcgcattcgccgatgcggccacccgcggctggatcagcgcccatgtcatgccccatctccagaacgacagtgcgccgcgcaaggtcgagaccgtggccctgcaggccgaatgggacgtcgccctggacgaggtccagccggtgttgcgcaaggacggcctgaaggcggcggtacaggtgttgaagcagggcatgaagcgcgcccacggcgggcgcgcccggttcttctggcaactgagcctcgcgcgactgtgcttcctggcgaagaagtacgagctggccaagacccagctggagagcctcgaccatcagttgcacgaatcgggattgcacgcctgggagcccgatctggcgctggatgtactgcacctgctgcatagctgctgcgagctgttgccgcagaaccacgccgtgcgagaacgcaaggaagacatttatcgcaggctgtgccacctcgatctcgaggtggtgctcgaatag

SEQ ID NO: 347233 - DNA, 507 bp, Pseudomonas aeruginosa
atggccaaagaaggctcggtagccccaaaggaacgcatcaacgtcaccttcaagcccgccactggcggtgcccaggaagaaatcgaactgccgttgaagctactggcgatcggcgattacacccagcgcgcggatgagcgcaaggtggaggaccgcaagccgatcggcatcgacaagatgaccttcgacgaggttctggccaagcaggagctggggctgacgctgagcgtacccaatcgtctccaggaggagggcggcagcgacgagctggcggtggggctgcagatcaactcgatgaaggacttcaacccggccagcatcgtcgagcaggtgcccgagctgaagaagctgatggagttgcgcgatgcgctggtggccctcaagggcccgctgggcaacgccccggcgttccgcaaggccatcgaaagcgtactcgccgacgacgagtcccgtagccgtgtgctgggcgagctggggctgagcgccgccccctcccaggacgcctga

SEQ ID NO: 347234 - DNA, 1476 bp, Pseudomonas aeruginosa
atgagcaccagtgccgcacagcaaggccggaaccagaacggcgaatacaacattctcgacagcatcatcgccgagacccgcctgagcccggacgacgaggcctacgacatcgccaagcgcggcgtctccgccttcatcgaggaattgctcaagccgcagaacgacggcgagccggtgaagaaggcgatggtcgaccggatgatcgccgagatcgacgccaagctcagcacgcagatggacgagatcctccatcatcccgatttccaggcgctggagtcggcctggcgcggcctgcaactgctggtcgaccgcaccaacttccgcgagaacatcaagatcgagattctcagcgtttccaagcaggacctgctggacgatttcgaggactcgcccgaggtgatgcagtccggcctgtacaagcacatctacaccgccgaatacggccagttcggtggccagccggtcggcgccatcatcgccaactactacatgtcgcccagttcgcccgacgtcaagctgatgcaatacgtctccagcgtggcctgcatggcccatgcgccattcgtggcggccgccggtccgaagttcttcggcctggaaagcttcaccggcctgccggacctgaaggacctgaaggatcatttcgaaggcccgcagttcgccaagtggcagagcttccgccagtccgaggattcccgctacgtggcgctgaccgtaccgcgcttcctgctgcgcacgccctacgatccggaagagaatccggtcaagtcgttcgcctacaaggagaccgtggccaacagccacgagcattacctgtggggcaacaccgcctatgccttcggcaccaagctgaccgacagcttcgccaagtatcgctggtgcccgaacatcatcgggccgcagagcggcggtgcggtagaggacctgccgttgcaccacttcgagagcatgggcgagatcgagaccaagatccccaccgaggtgctggtgtccgatcgccgcgagtacgaactggccgaggaaggcttcatttccctgaccatgcgcaagggcagcgacaacgccgcgttcttctccgccagctcggtgcagaagccgaagttcttcggcatcagcgccgaaggcaaggccgcggagctgaactacaagctcggcacccagttgccgtacatgatgatcgtcaaccgcctggcccattacctgaaggtcctgcaacgcgaacagctggggtcgtggaaggagcgtaccgacctcgagctggagctgaacaagtggatccgccagtacgtcgccgaccaggaaaaccccagcgccgaagtgcgcggccgtcgcccgctgcgcgctgcacagatcatcgtcagtgacgtcgagggcgagccgggctggtaccgcgtcagcctgaacgtgcgcccccacttcaagtacatgggggcggacttcaccctgtcgctggtcggcaagctggacaaagagtaa

SEQ ID NO: 347235 - DNA, 408 bp, Pseudomonas aeruginosa
atgaccggatacggcagcctgttcgagcgcctgaacggcgacgcggataagcgcgtcggctggagccgcgaggtttccgccatggcgtcggtggctgcccatctgggcaagatgctcagcacccgggcgggcagcgtgcagacgctgtccgactacgggttgcccgatctcaacgacatgcgcctgagcctgcacgactccctgagccaggcccgctcggccatcgaaggtttcatcgaggcttacgaaccgcgcttgagcgacgtgcgtgtcgtttccctgccacgcgacaacgaccagctccgcctggccttcagcatcgaagggttgctggaggtggaaggtttcaagtgccaggtgagtttttccgcatgcctggatggcagcggccaggtgaaggtcagctaa

SEQ ID NO: 347236 - DNA, 1788 bp, Pseudomonas aeruginosa
gtgtccttcaatcattactaccagagcgaactcaccgcgctgcgccagctggggcgccgtttcgccgagcgtagcccggccctggccccgtttctcgggcaggtcggacgcgatccggatgtcgagcgcctgctcgagggctttgccttcctgaccgggcggttgcggcagaagctggacgacgagttgccggaactcagccactcgatgatgcacctgctgtggccgaactatatgcgcccgctgccggctttcagcattctccagttcgaccccctgacccgcccgggcggggcgctgcgcgtggagcgcgatacgccggtcgagagccggccggtgggcgaggtcgcctgtcgcttccgtacctgctacgccaccgaagtcctgccgctggtgctggaggcgctcaactattcggtgaccggcgagggtgcgctgctcggcctgcgcctggcgatgaactgcgacgggcatctcggcgagctgggcctgagtcggctgcgcctgcacctggccggcgagcgctacatcagccagatgctctacctgtgcctgctgcgcaacctggagagcatccagctgattccgctggacgcccatgggcagccgctggatggcgtggccggcaagccgatgtcgttccgcctgacgggcgagcgggtgcagccggtggggttcgccgaagacgaggcgttgattccctatccgctgaataccttccgtggctatcgctacctgcaggaatacttcgcgttccaggacaagttcctgttcgtcgacgtggatggccttgacctgctcggcgctctgcccgaggaaaccctcaagcaggtccgcggcctcgagttgcgcttcgatatccgcaagagcggcatccagcgcctgcacccgacgctggagaacgtcaagctgtactgtacgccggtggccaacctgttccgccacgatgcgctgccgatccgcctcgacggcaagcaggacgagtacctgctgatgccggccgaatacagcctggaggactgcggggtgttctcggtagagggcgtcaccggctggcggccgggcgggctcggctaccaggcctatgtgccgttcgagtccttcgagcacgatcccagcttcgacgtcccggaagcacggccccactacagcgtccggcaacggacctcgttgctgcacgatggcctggacacctacctgagcttcggcatccgccatcccgagcagatcgagacgctgtcggtggaactgacctgcaccaaccagaacctgccccaacggctgcgcctgggcgatatctgcgtcgcctgcgaaggcacgccggagttcctcggtttccgcaatatcaccccggcgacgccgagctacgcgccgccgctgaaccgcgatttcctctggaaactgatcagcaacatgtcgctcaactacctgtcgctggccaacgtcgacgcgctcaaggtgatcctcgaaacctacgacctgccgcgctactacgaccagcatgcggcgaaggtcagcaagcgcctgctgggcgggctcaagtcggtccgccacgagcatgtcgaccgcctgcatcggggcctgccgctgcgcggcttgcgtaccgagctgacgatcgatccggaaggctacatcggcgagggcgacctgttcgtgttcgcttcggttctgaacgaatttttcgcgctttacgccagcatcaactcctaccacgagttgcgggtgaggagcacacagggagacgtgtaccaatggaaaccgcgcatgggtttgcagcccctgctgtaa

SEQ ID NO: 347237 - DNA, 1008 bp, Pseudomonas aeruginosa
atggaaaccgcgcatgggtttgcagcccctgctgtaagcgcgctggcccggggcattcgcgagtactcgctgttccaggcggtcctgctggtcatggatcgcctgcgccaggaacatcccggcctgggagacgaggcgctctacgatcagttggaattccaggccaatcctagcctcggcttcccgggcagcgatgtcgatcgggtggagttcttcgaagagcgtggcatgctgcgggcgcggctgcgtttcaacctgatcggcttgttcggtgccagttcgccgttgccggcgttctacagcgagcaggccctgggcgacagcgaggagggcaatcctacgcggaacttcctcgatctcttccatcaccgcctgcatcggctgctgttgccgatctggcgcaagtaccgttaccgggtgagcttccagagcggtgcgagcgatgcgttctccgctcagttgttcgccctcgtcggattgggcggggaagagatccgcaaggccagggaactgaactggaaacgcctgctgccctacctgggcctgctcagcctgcgggcgcactcggcggccttgatcgagtcggtgctgcgctactacttcaagcatgccgaactggtcaccgagcagtgtatcgaacggcgcgtcgcgatcctcgaagagcagcgcaaccggctcggcctgttcaacagccagcttggcgaagacgcggtgctgggcgaacgggtccgcgaccgcagcggcaagttccgcattcatatccgccagctcgactggcagcgcttccacgagttcctgccgatcggtcccggctaccagccgctttgcgcgctggttcgcttcaccctgcgcgacccgctcgactacgacatccggctggtcttgcgccacgaggaaatccgtgagttccgcatcggcgcgcagaacgcctgccgccttggctggaccagctggctgggccgggagcgcgcggatggcgtggtgacgctgggcagcaagattcattaa

SEQ ID NO: 347238 - DNA, 2628 bp, Pseudomonas aeruginosa
atgatcaacgtagacctgcaacaactgattcaggcgctggatgccgacacccggcgcgacctcgaaggctcggccgagcgctgcgtagcccgtggcggcagcaaggtactggtggaggacctgttgctgggcctgctggagcgtccccagggactgctggcgcgcgccctgcaggatgccgcggtggacgccggcgaactcaacgccgcgttgcaagcgcggggcgagcatagtgcctcgcgcaatccggtgttcgcgcccgagctggtgcagtggctgcaggatgcgctgttgctggccaacctcgaactgggccgtagccagatcgaccaggcggcattgatcctggccctgctacgcaacccgttgcgctatgccggcagccgctaccagccgctgctggcgcggctcgacatcgagcggttgaaggatttcgcgctctcgcagccgctggagggcgcgcccagcggcaagccgggcggcggcgagtccctgttgcagcgtttcacccacaaccttacccagcaggcgcgcgacggcaagctcgatccggtgctctgtcgcgacggggctattcgccagatggtcgacatcctggcccgtcggcggaaaaacaaccccatcgtggtcggcgaggccggcgtcggcaagaccgccatcgtcgaaggcctggcctcgcggatcgccgcaggggaagtgccgccggcgctgagggacgtcgagctgttgtccctcgacatgggcctgttgcaggccggtgccagcgtgaagggcgagttcgagcggcgcctgaaaggcgtcatcgacgaagtgaaggcagcgctcaggccgaccatcctgttcatcgacgaggcccatacgctgatcggcgcgggcggtcaggccggcggctcggatgccgccaacctgctcaagccggccctggcacgtggcgagttgcgcaccatcgcggcgacgacctgggccgaatacaagaagtatttcgagaaggacccggcgctggcccggcgcttccagcccgtgcagttgcatgagccgagcgttgccgaggcggtgacgatcctgcgtggcctggcccgggtttacgaggaaagccacggtatctacctgcgcgacgacgcggtggtggccgccgccgaactgtccgcccgctacctggcgggtcgccagttgccggacaaggccgtcgacgtcctcgacaccgcctgtgcccgggtgcgcatcagcctggcggcggcgccggagagtctcgagcgcctgcgcggcgagctggccgaaggcgagcgccagcgccaggccctgcgccgcgatgccgaggcaggcctgccgatcgaccacgatgccctgcaggcgctggaggagcgcctggcccaggtggaaagcgagcggcacgtacaggaggaccagtggagccgccagcgcgaactcgccgagcgcctgctcgccctgcgccagcaattggccagggcccgcgaggcgaaccgggaagagcagggcggcgaggcggacgcggagactttcccggccgacgagcatggcggtgtcgaagccctggaaaaggcccttcacgaaacccgccaggcgctcgccgatgcccaggcccaggggcggctggtcagcttcgaggtctgcccgcgcctggttgccgaggtgatcggcgcctggaccggcgtaccggtggaacaactggcgcgggaacacaacgccaaggtgatggggttcgctgacgacctgcgggcgcggatccgtggccaggaacaggcggtcagcgccctggaccgcgcgatgcgcgccaccgcggctgggctgaacaagcccgatgcgccggtcggcgtgttcctgctggtgggcccgagcggggtgggcaagaccgagaccgcgctggcgctggccgacctgctgtatggcggcgagcgtttcatcaccaccatcaacatgtccgagttccaggagaagcacaccgtctcgcgcctgatcggcgcgccgcccggctatgtcggctatggcgagggtggcatgctcaccgaggcggtacgccagaagccctattcggtgatattgctggacgaggtggagaaggccgatccggacgtgctcaacctgttctaccagatcttcgacaagggcgtggccaacgatggcgaagggcgcgagatcgatttccgcaataccttgatcctgatgacctccaacctcgccagcgagcacatcgccgcgctttgccaggacggcgcgcggccttccgccgaactcctggaggaaaccatccggccggcgctcagccggcatttcaagccggcgctgctggcgcgcatgcgcgtggtgccttactacccggtgggcggcccggtactgcgcgagctgatcgagatcaagctgcaacgcctcggcgagcgcctggcgcgccgtcaactggctttcgactacagccaggcgctggtgggccacctggccgagcgttgcacccagagcgacagcggcgcacggttgatcgaccacctgctggacacgcacctgctgccgctggtggccgaccgtttgctggaagcgatggcgcgcgacgagcgtctcgagcgggtccatgcgacgctgggcgagcacggccgcgtgctctgcgagttcgcctga

SEQ ID NO: 347239 - DNA, 1512 bp, Pseudomonas aeruginosa
atgttcagccgcgtaccgcaacccctggccttcgccgaagccctgctcgctcagttcggcgcgctgtcgcgggaaaccgacatcacggccctgctgggcggtttcgcacgcgcagtcggcgaactcagcggctgcgagctgagccagttgtatctgctcgaccagacccataccgcgctcaccctcaacgccgaatgccgggacggcctgttgcaggcgctggagccgtcgagcctgccggcggactacaccggcgagcagttgctgcagttcgccctgtgccagaaccgcgtggtcagtctcgtcgacctgccgtcgcggctgcacgagaccggcttcctgccggcagcggagcagccctggctgtccctgctctgcgttccgctggtgagcccggagaaaacggtcgagggcatggtggtctgcgctacccggcgcccactggacctgcagggattcgcccatccactgggccagctgggctcgttcgtgctggcccagctgcatctgctgcaacgcctctcgcaaccttccggcgagccgcagggaccgtccagcgcaccggtggtcagcggctacgggctgatcggcaggagcgcggcgatgcgtgagacctgccgcctgatcagcaaggtcctgcacaacccctataccgtgttgctgcagggcgagaccggcaccggcaaggaggtggtcgcacgggcgatccacgagtacggcccgcggcgtgcacaggcgttcgtggtgcagaactgcgcggcgtttccggaaaacctgctggaaagcgagctgttcggctaccgcaagggcgcctttaccggtgccgagcgcgatcgtcccgggttgttcgatgccgcggatggcggaaccctgctgctcgacgaaatcggcgacatgcccctctcgctccaggccaagctgttgcgcgtgttgcaggaaggcgagattcgcccgctcggcggcaacgacacgcacaaggtcgatgtacgcatcatcgccgctacccaccgtgacctcgccctgctggtacgcgatggcaagttccgcgaagacctctactaccggctggcgcagtttcccatcgagttgccgccgttgcgccagcgcgagggcgacgccctcgaactggcccggcatttcgccgagcgcgcctgcgtgttcctgcgccgcgcgccgctgggctggtccgcggaagcgctggaactgctcgacggctatggctttcccggtaacgttcgggagctgaagggactggtggaatgcgcggtactgctctgcgaaggcgaggtgctgctggccgaacacttttccctgcgcgcgcccccggaagcggaggcgccgctcaagctgcgcgagcatctggagcagatcgaacgggacctgctgctcgcctgcctgcgcaggaacgctggcaaccagaccctcgccgcgcgcgaattgggtctgccgcgacgaaccctgatctatcgcatgggacgcctgaacattcatttcggcgatccccggacctga

SEQ ID NO: 347240 - DNA, 141 bp, Pseudomonas aeruginosa; identical to SEQ ID NO: 319852

SEQ ID NO: 347241 - DNA, 1194 bp, Pseudomonas aeruginosa
atggaactggtattggaaatgctcagcgccaagcaattcgtaccgacggagctgtgcagcaagaccttcggcaggaacggcggcctcatcggccgcggcggtgagtgcgattgggcgattcccgatcgcaagcggcacctgtccaagcagcatgcgcgggtcagctatcgcaacggcgcgttctacctgaccgacaccagcagcaacggcatccgcgccggcaacggcagccgcctgccgcatggcgagccgcagcgcatcgagcaggacagcgtcttcctgctcggcgacttcgagatccgcgcgcggttgctgcgcgagcccgacgagctcgccatggacgtcgggcggccgcagccggcgggcagcatcattccggacgatgctttcctggccctcgatccgttgcaggcgctcgaccaggacggtgcagatgcctacgaactcgacgacctgagcgcgatcgcccagcccagtcatgaggccggggcgcgtgcggactacgcgcggatcgacatggaaagcctggtcgtaccggagctggtgcccgccccggcggctccgcaggaacccgtggaaagtccgcctccggaacgcgacgaagccttctggcagcgtttcggccaggcgctcggagtggacctcgaaggcctcgacggcgctgcgcgcgaagcgctggcgatcgacgccgccggtttgctgcggcagtgcatcggcggcttgcagcagagcctgcggacccgcagcgaactgaagaacgaactgcgcctgtcgctgagcacattgcgcgataccggcaagaatcccttgcgcttcagcgccgatgccggcgaggcgctgggtcatctgctacgggatggcaagcctggccagttgagtggcgaacaggccgtcgcacgcagtttccgcgacctccaggcgcaccaggtggcgctgctcggcgccagccgggcggcggtgcgcgcgaccctcgagcatttctcgccgcagcagctggccctgcgtttcgagcgcgacggtcgccggccgttgctggccacctcgggcagccgctggcgtgcctatggtcgctaccaccagtcgctatgccaggacgacgattggagcgagcgtctgttggcgcgtgatttcgcccaggcctacgaagagcaggttcgcctgatttccaccctctacaccgagcaccaaggatga

SEQ ID NO: 347242 - DNA, 507 bp, Pseudomonas aeruginosa
atgtctcgtcgcccgatcccgccagccagggcgctggccatgctcgccgtcctggcgctgctggccggctgttccacgctgtcgccgtattccagactgaccaagctcgacctcgccctgagcgccggcgagcgggtcaatcccgacctcaatggccggccgtcgccggtggtagtgcggctgttcgagctgaaacacccggtggcgttcgagaacgccgacttcttcagcctctacgaacgtcccaaggagaccctggaccccgacctggtgaccagcgaggagctggagctgcgtcccggcgagcgggtcgaactcaagctcagcgtggaggaggggagccgctacgtgggcgtgctcgccgcctaccgcgatctcggcgaggcaagctggcgctacgtggtgccggtcacggcgaaagagctgacccgggtagagctgaagctgggccagaagggcatcctgaatgccggcgaattgctcggcaaggcgggtgacgcgcgatga

SEQ ID NO: 347243 - DNA, 1332 bp, Pseudomonas aeruginosa
atgaacgtgcacaagatcgtctggcaggaaggcatgctgctgcgcccgcagcacctgcaacacaacgaccgctactacgacaaccagatgaaggcccggacccagttgctgggcagctacaactggggcttcctcgccctggagctggaccgccagttcctcaacatgggcaagctggtgatcagccaggcctccggcgtattgcccgacggcagcctgttcgaactcggcggcaacaccgagccgctcgccctcgacgtgccgcccaatacctcgaacgtgccgatctacctggccctgccgctggtcaccggcaaccacatcgaggcgcgccggccggagcaggccgaggtcctggcgcgctataccgcctacgacctggaggtggcggactccaacgccggcgaggattccatggtgcaggtcagctgcgcgcggccggattttcgcctgctgctcggcgagcagcagagcgaccaggcctacgtcaaactgaaggtggcggtggtgctggataccacgccggacggggtgatcagcctcgaccccgacttcgtgccgagctacctccacgcccacgcatccgcctacctgctgtcctgcctgaaggaggtgatcagcatgctcggccatcgcggcgacaccatcgccgagcgtatccggtccaatggcaaggtcggcggcgcggaggtcggcgatttcatgatgctgcaactgatcaatcgcaccgagttgctgctgcgccactacctgggattggagcaggtgcatccggagcagttgtaccgggtgctgctgaccatgctcggcgacctcgccaccttcggcagcgagagcaagcgtccgcgcctggacagccgttaccagcacagcgaccagggcgccagcttccgcaggctgatggaggcgatccgccaggtcctgtcgatggtgctcgagcagcatgccatcgaactgcctctccaggcccgccagtacggcatcctggtctcgcccctgcacgaccacaagctgctcggcagcgcctcgttcgtgctcgccgccagtgccaattgcgagtcggaggaactgcgccagcggctgcccgcgcatctcaaggtgggtgcggtcgagcacattcgccaactggtcaacctgcacctgccggggatccgggtcaagccgctgccggtggcgccgcggcagatcccgttccactccaacaagacctatttcattctcgaacccaacgccgaggacatggcccagctggagcgctccggcggtttcgcgttccacgtatccggcgagttctccgagcttgaactgaaattctgggccatcaggaactga

SEQ ID NO: 347244 - DNA, 870 bp, Pseudomonas aeruginosa
atgatcaaggaaagggaataccacgaggacgagaagaccgtcctcctcgatcaccagggacaggtaccggcccaggggccgctgaccgatttcgccgaaccgccgcgcttcgagcagctcgaggaacggatgatctacgcggcgcgcctgcgtccgggcgaggccttcaacgtcagcctgaacccgctggtggcggcggcttccgaactgctttcggaagtggtccggctcaagcacagcaccgtgctggagaacctcgcggcgctcaaggagcggttgacctccgccatgaagctcttcgaattccgcgccgtgcaggatggcgtggaaaacagccaggtcatggcggcgcgctacgtgctgtgcacggtggtcgacgaggcggtggtgaccaccccgtggggcaacgaaagcgaatggtcgaagatcagcctgctgagcagcttccataacgagaccttcggcggcgagaagttcttccagttgctcgaccggctgtcgaagaacccggtcaagcacctgccgatgctggagctgatgtacctctgccttgccctcggcttcgagggcaagtaccgggtgatggctcgcggcgtgctcgacctggacggtatttccgatgcgctctaccggcagatccgccagttgcgcggcgacgtgccgcgcgaactgtcgccgcactggcaggggctcagcgaccagcgtcgcggcctggtgcggatcgtgccctggtggatggtggcgctgttcaccctggtctgcctggtggtgatgtattcgggattcgcctgggttctcggcgaacaacgcgacacggtgctgcagccttaccagtcgctcgatgcggcggcaggacagcccggttcgtaa

SEQ ID NO: 347245 - DNA, 3528 bp, Pseudomonas aeruginosa
atgaaaaacttcttcaagaaagtcggcgccttcctgcgcaagacgtgggtctggacgctgttgctggtactcctggcggcattgctggtgtggttcgtcgggccgctgctggcggtcgccgactacaagttctgggaaagcccgacctcgcggttgctgagcatcagcctgatgttcctggtctgggggctggcgatggtcttcgtcagctggcgcgccggagtgcggcgcaaggccgtcgaggacagcgacgagggccaggagcgcctgcgccgcgacggtctgatcgaagacgaacagaaggaattgcgcagccgcttcaaggacgccttgcgcaccctgaagacctccagcctgtaccgcggccgcagcgagcgctggcgcaacgagctgccctggtacctgctgatcggcccgcagggaagcggcaagaccagcctgctggacttttccggactggaattcccgatcaaccggatcgaccgcaagctgacccgcgacaccgccggcacgtgctactgcgactggtacttcgccgaccacggcgtcctgatcgacaccgccgggcgctacctgacccaagccgacggcgaggtcgacgggggcgcctgggcgaccctgctcggcctgttgcgcaagcgccgccgcgcacggccgctgaatggcgtgatggtgtcgattccggtggaaacgttgctcagcgacgacgagatggcgctggatacgctggctcgccaggtgcgcgcgcgcctgcaggaaatccagcagaccctgcacctcgatctgccggtctacctggtgctgagcaaggccgaccagttgctcggcttcgacgagttcttcgaccagttgagccgcgaggagagcgaccaggttctgggcaccagcttcggcaaggagcagaacggcaccgatgtgacggttctgcgccaggcgttcgaggaccttctgcgacgtctgaacagccaggtgatcatgcgcatccaccaggagcgcgataccctgcgtcgcggtcgcatcctcgacttcccgcaccagcttggccagatcggcgagcggttgtgcctgttcgtcgaactcgccttcactggcaatcgctaccagcgcgccagccgcctgcgcggcttctacctgaccagcgcgccgcacctggcccagcagctggatgaagacaccgccggcatcggcgccaacctggggatcgccagcggcctgttgccgaccctgcgcaacgggcgctcgcgcttcatccatcacctgctgagccaggtgatcttccccgaggccaacctggcaggtctcgatcgccgcgaacgcacgcgcatccactggggccagcgcgccctgtacgtcggttcgctggcgctccttctgctattcggcctgctctgggctggcggtttctcggccaaccacgagcgcctggagcggctacgcgagctggcgcagcaatggacccagcagcgccaggcgcttggcgagcgcgatgacgccatggcggcgctgaagacgctggatagcagctatgcggcgaccaccgtgtttccgcccaaaggggaagtctcgctgcacgagcgcgccgggctgtaccagggcaacgaggtcaacccgccgctggccgcggcctatcgccgcgagctggagacgcaactgctgccgcgcgtggcgcggatgctcgaagcgcagatccgcggcaacatgcagaatcgcgaacgcctgctcaacagcctgcgggcctacctgatgctgaatctgcgcgagcgccgcgagaacggatggctcaaggactgggtggctaccgactggtcgcagcgctatgccggcaacggcaccgtgcagaatggcctgaacacgcatttcgcccgtctgctcgagcaaccgttcagctatccgctgaacgagaccctggtggcccaggcacgccaggtgctgcgcagcgagtccctggccaacgtggtctaccgggtgctgcgcgaacaggcgcgaagcctgcccgagtatcgcttcggccagcacctggggccgcaggccggtctgttcgtcggcaccgactacgtgatcccgggcttctacacccagcagggctaccagcagtacttcgtggtccagggcgccagcctggtcaacgacatccttcgcgacaactgggtcctgggcgagggcagcgggatcagcgacatggacctgcggcgcctgatggtcgaactcgagcagttgtatttccgcgactacgcgaacttctggagcgaggcggtcggacgcctgggcctgctgccgttcaacgatgccggcgagggcgccgaccaggtttccgggctgctcgccgccaactcgccgatcctccagttgttgctggaggtccgtgagaacacccgtttcccggtcctggcggagagcgccgaggcgctggcagaggccagcgacaaggccgcggaaaagggcggcaagctgggcaaggcggccgccgcggcggccggcaaggccagggacgcgttggcgaagaacctgccggataccgcgaagaagtccctgcaacgccgcttcgagcccctgcatcgcctgctcgacgataacaacggcccggcggccgacctcaccccgctgttgcaggcgctcaacgagttgcagttgcaactcgccggactggcgcgcgccagccagccggagcaggcggctttcgacatggcgaagagccgcatgggcggccagcgcgatgccctgagcaacctgcgcaacgcctccgcgcgactgccgcgaccgctcggcggatggttcagcgtgctggccgaagacgcctggcggctggtcctcggcgatgcctacctgtacctcaaccagcgctaccagagcgagctgtacggtttctacagcaaggcgatcaacaagcgctacccgttcaacgcgcacagcgccagcgatgtcgcggtcagcgatttccgcgagttcttcaaggcgcagggcgtcgccgaacgcttcttcgaaacctacatgcggcccttcgtcagcggcgacccgggcagttaccgcctgcgcagcgtggacggttacagcctgccgatgtccaaggtctatctcgaccagatgggcacggcccaggtgatccgccagagcttcttcgccgagaacccggccgagccacaggtgcgcttccgcctggagccctataccctcgatcctggcgtcagccgcgccgagttccgtttcgacggtcagtccatggagtaccgccacggcccgatcgtgccgatgtcgttcaagtggcccagcgacgccgacggcggccgcaccagcctggtgctggagaagatggccggacgaccggtgggaatcgaacgcaataccgggccctggtcgctgttcaggctgttcgacctgatgcagaccgagtacctcagcgggcgtgacgtgatggtgctcaaggccgacctgggcggcctgcgcgccaactacctgctgctcgcccagcgcacgccgaatccgttcgatctcgcggtcctgcgcagcttccgcatgccggtgcagctctga

SEQ ID NO: 347246 - DNA, 729 bp, Pseudomonas aeruginosa
atgcaacgcaccgagccctggcgcagcgcggcacgcacagatcgcggcaaggtccgcgcgcgcaacgaggatgccttcctggactgcccggatcgcgggctctgggcggtcgccgatggcatgggcgggcaccaggccggcgacctggccagccggatgatcgtcaccagcctggcggaactgccggcccgggcgggattcgacgagcgcctgaacgcgatgcgccagtgcctgcactggctcaaccggcgcctgggcgaggaactcaccctcagcgccgaacgcggcgacaggatcatcggcagtacggtggtggcgctggtcgtggagggttcgcgggcggcctgcgtgtgggtcggcgacagccgctgctacctgtggcgcggccagcggctgtaccagctgtcccgcgaccactcgctgttgcagcgactggtcgacgaacggcggatggatatcgagcaggcccgcgcctatccctcggcgcgcgcgctgacccgtgccgtcggcgctagcgaacaactggtgctggacgtgttggaactggaggtgcatcccggtgatgtcttcctgctctgcagcgacgggctctacgaagagctgagcgccgatgcgctgggtcgcgcgttgagcctggcatcgccgcaggtggcggtggagcggctgttcgacggtgccctgagcggcgccgcacgggacaacctgacggccgtggtgatccgccaatga

SEQ ID NO: 347247 - DNA, 990 bp, Pseudomonas aeruginosa
atgaacgaaccgctgtcgtcgctggagctgctgccggaggaggagggcggcgcgaacctgacctatttcgccttcgccgccccgaccgcctcggcgccggacctgccggcggtgttgcccggtccgctgccggacgttctttccggacgctaccgtctggagcggatgctcggcgccggcggcatgggtacggtctaccgtgcccgagacctgctccatgagcagttcggcgacccggcgccgctggtagcgctgaagctgctcaacgagtcggtcgccgagtcacccgacgccagcgccttgctctatagcgagttcgccctgacccggcgcttgcgccatccgaacgtcgtgcgtctgttcaccttcgacgtcgacaccgcatgccagcgcgcctacatcgtcatggaactcatgcctggcctgccgctcgaccgcctgctctgcgagcgtcccgaaggcctgccctggtccgagctgagcgcgatcgcccggccgttgctggatgttctggcctacgtccacgaacaaggagtactgcatggcgacctgaaaccgagcaacgtgatgctcggcgaagagggcgtgcggctcttcgacttcggcctcggccaggcgcaggcaggcatcctggatggcctgccgcagctcagccggggccgcatcgacgcctggactccgggctacgccgctcccgaactgctcgagggcgcgccattgtcgccggcggccgacctgtatgcgctggcctgcgtcctctacgaactggccgacggtcgccatccgttccgccgcctgccctcgaaccaggcccgggagcaggggctggagcgccagctgcgcgcgcccggacacctgcctcggcgctgctggccggcgctgcgtaccgccctgagcctcgaccccgaacggcgctgcatcggcgtccgcgaattacaggaagcgctgggcgcgcggcgttcctggctggccggcgttcttgcccgttga

SEQ ID NO: 347248 - DNA, 381 bp, Pseudomonas aeruginosa
atgaacctgatcgcgcacgtggaaataccggtgtccgacctggagagggcgatgcgtttctacgcctcggtgttcggagtggcgttcggcgaggtagccaccctgcacggaagcagaatggcgcatttccccttcgaggaaggccgtgacggtgccagcggcgcactcgccgagggcgacgtctacgtgcctacgctacatggggcgatcatctacctgaatgtcgcggacctggatgccgtcattgcccgggccctcggcgaaggcagcgaaatcctcttcccgaagacgccgcttggcgacggcgtgttcatcgccgagatcagggacagcgaaggcaatcgtatcgccctgcagagcgcttgcggagagcggccgtag

SEQ ID NO: 347249 - DNA, 462 bp, Pseudomonas aeruginosa
atggcgcatctggtctggcaggatgacctgaataccggtattcaggtcatcgacaatcaacacaaacgcatcgtcgagatgatcaatcacctgcacgacgcccagcaaggcaaggaacacgcggcgatcgccgaggtgatcgaggagctggtggactacacgctgtcgcacttcgccttcgaggaaaccctgatggaggatgccggctaccagttttcccgggcgcacaagaagatccacgagctgttcatccgccgggtctccgaataccgggtgcgcttccaggccggcgaggatgtcggcgatgaactcaagggcttgctctcgcgctggctgttcaaccacatccgcaacgacgacgccggatatgtggatgcggtacgccacagcatgtccgaactggtcaaggacaagagcgagggcggttggttgtcgcgctcgatgaagcgcttcttcggctga

SEQ ID NO: 347250 - DNA, 546 bp, Pseudomonas aeruginosa; identical to SEQ ID NO: 319862

SEQ ID NO: 347251 - DNA, 558 bp, Pseudomonas aeruginosa
atgcaagacgacgacttttccctgttcaagagcgagatgcgcggcgtcaagcgcatctcggtcgatcgagccgataccggcaaacctcgcaacgaccaccagcaactcaagcaacgccagctcaatgccagcgtgcgcaacgacgaaatccgcgtcgatggcctgtccgaccagttcgtcatcgacgtcggccccgaggacgagctgtcctgggcccgcgacggcgtccaggaaagccagttgcgcaagctcaagcagggcctggtgcccttcgacggtagcctcgacctgcacggcatgagcgtggagaaggcccggcagacgctatgggacttccttgccgaggccacccgcctggaaatccgctgcgtgcgcgtgacccatggcaaggccgcgcgcaaggacggacgcagcccgctggtgaaaagccacgtcaatacctggttgcgccagcacccgcaggtgctcggtttcacctcctgcctgccacgccacggcggcaccggctcggtctacgtgatgctgcgcaggaccatgctcgaaggccgcgacgagtag

SEQ ID NO: 347252 - DNA, 321 bp, Pseudomonas aeruginosa
atgaagttgtccgatagtttcgatgcgcgccggctgcgcccgcgccggccgagagtctggcgctggcgcctggcggcggcgttcgcggccctggtggcgagcctgggcgtgctgctgtcgctggccggcacctcggccttgatcggccgccagccggctgtcggcatgctgcatatcgaacccgccgctggcggcgtcttgctggcccttggcctgctgtcgctctgcctcggcgtgttcttctggcgtttcagccgccgccgcagccgccgcaacagcgacctgagcctgtcgccgaacctgatgaaaaagcgcgactga

SEQ ID NO: 347253 - DNA, 786 bp, Pseudomonas aeruginosa
atgcggcgaggcgcgcaggacgccatcgtcccagccgtagagcacgcccagcgccgacacctccatggcccaccagccccaggcgtaggggccggtcaggcggcgggtcttcttctgcgccttgggggaaagctggaagaactcccggtactggctttgcaggtaaggcgccagcgcctgggcgtcgctgccgtccgcctcttcgaagaacgcccgcaactgcccgaacggccgtggatggaaggtttcctcgctggcggaagtcaggccgagggcggccgcgccgagatagtcgagcaggcggtcggtatcgaactgcaggacctcctcgaccagcgccgggatgagctcctgggcatcgagcagcacgcccatggcgagcagttgcagcgcgaacggatactggcctgtgcgcggcgccagggccggcgccgtctcgaagtcgacctcgccctgctcgcgcaggctgtcgcgggcggcgccgagcagccggctgtagtccagccacagcgcggcggtctccaggtagatggagcgcagttcggcgccggccaggccccggtcgatggccttgagcagcagcgtactggcgttttccgcggcctggccccaggcccaggcgttttccagggctgcgtgcccttgcgcggcgaacggctggcgatagccgtggctccgggaaaacctgtcgagcgcggcgatcagttcgcgccagtcggctttccagtcggcgaggtcgatgttccttcgcggcgcccggtcggtgcgggccaggttgcgccatag

SEQ ID NO: 347254 - DNA, 939 bp, Pseudomonas aeruginosa
atgcacgatcctcgaccattctttctctctgagtttgagttggcagactctagggtcgagttctctaagaagcccatagttctgctttgtggtggtccaataccacataaagcgcatccagatgacgacgatccgccaatatcttcctttcgtcatgcaatacataaaagcttccctccctacgaagtcttctgtcccgaagaaattcaagcctggaatatcgatgggatttttaagaatcttatggattttgagtctgatctggcaagcatttgtagtttggtagttattattctagaaagccctggtgcgttggcggagttaggggcgttttctcagcttcctgatttgagtaagaaattaattgtaataaactcgagtgattaccgggggagtaattcttttattaatcttgggattctaagatttattgctgatgatcatcctgcgggtgttaaaacttatccgtggagtgttggtgatccgtcgagtatatcggaagatgtgcttggggatgttgtggaagatattcaagaagagttgtccggtcttcctaagtcgcaagtttttaaggttaatagttctgctcatgttgtcgtgcttatctgcgagcttgttcgagtatttgtagctctaaaggaaggggagttattagacgggttagccactcttggtatctctctaactaaagaatatctaaagagaaagctcttcctcttagaaaaatttgacttgatttcacgccaggagtacggggggagtgttttttatctggctaagcgagatgattatcacaagttgaggttttcgctgaaatcaaaagatgtttttgatcctcttagagcacgtatggattgtattgagtattaccgagtagaaaccaaggagcgtactagaaatcgggtcataagtagcactgttccgggggcaaagaaatga

SEQ ID NO: 347255 - DNA, 966 bp, Pseudomonas aeruginosa
atgagcaagtttgagcttaggttgcgtctttgtcgggagctcttgttgacagataaagaagtggcgaggcttatttctcgggcgccttatacgtataaggtatattccataccgaagaaaaatggcggtagacgtgtagttgctcaaccagcaagggagacaaaaattctccagaatttcttgatagagaatgtttttaaagaacttccggttcatgaatgcgctactgcttataaggctggttctagtattgcaataaatgcatcggcacatgtagggaattcatatatatctaagtttgatttttctaactttttcccgtctataactatgcttgatctagttaggcatataaagagtttctttgatggcaggttggatgatttagagattattgatattgcaagagtgtgctgtattaaagatagggtaactgataggtttcatttgagtattggcgcgccgagttcaccgattttgtctaactctattatgtacttctttgacgttgcggtgcataagtggagttctgaaaggggggtttcttatacgcgatacgcggatgatatgactttttctactaacgaaaagtcaatgtctcgagaaatagagttgttcttagtgagacaggtcgaggcaatgaaatctcctcgtctttcgataaaccatgaaaagacaatacatctgtctaagagaaatcagaggaaggttacaggtttagtgcttagttcggaggggaaggtttctctcggaaggaataggaaaagggagatcagttcattaatacatcggtttgcgttaggtcagcttgatccgacagatgtttttaggctgcaaggtctattgggttttgcaaatgatgctgaacctgattttgttgttagaatgagaaagaagtatggggatttggtcattgcggctctttttgagaagagaaaagcaccctcggttatttcggacggttga

SEQ ID NO: 347256 - DNA, 147 bp, Pseudomonas aeruginosa
atgcgtctacctgaactgatcttcttgggcgccctgctgctctggcctttggttccgctggtgtacctgctcagcatcgcctggcagaccgacttcaagctggtagctagatccaaacagagagccatagaaggggctcgctcatga

SEQ ID NO: 347257 - DNA, 444 bp, Pseudomonas aeruginosa
gtgcgcgactacttcctcgatatggaggaactcggaaacaagctcctgaggtacacgccgatccgtggctccatgatcaccaccatcgacaaccaagtggcccatcaggcattcgtggttgctggtaacaaggtcaaggctggtgagctaccgaagagcctggtcaagcaggaagccttcaatacccagaagaccctcatgtcgctggtatgcagggtgatgactgatctctctgcaggtgaatggagggccaaggtaggtaaaggcatccgtgatgtactctgcccagaagacctaaaccagtacgcccgagcctacgactccgccctgaccatgttggctggcggcctgacgctgtcgcagatcgaggcagtactgaacctgccttacggaaacagcatcgacccgagcgactacatcaagacccaagcggaggtagcctga

SEQ ID NO: 347258 - DNA, 936 bp, Pseudomonas aeruginosa
gtgggcttcctgctgctcgaacacttttccctgccggccttcacccaggcgctggacaccctggtgaccgccaacctgatccgcagcgagtccttcgcggtgagcaacttcagcctgagcggcgagccggtgaccagcgacctcgggttgctgatctgcccggacctggcgctcgcctcggcggcgcggcaaggactcgacctgctggtggtctgcggcggtttgcgcacgcccctgcgctcgtccgccgcgctgcgggaagcgttgcaggacgtggcggcgcgcggcgtcgccctggccgggctgtggaacggtgcctggttcctcggcgacgccggcctgctggatggctaccgctgctgcatccatcccgagcaccgcgccgccctcgccgagatcgcccgcaacagccaggtgaccagcgacagctacatggtcgaccgtgaccgcctgaccgcggccagccccaccggcgccttcaacctggcgctggagtggatcgcccggcgccacgggcgcgacctggtggaggcggtggtggatatcctcgccttcgaggagtcgcgctaccggcgggtgcgcccggccctgcacgagaagatgagcgagccgttgcgcgaagtgatcaacctgatggcggcgaatatcgaggaaccgctcagccaggagcagctcgcccactacgtggggcgctcgcggcggcagatcgagcgattgttccagcagcagctcggaaccacgccggtgcgctactacctggagttgcggatcaccgagtgccggcgcctgctgcaacattccgacctgaccatgctggaggtcctggtcgcctgcggcttcgtctcgcccagccacttcagcaagtgctacaccgccttctacggctacccgccgtcgaaagaagtgcgctacggcaacgtccgctcgacgaaatga

SEQ ID NO: 347259 - DNA, 1272 bp, Pseudomonas aeruginosa
ttggcactgatagcacaaccgttccggcatcctgactcgggaatctattaccttcgacgcagggtgccggacgaccttcggcccatcatcggcaagaccgaaatccgccgttcgctgaacactcgaaatcaccaacaggcgaaagccgctttcgctctcgcctatgctgaatctgaacggactttcagcgaggcccggagtggcctttacaacgcgtcagaacaaggcgagccggtcaccctaccgcccccttccccggaagctcccataacgctttctgaggccctgcaacgctatgtcgatgccctttccctgtctggcaagacagaccacgttctgcgacgtcataaagtcgattacagccgggctgtgaatcgatttatcaagtatctgggcgattgcgcactgacagcgatcctacctgtcgatatccataggtttgctggcgccctcatcaaccccatcgatcccagggagcgtcctcttgcaacgtcatccgcccgccttctgctcgcgcggttgtcctctgtacttgccttttcggtagacgcgggccttctcaagtcgaacccagtggtcgcttctcgaattcacaagcgacttgggtcaggaaaaccgaaacgcaacctcggacacgacaaggggtattcatggaaggaactggtcaccttgttccgccagcccgcttaccagcaacaacggaatgcagcgggtcggccaggaaacgccgtgttctgggtacccttgatcgcggcttacactggggcgcgacgtgaagaaatcgcccagctctacattgcagacgttcttcaaaacgaaatcggccaatggttcattcgcatcatcgatgaccgccccgacaaatctttgaaaaccgacagcagccgaagggacgtaccgctccatgatgacctgattgaactcggtatcttggacctgatacgagggcgaactgccgattccaaggtattcccgcaacttgtaaaagtgtccgatgggtatgccggcatcgtttcgaaggcgtggcgcccgttaacacaacagtgcggggtgtaccgggctggccgccatccccttcacgccttccgacataccttcaagaccctcgccagggaacacgggattcccaaagaggtcagcgattggatcacgggccacacatccggcagcgtcggtgatagctacggcgtcaatccgctttcccgaatggccgcagaaatgaagaaattgcccagcattgccagggctgctggacttctccctgctgcataa

SEQ ID NO: 347260 - DNA, 900 bp, Pseudomonas aeruginosa
atgacatccggcgagaaggtagtcatcgctcttccgaccattaaccttagcgacgacatcctgaataacatgaggaaaattggaatcaatccaaaagttgttaacagcaaggactcccctggaaaagccattcacacgatcaatggcactctccggagcgggagccatggtgtagtcgtcatcacccacgaaggattgcgacttagcgatccgaacctgatgcgtggacacatacttgtaattgacgaagtgcctgacccattcgaacttcagcacatcaccaacatgagcgagattgaagcaactcaatttacctcggtacttgaaaagtccaaaagcaggctttccatcaagccgaaattcaagaccatgatcaatgagcgcgttaaaacctacaagatggcagaaaaaaaccaatcggttgcatcgacactttccgagaccgagttcaaggtattcaatgcaatactaaaccacggaatagcccatacagatgacaccgagacagagcaaaacaaaatccagaacctttacacaatcgaattcaaagacatctttaaacatatcaaaaaatccaaggaaactcatatcctggccgcaaacatcgaaggcgggatatttgatctgtttgtgaaggcccacggcttccaattcaaagcttccagcttgacaccaaagaactacgaatataactgcgacatcactatttacccgatgctgaatgaaccctggtcgaaaggaaaggttctacgcgatgaatccggcaaattaaatatcacccataatggaaatcagaatcaattgatcgacaaaatattttccaccgccatcaataacaccccaacgatcgttttatcgccatacaaaacacgtggggtaaattttcggaaggatatctaa

SEQ ID NO: 347261 - DNA, 510 bp, Pseudomonas aeruginosa
atgaccctgagcccgaaattgcattgctgggtgtgtggggctgttttgaccacgatggcaaccggggtgtttgccatcggtccaggcgaaatgggggacctgaagcagcggtacgaagaagcgggaagcgcgaatacctcggatgaagtcatagatgtcaggaacattcctggcgaatggcaagcgaaccaggcccgtgcgaaggtgaagtacgaccaaccccattactacatcggcaagctgaaacgggttgcactccgtaacgattcggacgctgatctggtgcttgacgcgggtaatggacgggagatcactgcgatactatttccctatcagttcggtccgtgggaaaagcgcaaggacggtaagctgataccgaaaggtggcgttaccaccatggagtttgcaacctatttcgatgctgggcaaaggttcaacttgcattgcaaacaggctttgccggtaatgcttatggattgtttggctatgccagtcgaaatggcacggtag

SEQ ID NO: 347262 - DNA, 1323 bp, Pseudomonas aeruginosa
atgagtgagttgatcgttaaggaacaaccttcattgccggcgcttccggaaactgttctgcctgcaattgaacaactggtgcaggcactcggtattccacgaaatgctttggcaagctcagaagaaatagagtatgcatggcgtgatcttccgcgagagcttcgtgacattccgccgcatctgcggggtgaactcatagcgcggatgtgcgtggccgttagtactggactgtttgacggggctatgaactatgtgtggaatgcagcaattctacacttgcgcgaaaagatcagggtgtttgggcttcccgtggtcgcgcaaatacggcaggcagacttcgaagaaaaacatcttcttgagttgcaagatagcaggttgcttgagctctgcttgaagctgaacatcgttgatgaagatggatacttcttcctagatcagtgtcgtgatgttcgaaataatttttctgcagcgcatccgacacttggcaaggttaacgatagggagttcacaacatttcttaatcgatgtgttcgctatgctctggcagattcggcatctcctaggggggttgatattggggcgtttatttcagccatcaaaggccctaggtttaacagccagcagtgtggtgtatgggttcagcgcctcatggaaactcatgatgcgcagcggcaaatgctgataattatggctcatgggatttattgtgatcccaatacaccagagcaagcgcgtttgaactcaatagatatatgctctggattgctggcgagctttacaggttcgatcagatcagaactgattaatagtcacacggaatacgtggccaaaggttacgaagataaacatgcagcgtcattgcaattcttcgaaaagcttggtcttctcaatctgttgaatgagtcagagcagcatcatatattttcacgtgctgtggatcggttgtggactgtccataatggaatgaataatttctacaacgagcctgcatttgctgagaggttactagagctttctttgcagggcgcaatacctgaaactgttcaggaagaatatgttcagacggttggttgttgtcgtgtgggaaatggttatggtgtttctaatgcagcagtgaaatattatgatcagatgatacagaacttttcgcctcgtgaaatatccgtgcttttacaatctgcgacaagtaataataatacacttgggcgtcgtgttctggcaggtgggtcatatcgcagcaatttcaagacgttgcttggacttattgatcccgcaagtgttccgaatgttgtgaataatgtttactatcagttgattcgatag

SEQ ID NO: 347263 - DNA, 630 bp, Pseudomonas aeruginosa
atgagtgcaaaagtaaatgttgcatttgttttgcggaagcatttttcatacacgttgaaagatgctgatggagtcaaggtcgactggtttgatgtgctgatttttatcgcattgccattggtcttgggcaccctttcatatttctccaagtcggctagcagtgataatgcaatatccataattattactgcaagttccatatttgctgggttgctgctcagccttttgatgttggtgtatgaccaaagcaaaaggactgaagagcgattgattgaattaaactctggtcacgcaaagcccaacgctgcagataatctggaagagttactgcaaggctctcaggttaaatcgcatccgctcgtttcgaagtatgaaaaacatctgcgggtccttgaacagttggtggtaaatatatcgtattcaattgtcgcatcactatttgtaatatttgtgtgtgtcgtaagtctgttgattactaaggatgcaattggatttagtgttcgcggagttgagttttctttaaatctttcttggttgttttttgctgtggcagttgcagtatctgcgaatctcgtggttacgctgcttatgattgtaaaaagggttattcgcctgatagatgataaatga

SEQ ID NO: 347264 - DNA, 903 bp, Pseudomonas aeruginosa
atgcattctttcatggcatacagcattaaagttcacgataaaatgctgccagggcctttaggggaacgctatcataaactggacaatatcaggtccagagatatcttggatttcattgaaagctttcttgaaactttgaagaaagaagttcataacgataccgagaccaagaaaactcttcatgtcgtgaagttggtgcgcgaggggcgtgatgtattcggctggatggaatatggcgaatatggcatccctggggtaatttacagcacatccgaaaaagcaaagaaatatgataaaaagcatgatgattcggatgtagttaatctgtattttcatttccgaattcctgttgattctcgcacaggaattgcaatgtttcatactgctggaaataaaggggttaagacatttgttgccacgaagtttaatgaatacttcaaaaattttgtgggtctttctgtgcagatgccccccttggctcatgaaagtactgtgaaacgttggttgaatcagtcgaaggttaaagaaattaggcttggaaagtataaggtgcagcggaatggcacggacattgccgatttgctgggtgttaatcgcgctgagctcactctgaagccacagcgaggtagaagttttggtagctttggagctttccagagtaaaaagactgaggatggagaagggttcgttgaaattctgagcgaactttctgtcgaagttaaggctgttctgcagtccgagggccgatcaaaagtcgtctctctgaaacaaagtgaacctgtttctgctatcgaaattactacagataatgtaacaattaatgatggtgcgcctattccccaaagtttggaaaactatgctaaggttttgatgggggagtttgaatcgaaggtggcgagatga

SEQ ID NO: 347265 - DNA, 255 bp, Pseudomonas aeruginosa
ttgaaaatcgcggctttcggccaacgcatgccccttgtgaaggccatcgactatccggcggacaaccacaagctcggctggaacgagatgctcgcctggctgcgcagcaagcgctgggcgtgcatgggtttcggcggggtgacctacctggcgctgctgatcccgctggtcaacctggtcatgatgcccgccgccgtcgccggcgccaccctgttctgggtccgcgaggaaggcgagaaggcgctggtgaaataa

SEQ ID NO: 347266 - DNA, 981 bp, Pseudomonas aeruginosa
atggacgctggcgtgttcgtcaaccgcaatgaggccgaagcgacctctttctccaacgcactggagctgtacgccagggaagtaaccagcaaaaaacgcggcagggcctccgagctttcacgaattcagaccatgcaacgccatcctctcgcgctgcgctcacttgctagcattcgcggctccgacatggccaattaccgcgatactcgcctcaatgacggtctggctcccgctactgtgcggcgggaattggccctgatttctcacgtctttaccatcgctcgcaaagagtggcggatggagtcgctgactaacccagtagagctcatccgccaaccaagcgtcgacgacgctcgcgaacgacgaatcctcagtgccgacgtatggagacgtgaagacgggaggctcacgcgcgagcatctggacgagctagaaatgatctaccgctactctcgctcgaccgaactgccaaaaattgttgccttcgccgtggagacagcaatgcgtcgcagtgagataaccggcctactgcgcgcaaatgtaaatctggaaaagcgggttgccctgttgcccatgaccaaaaacggctcctcccgtggcgttcccctctccagcaaagccgtagcaatactggaaagccttcctgtgcgtggcgacgggcgcttcttcagaagcagacctgacacgataaccaaagcctttgcagatgcggttgccaacgctcgcaaaatctacaatgaaagcttgactctaagcttgaaggaaaagagcctgcctctcgaaaaaatcgaacgtgatatagatgcagcaccttttttgctggacctacgattccacgatctacgccacgaagcgacctcacgcttggccgagatctttccactgcatgaattgaccaaaatcactgggcatcaggacacacgaatgctgatgcgatattaccatccgaaagcagaagacttggcaaagaagcttgcatag

SEQ ID NO: 347267 - DNA, 906 bp, Pseudomonas aeruginosa
atgtatgccgtcagcccactgagatacccaggtgcaaaatggaggcttgagaaattcatccactccattctactcagaaacaaattagaggattgccattacgccgaaccctttgcgggcggagccagcctcgcaatatccttactactaaggaactttgtcagtgacatacatctaaatgatctcgatagatcaattttttctttctggcgatgcgtattaatccatactgaagagctcatcgaaaaaattgaatgcacaccagtaaccattgactcatggctacaacaaaaagaaatacagaacagcaagaatattgcaacagaaatagagctaggcttctcgacgttcttcctaaaccgaaccaatagaagcggaatactaaccgccggagttattggcggaaaaaatcagaatggaaagtggaagattgacgcaagatataacaagaaaaaccttatcgaaagaataaaaaacatctcaagagaaagcagtcgaattcatctataccaaaaagatgccatagacttcattctaacagatggaaaccaactcccaagcaaaagctttatttatctagaccccccatactatgtaaaaggccaagacctctatttaaacgcttaccaacacagcgaccacctcgaactagcgagcgcagttctaaaagaattaaacaggccctggatggtctcatatgacaacgtaagtgaaatcagagccttattcgcagaagcgaaaattaccgaagagccttaccagctaccttatagcgcaagcctagaaagaaaaggaaaagaaattttctttctatcgcctaagcttatgaccgaaaaagagctcatccatacgagcactaggaacaaacgagtcctcgaccaagagcgaaaagcagccctaacatag

SEQ ID NO: 347268 - DNA, 678 bp, Pseudomonas aeruginosa
atgaatcgcttccaggccaaagaagaatttaattctgattgccgtttttgtggctacatgtcacaaagaaaaaacgaccccatcaataccccctggatgtcgagtaacaaatactctgcttttgtctcagttggggcacttgttgagggttggtctctaatagtacctaagaaacatgttataaacctctcctctgaattcaagaattccgaattctggggattcgccgcagaggctatatctgctgtccaagaaaactacggcagtgtctccatatttgagcatggtgcattcagagccgattcacggaccagttgcggtactgcccacgcccatctccatattgtcccgctatatttttcacttattgaggcagcaaaagaattcaatccagaaatggaatgggaagaatgtcgcgccgacgagatagcagagaaaagccgaggccaagaatatctctttgtatctgaagatcgtcaaagagactttcctattggacagatttgccgactcaacgaagaaacatctcaattcttcagaaaagtcatcgccaaaaaaattggcaaaccaaatgagtttgactacaaagtattcaaaatgactgaagtagccaactcaagcataaaaaaactgacagactactgctggaaaaaaacaaatagctctcgaacagcctaa

SEQ ID NO: 347269 - DNA, 615 bp, Pseudomonas aeruginosa
atgaccatagcagaaaatccagcagaagaatcagcagcagacgcaagcaatacaccttcctcgccatctgccgatcacataaatgacgatcacaggaagttaggcagttggcaaagtcgctggtgcaaagaagccagagatgaaatcagggtagacgcttggtacgtaggagcagtctttgtttcaacgctcatactcctagtactaacttggaggggtactacttttcaaattctatcgtacgactgcactacatgtagccaaaaaacattcaaccaatatgctttcttcttccttggaggcgtacttggcgggaccatgtttggcattaagtacctttacaaggttgtcgcaagaggctactggaatattgaccgccgcctttggagactattctccccatttctatctggcggatcagcacttgctattggaggacttttggactccggaatgcttggcctaagcatcaattcgtcctcaaacccattctatttctccctaggttttatatcaggatattttgcggatagcgcacttgccaaaatgcaagaaatcgcagataccgtttttggctcgactaatggccgcgctcaaaatccacccaaaaagtaa

SEQ ID NO: 347270 - DNA, 2598 bp, Pseudomonas aeruginosa
atgggcacaggaatggccacgaaaacaaaacagcccctacagcctcaaaaccgaattattctggttgaaaacacctctgtaatacagctacttccagcagagatcacagcgaaaagagtaggcttaaaggcttatggactgtcttccattccatccgattggacgctgccattctttgtcattagtgcaggaaatctaccctctcaagaggcaatattaaccgccctgtctcaggcaaaaataaagccctcatcaaaagtcatagtccgatccagtggcattgcagagtcaatagactcccgtggatctttagactcctttgagagtacctgccaagatatcatctctaccattgtaaaattaaaacaaaatattctagaaacacaaaaaatcattaacactgatgaagtccactggattattcagactctatcgacggtacaaataaaaggccacctttctaacgaaaggcgactaagcgaggctctgagagattggatctcagaaactgaagctactagtaatgcatcgccagaaacacacaagatacctattcgaaaatggcgcgacgcaagaactaccgagataactaaactagaatgtcgctacaaagccaaccacctaaatagccttgaaaaggtagctcgctgggcccacaacagaaagatacgggtccactttgagtgggtttgggacggcaggactatttatatagtccaagccgatgaatgcaacgacaaaagcaatggcgtagaccctacaaagctaacagccgccttatctgcagaaaccctcagcttttcgccaaccattttcagaattgcaaatagcacagattacgatatctacacaaagctctcaaatgcaaagctctatcgagaacttggatatactgcaatcaccttcttcgtcctagactgtgaacgagagctaaatctcatactcaccgagggtaaatgcagccctggtctcataagcgatctgcaagaattgacacaacgccccctagttatcagaactgatgggaagtcaattccagatgaacagcgacagatgctgccacgcagcaatgaacttagaacacctgagttggcagttgcttggcttacaggatctttcaaagaaaaaatcattgagctagggctagagcgtagcaaattatgccttgttgcccaccattttatacctgcatcagcatccgcctggagtcaagctcaccctgacaagagaagagtccgaatagagtcgttatgggggctgcctgaagggctttactggtatgcgcatgatgtatttgatgttgacacaaacttcacatcaaccaagggaataactagaaaacccgagaacttttctattagagaacgcttaagatacaaaggtcgatttgtcgcaccaaacgaagaaggtaaatgggtagtccacaataccgccgcaagtcatgattggaagagaagcatcactcgtcaagagtggattgaagaaattgcgtggacatcaagaagaattgcagaaagcttaaataagcctgtagtaatcatgtggtttgttgacattcccaagaccactcttaagcatgcagtcttaccttggtatcacgaagactggaagcatgaaggcccactccccaaagcggctccaaggaaaaagctctcactatccgaggagttcacccttcgcacaaaagcagattggctgaacttaaaaactctttgcgaagaggggcgggtcattgccagagttcttatcgagccctccgagcccgagctagtcagagatcagcagttcgcaaaggatctggctgcgctagcgcacaaatatgggtttgttattgagctatcgggtggacttctatcccatgcctactacatgctcacaagctcaggctgccaagttgagtgcgccgatctatatgcaacagaagaaggagagctcgagttccacaaacttgtcagggataaaatacctgacaacattcactcgcgcggagaaaatgtaaagctcctaaaactagagggagaggcgttaattacagcactaaagcgaaagatagtcgaggagtcccttgaggtattagacgccgaaaccagccaaaatataatcgaagaaatcgcagatttaagagagacagtaaacgcacttactaaagccctgagcatcaccgaaaaagatatcgaagatgcccgcaagtacaaaaaagagaaacgcggcgcatttgaaagtgccttaatgcttgaaaaaacctcactcgcgtcatcactaagcctcagtcaaaacaccgaggatgaccctttctctctcggtcatcctcacatagaaagaacaatatctaaagctgagcagctaccccattacctacacgatatccactctgacaaacggcacgatgccaaggggacttttgaacggcaatttaccctatccctacctgctcacggtgaaaatttctccccaccacgagtaaactttacacttgaatcatcatcaggcagcacgcacgaatacattttaaacctggagatggacaggcgtggctctgatatacgctgcaaaataaggataattaacgcacccactcaaatgactttggatctataa

SEQ ID NO: 347271 - DNA, 888 bp, Pseudomonas aeruginosa
atgggttttgacctaacgcacgcccgacatgcttctagcgtgtgtctggcgcctgggctctttcgaagtttgaagcgtggcgagcgaaagaggcagaaactggatgtcacctatcgtcatggggaatttgagtgccttcggtttgtaggtttcgagccgttaggtgccgatgacatgcgattgttgcaagtcctagttgcccttgccgggccaagtggtgtgattttaagcgcagacccgtcggcagaccttccaaagcaattgcgttctcttttggctcctcgattcgcggcagttaatcaagatggattggtggttcgaaccagcataaccaggctgctaaaggaggcaggcctaagcgacggtggagagaatgtgagagcggcgaaggccagtctgctccgtctatcgaacgtgacggttactgttaccaggggagcagtccaggcaagcttccatctgatgagtcacgcctttgatgaatcagatggccgtctcaatgcctgcctcaatccgagcctagccgatgccgttttaggtcggcgtcagcacacgtacattgatctcgctgaggtacgtgcgatctcatccgatccggcaaggctaattcaccaacgtctgtgcggttgggtcgaccaaggagctacgcggcgcgtcgagcttgggacgctttgctcctatgtgtggccagagacgacgactaatgcccatgccttgaagaaacgctgccaatcagtccgccaagcgttggctgaactgagggggctgggctggaggttcgatgagtacggagggcagaagtacgaggtcttccggcccgcaaggacgaagaaaggctccgtagtaacggtatctcacgtccgtagtaacggtatccaagctccgtag

SEQ ID NO: 347272 - DNA, 879 bp, Pseudomonas aeruginosa
atggcaattgacattctctcggcgttcgaaaaggaacctcctgagttggacttcatatggccgggatttctcgccggtacggttggagctcttattgccccaggtgcgacaggtaagagcttttgggcacttgaagctgccatggcagtggcatgcggttgtgcaggcggagatctagttgagcttggtgctgtggccgcagggccggtgctttacctagcgggcgaagatcctgtgcctgcattagttcgacgtgttcatgctatcggtaagtacctgagcccgcctgctcgctcatccattgcagcaaatctaacgcttgagccagtgatgggggctggttttgacatcatgaaccgagactgttttgagcgcttggcgtcgtgtgcgtctggatggcgtttagtcgtgctcgacacgctgagcaggattcatcagcttgatgagaacagtaatggtgatatagcccgcctgattggtcgtcttgagcaattggcagcctccacgggcgctgcagtactgtttctgcatcatgccagcaagggcagtgcacgtgatggtttgttggatcaacagcaggctgcgcgtggagcctcggcgctcatcgataacgcaaggtggtgcggttttatcgcgagaatgacagaagacgacgcttcgcgcttttcctcggcaggtaatggccacgccccagttggtaagcagagccgagagcgctacgtccgctttggcatctccaagcagaactatgacgcaatcgttgtggatcgttggtttgaacgccaggagggaggggtattgcgccccgctgcgtttcttgaggttcagaagcaggcggccaaagcgagagatttacggaggtgcgtcgatgggttttga

SEQ ID NO: 347273 - DNA, 1149 bp, Pseudomonas aeruginosa
atgcccgtttacctcgactatcatgcgcattccccgatagatcctcgcgtgcttgatgcgtttgtctcggcgtgccgtctttttgacgcaaaccctcattccgctcatctgcatggttctgccgcgtacaaggcagtggaggaggggcgcatcagcgtgggggacctgttgggggctaagccttcagaaattgttttcacgtctggtgctacagaagcaaacaatcttgcattgttgggtttagaggattttctgcgcaagcaaggtcgtagtagggtcgcaattagctcaattgagcatccatcaattttgcaagccgcagctgctttaggagaaagagggtttgttgttgatattttaccagttaatagggatgggttgatcgatttggaagttgcctctaaagttataactcatgagacaggagtggtatccgtttctgctgctaatcacgaaattggagtgatacagcctattgaaaggatttccactatcgctagagcatgtggggcaatatttcattcggatctcgctcaaatggcgggcaaacgtccagtatcgctagaggccttggatctagcaagcttctctggtcataagctttgcggacctgcaggaattggtgcgctatatgtgaagcgcttaataaagccaaagattaaaccgctcttaataggtgggggacaggagagtggggtgcgttccgggactgtacctgctgctttatgtattgcctttggagaggcttgtgctatcgctgcaaaggaaatgttttcagaatcctcaagggttactaagctccgcgataacctactggagcagctcttaaaattacctggatctcaagtgaatggttctctcgatgccaggcttccaggaaatatcaatatacgttttgatgacgtagatggagaggcacttgcctttagcctgcagagtcagatttcgatatcaactggctcagcatgtaatgcaagatctctcgagccttcggcagtgcttttggctatgggcttaactaaaccgcaagcagagagctcggtgcgtatcggaattgggcgctttacaactcaagaagagatagatgaggcagcccgcgcaatgcgcacagcagtaatagaattgcgcgccattcggagtagattatga

SEQ ID NO: 347274 - DNA, 1155 bp, Pseudomonas aeruginosa
atgagcatttcaacaacgcttcctggcacaggtttaatagcaagcgagagtggtttggctgctcgccttaaatatatcgtctctgatcttagagatgagtatacacagccccactcaactccatggatcatcggtttctctgggggaaaggacagtaccttacttgctcagctggtttttgaaatgttgcttggccttccgccaagactacgtaatagatctgttcatattgttgcgaatgatactcttgtagagtctcctgttattgttaatcatcttgaatctgttttggcgcgccttcgaagtgtgatagatcctttgcgcatacctgttactgtggcaaagactgttcctgacgttgagcaaacgttctgggtcaatctaattggtcgaggatatccgtcaccaagtcgaatgttcagatggtgtacggatcgcatgaaaattgtacccaccacggactatattcaacagcaggtagactcgtctggacaagcaatacttcttctaggtgttcggcgtttggagtcgtcgcagcgtgcccgtagtgtaggacggtacgaaaatggcgaaagattaaatccccataatagcctgaagaattgctttgtatataagccgatagttgaactaagtacagaggatgtttggcaagctcttttacagtcaagtccaccgtggggtggaacccatcgggaacttgtgacgatgtaccgaaatgcaggtgccggtgagtgtccacttgtcacggataagagtgaggctccgtcttgtggtacgtcatcttctcgttttgggtgctggacttgtaccgttgtagaaaaagataaaagcgcagagtcatttattgagtctggctatggtgatcttgagcctcttcttgaatttcgtgactggctgaaagctatccgggaggatggttctatgcgaatggcgacaagacgaaatggaaagctaacctttgtaggcgaaggtcgcttaattcctggtccattcacattagatgctcgcaaacaaatattagatcgcttgttgtcgatgcagcttgaggttggcatgactttagtaagtgaggaagaggttgcggtgattaagcggatttggtcagaagatctggccacgatttcaaagcagcagccatcttttgttggatag

SEQ ID NO: 347275 - DNA, 2211 bp, Pseudomonas aeruginosa
atgagtagtattttttcagagctcataaatgctcgctcggcttttagctcgcatcggaaccggcgggctctatttgctcgttttgatgagattttttcttcagctgcagtcgaaataatggctgttgaatatgatgtgaccaaggaggtgcttcctggtcaaaataattttgaatttcggaaaattagatttgagaattggaaagccttcgaagcagcagaattagtctttcccgcgactgaattaaataagccgattactttgattggtggaaataatggtcatggaaagaccagtatacttgaaggtattgtttcctgcttatatggtgtttccagttttctatatggtggtcgcgggcgtgtgggtgagctgagtgaggtggctcggcgctcggaatactatcgttttatagaaagagccatgcataggcctgctttcgatcgcggcgctaggatgtccgctgttgtcgttcaagttgctacgaacgatgagcttcttgaagttgagcgacgctggtactttaataatgaaaatgcgctatacgagggggatgaagaggttgtagtgcgagtcggtgaggatcgcgagatcttagcagtgccggatcaagaggaagctatagctttttatgagggcttcatcagctctaagctagcgccagcaagtatggttccatttctcctatttgatggtgagcgtattgcagatcttgcatctcgagacatgagtgaacaagtgcaatttggtatcgaaagtgctcttggagtatcgtcactgaggcgcttggtttcggatttagatgattatataaaagatcgtagtcgtgatcttcaaagtgatagtgttgaggctgcattgagagaaagcatctctaatatccaggtgcgacgtgcagcaatagctgatcaagtaaggatgctagatgcggaagttgaacctctgtacatgcgtcgtgatgagatagttcataagcttgggtcgcttacaggagggagctatcaggagcatcataaaatattagaggctcgtcacgctgcagaactccagcttactgctgttcgtgcagagctagctactgtaagttctaagttgcttccattcctattggttggttccgggttaatggagtctacggtttcctctctgaaacgagcgctgtctttgggggagttgaccgagcagccgttaactgaaggtcgtcttattcgactgctggatgcttttaaaaaaatatcgccgacgcttgatcctgcattagagactgaagttatctctcgtgtgcgagaggcttgggctctgatgaatgaaaggttgccaggggtagactcagctccgcacgcttatctgcaagagcgccacgtgggcggggtgataaacgcactactgctgacttctcaagatgctagaaaaattttacccgatattttagagcgtgtggctggactgaaaaaagaaataagtgattatgaacggcatcttgataggggagagcaggaagcaattcctagggaagtattggccgtagaattaaaagagttaaatgaacgaattgagttgttggcagaggctcgtcgtgctcaggatcaagagttatggaagcttgatgctgagctggagccaaggaatgttgagctctctagacgcctggcgcagcgtcggaatacatcagcaggattgcctgttgtagatgccgcaagtattgttcgaaaagctattgttgtggggatagagagctctattccgcttcactatcaccggctggcagaacaagtgacaaatatatatcagcggctcgcgcataaaagtgtcgttaagtgtattgaaataagcgccgagggtcgagtgtctttgtatgatgctgctggccggaatcttcgagatacagactcatctgccggggagagtcaaatttttgcgatgtctttaattgcggcaatttctggtttattaggcgaacagctgcctatggtggttgatacgccgcttggacggttggatcctgagcaccgtgagcgtatcttggagttcttccagtctcgccaagcgcagacaattatattgtctcagcctgaagaggtgggtgggcggtactacgagaaaattacaccgtcattggctgcggagtatcatctctcatacaatttagaccgcggtgggctgggatatacgcttcttaagcgtggatattttccacagagggccgcttaa

SEQ ID NO: 347276 - DNA, 2028 bp, Pseudomonas aeruginosa
atgaaatttacgacgatccgactagaaaatgtcttcgcctatgatggggcagtagactttgatttctccgttacagcgccgggtaagaatatagttcttatctgggggcgaaatggcatggggaagacgagttttttaaatgctgtgaaactgctcttcaccggcatggatcagacggaaagtcggaaagtcggttttcctcctgtgcagcttgcccccaagcagtatcttctcggtgatggtagtcgttggagcggagtaattaatcgctcagcgcgccggagggctgctaatgtaggaaagatattagatgcaaaaatatcgatcacgtggatcgatgaaaagaatcaatcatttactgctactcgttggtggacgatcgagggggatgattataacgaagggctatatgttgatggtccctatgatcgtcttgctgcgggacccgctactgagtttcttgccgaaacgctgccttccgattttgtgaagttcttcttttttgatggagaagagattaagagtattgctgagtcttccggtaagcagtcagattttgatcggctcctgcaaatatcttttgttgaggaacttgctggggagcttgaaaagcttgcaggtgagcggcggcgtcgaggaatgcaggctgagttaagaaggaaagttgatgacgccaccgcggctctccgacgagccgatacgagtgcgatagaagcagaagagaaactggcagagatagatgctcagctcacttctgatagcattgagttgaagcgtttagaaattaggcgcgctaacttaagctcgggggcttctgagctgcagcgaaatgcgttagagagtcagaaacaaaagcttctgaagagacttgagattttgactgagcaaattgtctcagagcttccagtctcaattccacttgtagccaatatgaagttgctgaaacaggcaagcgaccaagtagattcgcgtttagcggcaggaggatctgctgaggcacattttgttaagtcagtaaattcggaaatcccgatttggcttcaggaggtctcacctgatctgtctgaaaatgcagtaatgcgaatagcaacatatatcgtcgagaaacttgagaaagttttatcggctacgaagccaagtgggctatttgagaatactgatcttcttagaatggaacggcttcgtagggtacttgattactggaatgtggctggtattgagcgcagagaatctcaagctcgtttggtcgtggaggcaagccagattaagagtgagcttcatgaggttgaggacgcgcttatgcacttagaggttggtgctcaaggtaatgtagaagagtatcggaatgttgtaaacagaattgaagagcttaaagaggcggaagctaagcagtatcagctcaaagggtctctaaaagataagcttgaagtggcaagcaagtcaaaagtagagctgttaaagcagctcaaagctcttgaggcgtcacaggatcaggcatctgcggatgccaaagatagccagttggtaatgagggtagctaagactttaaacgagattgctcaatcgttaaaagaagctactcgtgaagagctggaggtgatgctaaatgatcgctttcgccgaataattactcatccacttatcgagcgaattagcatcgatgatacatattctctgacattctatgagaaatcggggcgatctattgggcgaactagcttgtcaagtggaatgaagcagctggctgcaacagcgttgttgtgggctatgaaagactgcgctggcagagatatacctgtaattatagatacgcctcttggtcgaatagataaagagaaccaagagcatcttttgttaagttattatccggcactttcgcatcaagtaattatattgccaacaaatgctgagatagacggtcgtaaggctgccctccttgagcgtcatgttgctcgccactatacgattcaaaatagtactggtgatgcagctgaaatcatcttgggttcacttgtggagccagtataa

SEQ ID NO: 347277 - DNA, 1497 bp, Pseudomonas aeruginosa
atggttgcgcgcgtacaacttaattccgaagagcgtcaaattattgatcgtataaattctgaaggttggcgagttaagctagatcaatggacggcggcaaggttggcgctggcaagatctttgcagctaccagatgctcctgatccgcagaaatacccagtgcagtcaaagagtcatggtggagttgagcttcattcgcagcaatttacaggtgaagggcgtgtaaatgagaatgatgactttaccgatctttatcgggctttgctttccatatatgaaggaaaagatcttttctccgacgatgacgagtttcatgcggttttgcagcgtcatgtgcgccgcggtttggctgtaatagcagcggagtggaatagaggttctgacatttatagatatctggcagatgaactttttgccgataccgatttagctagccaagtcagtggagaagataagcaggcgcttgcggataaagttgatagagcgttggggcaaatcggaatcggggcaaaactaatagatacatttgaagggcctcgtctaagtcgttttacatttgaattagccttgttagacgaccttgatcgcttgaggcgtggagcatctaagcttggattcgcgcttggtcttggggaccgtgctgttggtatatcagtcggtacagtagagcggactgtcacgttggacattccaaggcctcacaccagttggagaacagtaaactggagtgatattcaagactcgttgaatgttttgagtgtgagaaaaatggggttgccaatttgcttgggaactacccttcttggcgatccattagtaatcgatttagtagaggcaccacatctttttgttggcggtactacggggagtggcaagagtatgtgtctacatgcgatgctgctctcgctaaatcatgactcgacacgttcacctgatctgttgttaatagaccccaaagccgttgagtttgctggttataaggggctgcctaatataatttcgggtgagcctgttgtaacagctggggcggcgctttccgcacttaacagtttagtggatgagatggagcgccgccaagaaatatttcaagagctaggtgcgagagatatagacgaggcaaacgtaaaaggaggagctttaaagcgtattgtcgcggtggtggacgagctgggtgatttgtttatgtcccgtccagaaatcgagctgccgctgattcgtttagctcaaaagtcccgctcggccggtattcatttggtcttggcaacgcaaagacccgaggcagcaacctttcctggaatgctgcgttcgaatattcctagtcgcattgctcttacagtacaaaagtcagctgagtctcgtattatcttggatgagtccggggcggaagaactattgggcagaggtgaccttcttgttaaatttaccggtcaatcaacgatgcgtgggcatgggtgtcgagtatctccatccgatattagttcgctcctgaggtcctga

SEQ ID NO: 347278 - DNA, 1164 bp, Pseudomonas aeruginosa
atgaaagatcttattatttctgattggagtttaattcggctaacgcttgaggggcttggtccatttcaggagggtgcccaggttttcaatttttttggtgttgatgtcgaaggaagatcacccactgccgccggaccagctaatctctatatgctacttgcaaaaaatgcgtatggtaagacaacagtgctggacacagtctatagtctgtttggtctcttaaatgagtctccagtaggtcgattcgctaagttcccttcacaaggtcgggctcaaattgatattcgggcaacttggactatcgaaggtaggtctcaaactgttttattgtctctgtggacggggtctgaagatcctatatgcttatgggatgaggaccttgacgaggtcgcgcaggcaaaagggtgggcacgtctaggactgaatacagctgtttcggggcttgaggttgctcggggaacaaatgaattaggttcatttttttattcggcagtgcaggagcgtctaggagaacctccgactgagcttttcggactttcgcaggtaatgcctactattctctattttcctgcagataggcgtgttgttgctccagtcggtgaccaagctgttactcgtccagccctatggggatatcagcctgctcaaatatttagttctgacggtccagagtggggcagctcgattgataacgttctagtatggcttgagtggcttgctgatcgaagaacagactctgctggggatcatcgcgtagatatattgcttgaattcttaaatgatttgatctttaaggatgatccttcaaaaaaaatgctgttgccaaggcgtgaagaacttagaacctatgttaagactcgctatggcctacaccctttatcatcgttgagccatggagagcgtgctctgcttcagattgtggggagaactcttactcatatgacttcaaatactattgttctcattgatgagatagaaattcacctccataccaggtggatgaatagaatgtttgaggcaatgaaggagcttttgagaaaatatacagccctttctatcatatttacaactcacaatcgtgagcttattcaggtctttcaacataatgtcaaggaggatggtatagtgaagggtggctatttgattgagaatgagattctctag

SEQ ID NO: 347279 - DNA, 897 bp, Pseudomonas aeruginosa
atggcaaattttgcagatattcttgatggggatgagcttgataataaatatgcgggaaaggtaatagtttatgtagaggctgaggcggatgccaaccttttcaacaagctgattggtccgggatgggctgagctaattgagtttaaggttcctcctgttggaggggctggctgtggtccagctaaagcgcgtgtgaagattgaaaggcagaccaattctaaggtttttgctttgattgatggtgaagctgcagttgaggcggttgatgggtttgataagttgcttgactgtagtttgccaatatttgtaactgacgatccggagttggagggtgttttatttattggcgagcatgaggttgaaaatattctgcttagaaaaggtgatttgtgtaactatattgtcgctgatacaactttaagtgcgatgggcagaaacaatccggctgatgttaggttggtgctcgaacgaattgttgctctgtatctgttaggcgcactttgtaagtacgctagtgctcgtctgcattcgaatgggcagatgagcggtattctagatactaagattttcgggagcgagacgtcgcgtttgaggccgctaattttcgcaaagctaaaagagcaagtggaagctgcgcaagggtcttgggacgagtttcgtaacgagctaaaggatttgattcggaaagtttcctttaagatcaaatcgcttgatgcggagcatggctatgatgagcgggctcgactggcggacggcaaagcggtgttgaaaaaaattaaaaataagtacggcatcaactcgagatgggaagggcatctggcgagcgagattgcaaagcattcatatgctagtgaatttcgggagaaccttttttcccgcacaggaatccaaatttaa

SEQ ID NO: 347280 - DNA, 402 bp, Pseudomonas aeruginosa
atgctggcgcaggtgctgcgcctctatctcgccggcaagggcagcgacacgcccagttggctgctggcgttgtccgatccgcgcataggcgcggcgatccgggcgatccacgccgagccggccaaagtctggacggtcgagcgcctggccgacgtagcgggtacctcgcgctccacgctggccctgcgtttcaagcaaaccgcgggactggcgccgctggaatatgtatcgcactggcgtatgcaattggcggctcgcgccctgcgcgacagcaaagcgacgatttcctcgatcgcgcaaaccctgggctacggctcggacagcgccttcagcaacgccttcaaacgcatcatgaaatgctcgcccagagactatcgcagccggcaggccagcagggcatag

SEQ ID NO: 347281 - DNA, 678 bp, Pseudomonas aeruginosa
atggcaggtctgcagatattcaatgactacaatacaatacagtttgacgataattatcatgctccaatattgataagtaaatctactgttagtgttaggcaaagaaggcctgctccttatgatgctgggtcttttggcgctcttgaagtttttgcaaaagacccgcttttatttatgggggacacgtacggcggagcggtaacggtttcatctagggaggaagtgtattccgggttctggagatttacacttgtcgcagactctttttctggaactgatgcagatgtgtacgtttttgataatgcaccacctcagtcaagcggatttgggcttcaaatatataaacctgacggcataactcttggatttgatagcgggtctaagtatttgcgcctatcagatgttctgcaggcgtcttcagggtttgcatcaagtttcagcttgccgcctgggaggcagtatgctgcgatgctttcctactctaggaccgatattgtagatggcccatctgagccttttcggtcttggtttacaagaagagaaggtctttcgataagcgcatcgttagtggctacttcatttgtcgcggtttttaaatttccttcatcaagatcatcaatgcgacagcctggtgcagtagcgccgcaagttgtcctggccgatataactgactactaa

SEQ ID NO: 347282 - DNA, 1506 bp, Pseudomonas aeruginosa
atgagcgaccaacaactcgaccagcacgaactgcaacaggaagaaaacaagctgatcgcccagcgcaaggaaaaacttgccgccgtgcgcgaagcccgggccatcgccttccccaacgacttccgccgcgacgcctacttcgcggacctgcagaaacagtacgccgacaagaccaaggaagagctggaagccgcagcgatcccggtcaaggtggccggtcggatcatgctcaaccgcggttccttcatcgtcctccaggacagcagcgagcgcctgcaggtctacgtcaaccgcaagaccctgccggaagaaaccctggccgagatcaagacctgggacctgggcgacatcatcggcgccgaaggcgtgctggcccgctcgggcaagggcgacctgtacgtcgacatgaccagcgtgcgcctgctgaccaagtcgctgcgtccgctgccggacaagcaccatggcctgaccgacaccgagcagcgctaccgccagcgctacgtcgacctgatggtcaacgaggaaacccgccacaccttccgtgtgcgttcccaggtcatcgcccacatccgccgtttcctcagcgagcgcggtttcctcgaagtggagaccccgatgctgcagaccatccccggcggcgccgcggccaagccgttcgagacccatcacaacgcgctggacatggccatgttcctgcgcatcgccccggagctgtacctcaagcgcctggtggtcggcggtttcgagaaggtcttcgagatcaaccgcaacttccgtaacgaaggcgtctcgacccggcacaaccccgaattcaccatgctcgagttctaccaggcctacgccgactacgaagacaacatggacctgaccgaggaactgttccgcgaactggcccaggcggtactcggtaccaccgacgtgccctacggcgacaaggtcttccacttcggcgagccgttcgtgcgcctgtcggtgttcgattcgatcctcaagtacaacccggagatcaccgccgccgacctcaacgacgtcgagaaggcgcgggccatcgccaagaaggccggcgccaaggtcctcggccacgaaggcctgggcaagctgcaggtgatgattttcgaggaactggtggagcacaagctggagcagccgcacttcatcacccgctaccccttcgaggtttcgccgctggcccgccgcaacgacgaagacccgagcgtcaccgaccgcttcgagctgttcatcggtggccgcgagatcgccaatgcctattccgagctgaacgacgccgaggaccaggccgagcgcttcatgttgcaggtcaaggagaaggacgccggcgacgacgaggcgatgcactacgacgccgacttcatcaatgccctggaatacggcatgccgccgaccgccggcgaaggcatcggcatcgaccgcctggtgatgctgctgaccaactcgccgtcgatccgcgacgtgatcctgttcccgcacatgcgcccgcaggcctga

SEQ ID NO: 347283 - DNA, 1113 bp, Pseudomonas aeruginosa
atgggattgatgcaactgacccgcctggtccaggtggattgcccgctggggccggacgtgctgctgttgcagcgcatggagggacgcgaggaactgggacggttgttcgcctacgagctgcacctggtctcggaaaaccccaacctgccgctggaacagctgctcggcaagccgatgagcctgtccctggagctgcccggcggcagccggcgcttcttccacggcatcgtcgcgcgttgcagccaggtggccgggcacggccagttcgccggctaccaggccaccctgcggccctggccgtggctgctgacgcgtacctcggactgccgcatcttccagaaccagagcgtgccggagatcatcaagcaggtgttccgcgacctcggcttttccgatttcgaggatgccctcacgcgcccctaccgcgagtgggaatactgcgtgcagtaccgcgagagcagcttcgacttcatcagccggctgatggaacaggagggcatctactactggttccgccatgagcagaagcgccacatcctggtgctctccgacgcctacggcgcgcatcgcagcccgggtggctacgccagcgtgccttactacccgccgaccctcggccatcgcgagcgcgaccacttcttcgactggcagatggcacgcgaggtccagcccggttcgctgaccctcaacgactacgacttccagcgccccggcgcgcgcctggaggtgcgttcgaacatcgcccggccgcacgcggcggccgactacccgctgtacgactatcccggcgaatacgtgcagagccaggacggcgagcagtacgcgcgcaaccgcatcgaggcgatccaggcgcagcacgagcgcgtgcgcctgcgcggcgtggtgcgtgggatcggcgccggacacctgttccgcctgagcggctatccgcgcgatgaccagaaccgcgagtacctggtggtcggcgccgaataccgggtggtccaggaactctacgaaaccggcagcggcggcgccggctcgcagttcgagagcgagctggactgcatcgacgccagccagtcgttccgcctcctgccgcagaccccggtgccggtggtgcgcggtccgtag

SEQ ID NO: 347284 - DNA, 1110 bp, Pseudomonas aeruginosa
atgaccaccccgccgccctccgccaacaccctggacctgcgtccgctgatgttcgagaccttcgtctgcaccctcgcggtgatgtccttcgtcgccctggtcggcccgctcgcccgcaagctcggcctggcgccctggcaggccggcgccgcggtgaccgtcggcggcatcgcctggatgctcgcggcgcggccctggggcatcgccagcgaccggcatgggcgacgtcggatactgctcggcgggctggccggcttcgccctctcctacggctcgctctgcctgttcatcgtgctcgccctgcactggacgttgccgaccctgttcgccttcgccggtatcgttctcctgcgcggcctcgccggcggtttctacgccgcggtgccggcctgcacggcggcactggtggccgatcacgtcgaggcgcaacgacgcgccgcggcgctggccggactcggcgcggccagcgcgataggcatggtgatcgggccggggctggccggactcctggcgactcacgggctggtcctgccgttgctggtcaccggcgcgctgcccctggtcgccctgctggcgctctggcgctggctgccgcgcgaggagcgtcgccagccgaaccgcggcgccgccctggcgatcggcgaccgccgcctgcggcggccgctggcggtgggcttcgtggcgatgttcagcgtcaccgtggcgcagatcaccgtgggcttcttcgccctcgaccggctgcgcctggattccgccgacgccgcgcgggtggccggcatcgccctgaccgccgtgggcgtcgcgctgatcctggcccagctcctggtgcgccgcctggactggccaccgccgcgactgatccgggtcggcgggctggtcgccgccatcggtttcgccgccgtgtgcttcgccgactcgccgccgctgctctggctggccttcttcgtcgccgcggcgggcatgggttgggtgttcccggcagtctcggcgctcaacgccaatgccgtgcgcgccgaggaacagggtgccgccgccggcaccctggtggccgtgcatggcttcggcctgatcagcgggccgctgctcggcgcgctgcttgagagagagtga

SEQ ID NO: 347285 - DNA, 225 bp, Pseudomonas aeruginosa
atgaattacaactgggactggggcgtgttcttcaagtccaccgggatcggcagcgaaacctacctcgactggtacatcgccggtctgggctggaccatcgccatcgccctggtcggctggatcatcgccctggcgctgggctcgctgctcggcgtcatgcgcaccgtgccgaaccgcctggtatcggggatcgccaccgcctacgtggaaattgagagagagtga

SEQ ID NO: 347286 - DNA, 264 bp, Pseudomonas aeruginosa; identical to SEQ ID NO: 342320

SEQ ID NO: 347287 - DNA, 3666 bp, Pseudomonas aeruginosa
gtgccgctccacctcatccgccagatgttgcgcgctccactgtccggcgtcgccgagcaggacccgggctcctgccagcaggggtacgaagagttgttcggcagcggcatcgaaactgatcgaggcgaactgcaattggcagtcgccagggccgacgccgtaggtgcgtgctgccgcctggcagtgcgcgacgagcgccgcctggctgaccgccactccttttggctggccggtcgagccggacgtatagatcacgtaggccagcgtctcgccagctacctccggcagcggccgcgtatctgcactcgccggccaggcggcggtctccagcggcagccgctcgacctctgccgggcagggcagccgctccgccagggtttcctggcagatcagccagcgcgcgccgctgtcgcgcaacatgtacgccaggcgctccgcggggtagttcggatccagcggcaggtagccggcaccggccttgaggatgcccagcaggccgacgaccaggtcgaaggagcgctcggcagcgatcgccaccagcgcttccgcggccacgccgcgcgcccgcaggccacgcgccagacgctcggcgcgcatatccagttcggcatagctgagatactcgtcgccgcataccagcgcgatcgcctcaggcgccgacgctgcctgatgcgcgaaggccgccgcgacgccgccccgcggcagcgcctcgagcggtgcctgccaatcccgcagcgcctcctggcgttccccggcgtcgagcagggccagctcgcccagcgctgcctggggggtctcggccatccgctgcagcagatgcagcagatgacggtccagttcggcgatgtccgctgcgtcgaaatcgcgccgcgcatagacgtactgcaggctcaggcgctcacccagggtgacacccagcgtcagggggtagttggtctgctcgtggttgcttggcgtggagaactccagatcggcgggagcctggcgcagagcctcggccacggggaagttctcgaacaccaggatgctatcgaacagagcctcgccgccatgcccggcccagcgctggatgtcgtacagaggcgtatgctcgtgttcgcgcagcgccaggttgagcgcctgcatcccctgcaggtattccgcgacgctctgctgtggctgcggcgcggcgatcaccggcagggtattgataaacagaccgatctgcgcctcgatgcctggcagttccgccggccgtccggccacggtggcgccgaaggctaccgtctcctgcccggagtgccgctgcaggagcagcgcccaggccgcctgcaccaaggtgttgagcgtgaccttctgaccttgggcgaaggacgccagttggcgggtcgtctgcggatccagttcgcgcagatgctcaccctggccaggctgctccgtcctcgcctggcgcgccaggcgtgtcggcatctccagggaggccagccgatcgcgccagaagaactcggttgccatcgcatcgcggctctgcaaccaaccgatgtagtcgcggtaacgcccaacgggagcggctacctcctgccccgcatagcgctgcagtacctcggcgagcagttgggcgttgctccagccatccatcaggatgtggtgataggtatagatgaggtgcatccgcccattcgccagcggcaccaacaccaagcgttgcaacggcgccctggccgggtcgaaaccggcttcgcgctcagcctctgcctgccgttgcggatcactgcctggcggggccagccgcagctccagcgtcgcctgctcgaataccacctgcaacggctgaggccagccgtccttccagaggaatccgctgcgcaggatctcatgggcatcgagggtggcctgccaggctgcgcggaagcgatccgggtccaatccgccgatatccatgcgcaactggttgacatagtcgccttccgttccatgaagactgtgaaacagcatgccctgctgcatcggcgacaacggatagatgtcccgcaccgaatcaggatccaaggacaattcatcgagctgcgtctgggaaagcccggccagcgggaagtccgacggcgtcacaccccgatgccgcgggtcgagacaatgctcgatcagcgcgtgcagctcccgcgcgtagtcatcgaccaggcgctggacggtcgcctcggcgaacatttcccggctgaagctccagtgcaggctcagctcgccaccgtagacctggccttcgatgctcaaccagttggccagcggggcgcacggatcctgggcggcgccggcgctttccgtggccggtaccagcagcgccgccccatcgaactgacggtcgaaccggcccaggtaattgaaggtgatccgcggctgcggcagcgcggccaggcgggccgcagcctcctctccagccaggtagcgcagcaggccgtagccgacgcccttgtccggcacgccgcgcagttgctccttgaccgccttcagcgactcgccgaggtccgcggccggggtcaggcgcagcgggaacaggctggtgaaccagcccaccgtgcggctcaggtcgatggcctcgccgaggtcctcgcggccgtgcccttcgagctgcaccagcacgctggcgtcgccgctccagcggcaggtcgcgcgggccagggcggtcagcagcaggtcgttgacctgagtccggtaggccgccggggcttcctgcagcaactgccgggtacgctcggcgtccagggtcaggacgagcttgcgctcatggcggttttccagggcgccgtgcgggttttcgcatggcagcgcatgcggagcgtcgtgcagttgcgcctgccagtagtcgagttcgtccaggcgcgcgccggcctgttcgtgcaggtgccggctccaggcctggtaggaactgctacgcggcccgagatcggcgtcgaggtcggcatagagacgctgcaggtcttccagcaggatacgccaggacaccccgtccaccgccaggtggtggatgaccagcagcaggcgctggctgccgtcggccatgtccaccagcagcgcacgcagcagcggcccctgttcgaggtcgaggctgcgctgggcttcttcgcaaagcgccagcaacacctcctcggaccccgcctgccggcgccacagcggctcgccggcctgctcggcgtaggcctggtgccaggcgccgcgctcttcgcggaaacgcaggcgcagggcatcgtgctgcgcctgcaggcgttccagggcacgccccagccggtcgccgtcgagcggctggcgcgcctgcaacaagagagactggttccagtgctggcggttgggaatcgactgctcgaagaaccagcgctgtaccggcgccagcgccacctcgccgcttgccggaccctgttccgccgtcgccgcacccgccttggccgccagggccaggctgcggatgttctggtgctggaacaggtcgcgcgggctcagttgcaatccggcctggcgcgcacggctgactacctggatcgagacgatcgagtcgccgccgaggctgaagaagttgtcgtccaggccgacccgctcgacgcccagcaggtcctgccagatttccgccagggttcgctccactgcgttgcgcggtgcgctgtagcctgcctgcgccacgcttacttcaggcgccggtag

SEQ ID NO: 347288 - DNA, 1629 bp, Pseudomonas aeruginosa
gtgcaggtggccgatcttcggctggccgatctcggtggggttgcccgggccggggcccatgatcaccaggtcgtagccgtcgaacgagtacggctcctggaagccgcgcacggtcaccgtcaggcccagcgacttgagctgcttggcgatcatcgaggtgaaggtgtcctcggcatcgacgatcagcacctcgcgtccggacaggtcggcctgcaactgctggcgctcgctggcgccgcgcagccagaagtcggcgatcggcgcgttgcggctggccagcgccgccaccacgtgcgggtgcgagcccaggcgctgcggcgcctggctcttcagcgcggcgatcagcccggaagccttggcccggctttccgccgcctcgcccaggggatcggagtgacgcacgatggtcgagccgacgccgatgcgcaggcggccgccgccctcgatctcggcggtgcggatcaggatcgccgagtccagcgtgcgcccgccctggccatcgccgccgatcagcgccgccaccccgctgtagtagccgcgaccctgcggctcgtagcggcggatcacccggcaggcgctttccagcgggctgccggtgacggtcggggcgaacagcgtctcgcgcagcacctcgcgcacgtcgcggctggtcaggccctcgatgaagtactcggtgtgcgccaggtgcgccatctccttgaggtagggaccgagcacccggccgccgtcctcgcagatccgcgccatcatcttcagctcctcgtccaccaccatgtacagctcgtcggcttccttgcggttgtcgaggaattccatgacctcggccaggttcggcccggccggcgggtagcggtaggtgccgctgatcgggttcatcaccgccaggccgtcgcgcacgctgatgtgtcgctcgggcgaggcgccgaccagggtgcgttcgccggtgtggacgatgaaggtccagtaggcgcccttctcgcgcagcagcaactggcggaagaaactcagcgcgctggccgtggcgtagccgtcgatgcgcgcctggaagcgccgcttgatcacgaagttggcgccttcgccgcgaccgatctcgtcggcgatgacccgcccgaccacttcggcgtaggcctcgtcgtcgaggtcgaaaccttcctcgctcagttccagcgcctggttcggcagcagcgccagggcctgttccagcggcagcagttcctgctccaggaccttcagcgccagcagcggcgtgccgtcatcgagcgcctcgaagccgcgctcggcgatctgccggtagggaatcagcgccagcaggtcatggcgcggcaggcccgggccgggctcgtccagcggcaggtcggccaggccgtgcagttcgagcgcctcgccgcggatcacgtcgagcaggcccgggccattgctttccgggcggtagagcaaggcgaacggcgccggccgttcgagcaggcgctgcaacagcgatgtgggcagggcgttcattccagcacctcgtcggtggtgaccaccatcgcgcagcggctggcggcgtattccagggccatgcggtggtgcgcctcgctgaagtcggcgatggcgtcggccaccaggaacggctggatgtcgttggagtag

SEQ ID NO: 347289 - DNA, 156 bp, Pseudomonas aeruginosa
atgggtggtcattcggcaaaatgcatggagcttgttatcaaaggcatcctcaaggttccgtcgatcggagaggtaacgctggtagtcctcgtcctcggcgaataccacttggcgactgtgtccccgctggaccatgtgaagcggataattcggtaa

SEQ ID NO: 347290 - DNA, 879 bp, Pseudomonas aeruginosa; identical to SEQ ID NO: 323203

SEQ ID NO: 347291 - DNA, 273 bp, Pseudomonas aeruginosa; identical to SEQ ID NO: 324408

SEQ ID NO: 347292 - DNA, 984 bp, Pseudomonas aeruginosa
atgagcagcctaaaaatttacaaaacgctcttggagtacgaggtaccgctagtggtactggccaagaacgataaagctcagaactatctcggtgttaactatgacgacggggagaatgggtacttattctatttttctagaataaaccctgaaaacctgcacttgctcttaaccgaaaaaattgatgttcactacgccgttacgcgcgctcacaaaggaagatatgagttcgctgagacttggggtgttatcggccaatcgtttgagacaacaaaaagcgaagagttaaatccagacttccttcccaagcctggcatgtttattccaggccatgcgccattaagcgcagaaagcgctacacgaatagttgatattgatggcagatgggaagtaagtgacctcaaaaagttttctgatctcgttcaggactgttacgcgtttggttatgcgcttcttagcgagactgggggcacatcgcgcagcattgaaagacttttccacaagtacccctggaggggcggcttcagcgcggttaacttttttagatcgctttacaagggtattcctcgtcaagaccgggcggatatcaagagcattacttatgcttcgcctgggcaaataaaattcattgtgaatgcgactgtagccgaatcaattagagagcttgtagttgatctcaacgccgactcaagccaagcaactgaagcctaccggtatatttatcgtatgcttcaagatcgctcttggactggcaaagctgaagaggatttggacctagacgaccaagacaaggcagagctgcaagccttgttagcgacaggatgcaacggtttcggtctcaaaggccacgaggatcacatcattggactcgcaagcggagacctcctcgcgtctgtgaagatcattctggcctactaccgacgcctgaagctgctggccgattacgtttctactggcaaggcgcagaacgtgtttcacgcgtga

SEQ ID NO: 347293 - DNA, 1215 bp, Pseudomonas aeruginosa
gtgggtagagatgggcggggagttcgggcagtctccgagtcgagtatcgaaatcacgttcatgtatcgcggcgttcggtgccgtgagcggatctcgctcaagcccaccgccactaacctgaagcgcgccgagcagcacaaggcggcagtcgagcacgctatcgccaatggcacgttcgactatgccgtcaccttcccaggctcgcccagggcagcgaaattcgcgccagaggccagccaggagaccgtagccggcttcctgaccaagtggctggccggcaagaagcagcacgtttccagcagcaccttcgaggggtacaggaagctggtagagctgcgcctggtaccggcgctcggccctaccctgctggtcgacctgaggcgcaagaccgtgcgcgactggctgaacacgctagaggtgtccaacaagacgttgagcaacatccagagctgcctgcgctcggcgctgaacgatgccgtggacaatgacgagttgatcgacaccaacccgctggccggctggacgttttcgcgcaaagaccaggtgaaggaggatgacgttgacccattcagtccggaggaacagcgcgcgatcctgacctcgctcgatggccaggccaagaacctggtgcagttcgctctgtggacaggaatgcgcaccagcgagttggtcgccttggactggggcgatatcgactggctgaagggtgaggtctacgtcaccagaacgatgacgcaggctgcggccggcgaagccgaggtgactaagacgctatcgggcaagcgccgcatcaagctgttggcgccagccatggaggccctggtggcgcagaaggaccacaccttcctggccggcaatgaggtgttccagaacccacgcaccttggagcgctggaaaggcgaccagccgatccggaaaaccatgtgggcgcatgctgtgaagaaggccggcgtgcggtaccggcgtccataccagacccggcacacttacgcatcgatgatgctgtccgcaggcgagcatccgatgtgggtggcgggtcagctcggccattcggattggactatgatcgccagggtgtatggaaggtggatgccgtcggcagatattggcgcaggttcgcgagcagaggaactatggggggggcaattggaaaaaacccggaaactcagacttcacaagtcaaagagccgatcgaaggcctttgacttgatgtag

SEQ ID NO: 347294 - DNA, 366 bp, Pseudomonas aeruginosa
atggaatttcgtgaccttgggaacgggcgaactttcccaccagtagcaccgaatggccggatttacgcagtaccagtcacccaggaaaaccaggtagaaattttctgcctgacacctgaaggagtcgttggaagcggagccaaggccaactggactgagatcacaggtttctattacgacgacgagtcctgggaaatcatcctgcgcaactacatcggcaggggaatgcgtttccgccggggtgtgccatgcggaatcgtcgaggacggttgcgaaaccttcaaaacaaatattcaagggttcgcaatcccaatctgcgtaatgaaccgcatcgcgttcgagcagaaaaaactgcatcagacctga

SEQ ID NO: 347295 - DNA, 837 bp, Pseudomonas aeruginosa
atgggtagtacatcaacagtgattcgagtcagcgtgctcgctgcggcagtagcttttctggttgggtgctctgccactcaatcgcctaagactgttcagcttccggagccaaagggtgtgccgaaagaaaaatggtcggatgcgatgcacgttctgactgccatggggatttccgggcagcgtgacgtcccaatcgagatggtagggggagttgatagagtgagccccaccaacagctcagtggcagggctgggggatgctggattaagtgcgattggatatgtgtcaccaccttcaggcatgagcggtggtgcagccgcaggtattggcttgggtttgatgctactgggtgggtcaagtgatccggctcgggcaactcaggttgttgcctgggtgccttccgatcaggcctgctcaccagaggatgcatcggctctggccctccagaaggtggagaaggcccgcagaaagagtttttcaggtggtttgtcaaagctgggtatgcagaccggccgataccctgacggtcattcgcggtcgtacacaacgccagcggatatctttgcggaacgtcctatcccgttcgtggataaaccagctgcgtcaccaagcttcttggcgtcgcctcgcagctatgggccgatatttatccggcataaccagttcacgcttgatgcctataagaacgacatgacgacctcggaagccatgctgcaggcatcgaagtacctacccgaatggatctacatctaccatcctggtcagcggctgaggaaggattcgatcccggcggccatcttcaaccaaggccgagcgctctacttcgtaggaaaataa

SEQ ID NO: 347296 - DNA, 630 bp, Pseudomonas aeruginosa
atgttcgtacgcgcttaccttcgtgcatccactgcccagcaagacgccaatcgtgcccgagacgccctacagcagttcgctgccgaccatggcagggccatcgctgcgcaatatatcgagaacgccagtggggccagagctgaccgagcagagctgctgagactgatagcagacgcccataagggagacgtattgctgctggaaagtatcgaccggctttcccgattgccggtggctgattggcaggcactcaaggcagcgattgattccaaggggctgcgtattgtcgccctggatcttccaaccagtcaccagggtatgaaagatacggctggtgatgaattcactgaccgaatgcaggccgcgatcaacggcatgatgatcgagatgatggcggctatcgcgcgcaaggactacgagcagcgtcgcgagcgccaggcccagggaattcatcgtgcaaaagcttccggcgcatacaagggaaggccggctgacaagaacctgcatcagcgcatcggcgaactgctgggcgctggcctgggtattcgcgcgactgctcgccatgcaggctgcagtaccacgacggtgcttaaagttcgcgatcagatgaccggcagcaacgtggtttga

SEQ ID NO: 347297 - DNA, 309 bp, Pseudomonas aeruginosa
atggttccgaaggtgatcaccagcgcgccgttctacgtgagcggtatccccataggcggcggtacaccagagtcatccgtatgccccttctgtctatcgccgaaatggatgctcaccgagcgccaggctttggccgctggcaaggccaatgcagagttctacggcatcatggttctcgccctagtaaacatcgttgccttcgtccgcctcggagagctggggggcgggatagtgcttgctgtatcggtcgcagccttcttcctacgcagcagaattatcagcgcgctacagcagcgtttgagacactaa

SEQ ID NO: 347298 - DNA, 156 bp, Pseudomonas aeruginosa
atggaccggtttgagttactaatctattcagtgtccggcgtgctctgcgccctggggattaccgctgcgattggttacaaggttgccacttacctggacaagcaacacgacaacaacagacacagcggaacaaccccgaactcgactgccgattaa

SEQ ID NO: 347299 - DNA, 429 bp, Pseudomonas aeruginosa
atgaatctggtcgccaccattgccaatctaatggtctcaatcgtccagccgaccaaaccgctgtacaccacagtggtttatcccatccaagggaaggcagtcgtggtgcatgatggtctcaacatccgcagtgagcgcatgtggtaccagtatcccgagtcgctgactggcgaagaagagaagtcgacccatccgctcgatcctcacatcgaagataactcggccgggctcgagcgccccatacagactcaggctgacaattgcagcctgcagagcagcttcatggatctgatggacaacgcttgggtaaacccggccaacgggctcccgatgatggatagctgcgtcgatgtcatgggcaatgcttacggcatggactcgatgagcgacagtctgtggttcgatcgcggtggcgcgctcgcagactga

SEQ ID NO: 347300 - DNA, 1287 bp, Pseudomonas aeruginosa
gtggtcgctgtcagcgccgtggtcgggcgcaaatttaccatccacccgaaacagcacgatgattggatggtggttcccaaccagtggggcgttgtcatcggtcggccatctgcgatgaaatcgcctgcactcaaacaggcactgcgcccactgcatgccctggagtccagggagcgaaaacagtacgacctggctgaggccgagcacaaggcaagcagcgagctgctcgaaatggagcgcaacgccgccaaggtcaaggcaaaaaaactcctcagtagcggcgacaagaacgcagcttgggcggagctgaacagactttccagcgacatgcaggctccagtcctgcgccggtacatcgtcaacgactcaactgtcgagaaactcggcgagctgctcaacgaaaaccccaacggcctactgcttgtgcgtgacgagctgggaggctggctggcgacgatacagagcgaggacggttctgttgcgcgagcgttctacttggaatgtttcgatggcaacggctcattcacctacgatcgtattgggcgcggcaccattttcatcgagtcatgctgtttatccttgatcggcggcattcaaccgtcacgaatcgcatcgctggtgcgagccgcgatcagcggcgaattggatgacggcctgattcagcgcctgcaactcgccgtttaccccgacgatgtccgcgaatggcgtctggtggaccgctggccgaacaaagccgccactgagcgcgtggattgggttatcgagcagctcgaccaaatacccgatgagcctcgttctgcactcaggttcagcccggatgcacaggagatatttaacgtttggtatacgcgtcacatgggggaaagccggagggaagaattacatccagcattgcaatcccacttcctaaaaatgccgcagacgattgctggattagcacttctattcgagcttattggcggaggacggcaagtggtcagtgaagattctgctacccgagcagtcggctgggcggcctatctgatgagtcatgcacagcggttgtacggtgcagcaattaacgccccactcctgggagcccggttgatcatggagcgtcggcagaaattacccgagccgtttaccgcacgggaggtgcgccagaaggactggacagggttgggctcgcaggacgccgtgaataatgcgctcgcaattctggttgaacacgacttcatcgttggctacgaggttgctggcgagagaggtggccgcccatcgacgcgctatgtctggcgaaaaacgtag

SEQ ID NO: 347301 - DNA, 1092 bp, Pseudomonas aeruginosa
gtggaatggcaaagtgcgctgagagagctccatctctcgggagggttacgcctctttaacggcatggacccggaagttttctttcaaacaccaacattaagcggaaagacctgtaagttcaacatccctagctatggccagttatttggttttgcaaaatcccttggctttacagtaataggttgcgacttctttaccagcgaagaagaagcgaaagaaatccatccaccccagtggagaacgcacagcgccattaatcaaaaatggctttgcactgagcaaggccaagaatggtcatttattgcgcatgctgcctttctgcaaaagaagggaagactttgcgatatttcctctagaatttctcatcagctaagggcctgcgaatggcggctgcgacagctttctaatagctatgcagatcagttacgaagcagattacatcagaaggattttgatcctggcgcccgatttaaagacggctacacatcattatgctatttggccctgcactctttcctgatggatgcatgcgtgttacgagactatctggctgaattttactgggaagcgatccaggacagagctggtttcgaagaaaagaagattacgaccctcagtggacttttgaggcactggaagtctaattcccccaccgataaagctggtaaagaaattcttgctacttctaaaagcggccagtggttgcatgagctaggagaatatagaaacctagtagttcatattgccccccttgcgcatgcaggacaaagcctttttgctgttacgcgcactttcaatatgccccagggacagcagcagccagcggtcaagctgccactgccaaacgacccggtatctctcattgaagaaagagcaacagggcggtattttgacgaccctgaattaaattttgctcgattcagtggcgcactttctgatacggacaattgccgcgactctttagaatatgcacatgtttgtatgcagttgctcggctcgatggcgcgctctgtttcagagtcttcccccttgcgcccagaggtcccaatcattacgccgaaagcagggacttttaaagtggagataaaataa

SEQ ID NO: 347302 - DNA, 888 bp, Pseudomonas aeruginosa
atgacccgccaccgctctcctttcaattccggcttcatcatcgacaaacctccatccagccctcacgggaaggcacccagcgagcgccgtgacgacatctggctctggttctatctcgctctgcgcggaaaagcgctctatcgcagtgaggcaatgaatccgagaaccatgtccgaacagatggcggagagcatcaagagctttcggctctcaccagaggaaatcgctgtcgaccaaagccgtcagatggtttcggaggagcacataacctggatatcgaactgcaagcgtcagctggcctggatccaacatcggctcaatcgcgacgagagcatccgcactttagatatctactcctcagcgctcacaaagaaagagatgctgatagctaagatggattgctccggttcggcgcctagggataaggagtcccaagttattggcctgaaacaggattgggacgaacaaacgcgactggacaagcagctcagctgggttcaagaaaccaatgaagcaggagcatgccggcacgtagtcgaatggatgaggaaacaccaacctgagcaggagtttcccgatactgtcccgaagaccctgcaagatttgctgatcgcctcagacgcgtggacctggagcgacgttgagaggaaatattgcatctccaccgctaggcgcttatggcgtcaggctttgcgccgcaagaaagcgaaaggaaagaagcagtacaactttatcctgagcgacaaggcgatcaagcggctggacagattctccaaagataacgagctctctcgagcccgggtcctcgaaatcctcctccagatggaagaggagaaggatctctatctcaaggagcagattcgtgtgctgcgaggggtcgagcactga

SEQ ID NO: 347303 - DNA, 708 bp, Pseudomonas aeruginosa
atgaatacctattgccccaccttttggccgaacggccctgcggttgaccacagcgatccgatggtcgagctcaatgaccttctgcctgctatcggcagcaccacgtctgcttgcttcgacagatatgaccgaccaactgttggggagaccgtgcggcttctctggatccctcctgtatctgacatcaatggctggagtgagcagccatctgaggtatcactgagctacctgctgacggcaattgttgtcagtgatgcgtccgaggtagatccatcacacagcagttcgagtctcattcttcgagggaaatacaggtatgacctcaggatactgtctcgggagcgtctgttatctgcgctgaaagctactcatccagactccagttcctggcgcctgccggtaattgccagtgaccgaggcgtcactcagctctgggatgatgtgctctggtgcggcaaggcaagcgttgaaggattgatttatctggctgcaaccactcgcagcgaggcgtttatggagatgctattggatcaggaaggtgatgagctcattggactgttctctttgcacgtcaatcctggtggagccggctgctcactgggtaagcagcgccttacatctgttgagcagagggtaattcgacgagcaatgaatagggctcagctactcgaagattcgcaggcgccttacatcattactgaagcttaa

SEQ ID NO: 347304 - DNA, 306 bp, Pseudomonas aeruginosa
atgacatggcgggttgttttgcagctagacgagcaggtgtactcgtgcggcgtaatacaacgagcggtctatagtgttgccaaggatttcgttgctgagatccagaaacgcgagcagcgcactatccttctgattactccgaatccgctctccgcaaacgccgccacactctccgaagatcaggctgaagctcttctactccaacagctgaatgatttcgccttgcgcgagcgaattcggcaggaaactaccggcatcagagaatcactgattcgcgcggcactgatcggctatagctctgaatga

SEQ ID NO: 347305 - DNA, 1488 bp, Pseudomonas aeruginosa
atgagcgcggttatcatcacagacagcagctatcgactgctgcccttcagattcatccgcatgcaaggcgactgcccacaggacgtgttgatcaccggtgatactggggagcacctgttcataacgaatgcgcaactgcatgatctgctggacaagcgcctgcggcgaagcactgccctctacaaggacctactggcgcggcacttcatctacgaacctggcaagcacgatccactgccagagatggccgcacaattccggagccgcaaggacttccttctgcaggggccagccttgcatctgtttgtcgttaccttgcgctgcaatcacacctgtcagtactgccaggtctcgcgcgctccgcttgccggcgatggccacgacctgtccgaacaagatgcaatggctgcggtagatcgccttttcgagtctccctctcctgctctcacagtcgaattccagggcggtgaaccgttgctcgcctttgatcgcatacgccagatcgtcgagcgcgtggtcgagcgaaacgagacagaacaacgcgacatccagttcgtcatcaccagcaccttgcatcatctgacggatgaagtcctggattttgcccacaagcatcgcatccagttttccacttccctggacggacctgccgagctccataacgccaatcgccccactcctactcgcgactcctacgaacggaccctggaaggcattcgccgcgttcggattaagttgggccatgacgcggtatcggcactcacgacgctcaccgccaggagcctggagcaaccgcgagcgatcatcgatgagtatgtgcggcaagggttctccagtatttcactccgaccactaagtccttatggtttcgcctccaaaagcgcgcagcgtctcgattacccgatggagcgctacgttctcttctaccaggaagctctcgcctatctcctggagttgaaccagcaaggtatccacctttccgagagctacaccgcgttgctgctgaacaacattctgacgcctttctcgtccggatacgtcgatttgcgctcccccatgggcgcagggaccggtgccctcgtttacaactacgacggttatgtttacccctccgacgaagcccgaatgtttgttgaaatgggcgaagacgggttgcggttgggtagtgtccggcaaccgttgcgcgagttgttgaatgcgcccgtgatgcatctactgctcgaggccggcatcgcagaagccttgccgggctgtagcgattgcgcgctggttccgtattgcggcgcagaccctgttgaacacttcgcccgccagggggatccgattggtcatcgcgccttcagcagtttctgcgagaagaatatgggactgcttcaacacctactccgcctgctgcgagatggtgacgatggtgtccagcgtgttctgctctcctggctgacgcgtcgctcagtcgctgacatcccccatgtgggttacagggggtag

SEQ ID NO: 347306 - DNA, 1230 bp, Pseudomonas aeruginosa
atgctgcgcagagagactcaattcgacatccagaatcttgccgccccgcgcttgctgaaggtaatcaatgtcagcgagttcatcgagaaaggcaccgccgcctgtgctggtcctgcaacgcttcaggacctggctctctggttcgagtcgcacgagctactgcaacatccgaacctgggcacgcttccaatgggcgcgtttctgtgcccctccgatgacgcaccagagttacccggtacggcagtgcaactgcgtgcgccaaaagatccgaatgttgtccgccccggcgacgtcattgcactcacgcccgctagcaatctggtgcgcgtgctgtatcggaggggcgcgaattccaacctgctattcatcaccgatcgctgcaacagtctgtgcctcatgtgctcgcaaccaccaaaggatgtcgatgaccgctggcacatcgaggagaacctacgcctgattgatctgatggacccgggagaagagcacctcggcatcagcggcggcgagccgacgctctatcgccaagggctgctggagattctcaccaagtgcaagtcagttctgccggagaagtcgatccatctactcagcaacggcaggctcttgaacgatcccagctggattccggagctgaagcaattggaccaccccaaattgagctggggagtgcctctgtacgcagacaatgctgacgatcacgacgacctggttcaggcgcccggggcgttcagcgaaacgctgacgggactgtacaacctcgcacgagccaatcagatcgtggaaatacgcgtagtgctgaatcgccagaccacgcccaggttgcccgagttggcccatttcatattccgcaatcttcccttcgcccgtcatgtggccttgatgggtatcgaaagtactggcctggcgaaaaagcattatgagcaactctggatagatccgctggattaccaggagcagctcggccagtcggtttttttcctgcacaaccgaggcgtgccgatttcgatctacaacctgcccttgtgcgtgttgcccgcacatctatggggctttgctcgaaaaagcatttccgactggaagaatctgttcatcgatgcgtgccaaaactgcgccgccgctagccaatgtgcaggcttcttcaaatcccataccgaccgttggcagagccgcggtattcgtccgctatccacggaagaactcagtacctacgcaaggagcacctcatga

SEQ ID NO: 347307 - DNA, 651 bp, Pseudomonas aeruginosa
atgagtctgctcgatcgctggaaaattctgatcggccatatcacgcttctgccggtcgccggcacggctttcgcgcaagcaaaccaactgccgcttgccgatgcctcctgggaaccacgcagcgatgcgctacctcccgtgttcatgaacacgctcaacgcccccgacgccgtgaatatctacgccgcgcaccgctcgcacagttctcatcgatcccacagctcgcatagctctcactacagcggatcgggtggctacagtgctccgcgctattacagccctccggccgctcctacgccgagttacacaccgaacacctactacagtgccccgagcaggtcgagtgatagcggaggcaccagccctatcaggcgatcagggaacagcttctacgactcctcgtcgaacccgggcccagagacaacgaccaggagcactcctgcccgtcctgcccccagcgaactttccaatttagtagttcgggtgcaaacggcgctgatggtgcgcaaatactacgaaggcgcaatcgacgggatcctaggtaaaaccacgcgcggtgcgctgatgtcgttccagatggacagcggactgcagatcaatgggcgaatggatacaccgaccctcaatgctctaggtatccgtatcccctaa

SEQ ID NO: 347308 - DNA, 492 bp, Pseudomonas aeruginosa
atgaagttatatttttcttttttactgctgctcagcgcgagtagtgcctttgccgcccttccctccaacaatcctgaccaagtctgtgcctacctcacgcgcgagcacctccctaccagggggtggcacgtacaagatgatagctttgccgggtgctcgagtaattaccgcgagctgggcgactcagggacgggattagccaacaacatcgcctactatgcgaccgggcaaggcaacaccgtctcgcaagtcaaaatcgttctgaacctgaaccaaccccaaaatcctactcggtcaattgacgcactcaaacaggctacccgtgttctggtgcagaacatgctgaacaaagcaccgcccgccgaaataacctcagccatacagcataggcgcggcgatgtgaagattaaccttgaccagaccagcatcagtgtcatccgagatgactggccttccggtaagggatatgaactccaggtcatcatcgagtga

SEQ ID NO: 347309 - DNA, 915 bp, Pseudomonas aeruginosa
atgaacccagcactttcccagcattaccgggagatcctcgtcggtctcggcgaagacccgcagcgcgaaggcctgctcgacaccccgaagcgcgcggccaaggccatgcagtacctctgccacggctatggccagaccctggaggaaatcgtcaacggcgcgctgttcgcctcggacaacgatgaaatggtcatcgtccgcgacatcgagctgtactccctgtgcgaacaccacctcctgcccttcatcggcaaggctcatgtggcgtacattcccaccggcaaggtgctcggcctgtcgaaggtggcgcggatcgtcgacatgttcgcccgccgcctgcagatccaggagaacctcacccggcagatcgccgaggcggtccgccaggtgaccagcgccgccggcgtggcggtagtgatcgaggcccagcacatgtgcatgatgatgcgcggggtggagaagcagaactcgcagatgttcacctcggtgatgctcggcgcgttccgcgactcgaacaccacccgccaggaatttctgcaattgatcggaaggagcgaaccgggaatggcgcgaatccgcgtcaaggacctgcgcctgcgcaccttcatcgggatcaaggaggaggaaatcctcaacaagcaggacgtgctgatcaacctgaccatcctctacccggccgcggacgccgtggaggtcaacgacatcgagcacgcgctgaactaccgcaccatcaccaaggcgatcatccgccacgtcgaggagaaccgcttcgccctgctcgaacggatgacccaggaaatcctcgacctggtgatggagaacccggcggtgcgctacgccgaggtggaagtggacaagccgcacgcgctgcgcttcgccgagtcggtctcgatcaccctcgccggccaccgctga

SEQ ID NO: 347310 - DNA, 3333 bp, Pseudomonas aeruginosa
atgaaatcgaataaaaacatcaatctagtcgccgcacagaacctagtcaggggggccctggcaattctaaaggagccgagcactcccgaacgaaaaagtcacgcaaggaagcaggctcaaaaatgccagaagcaaattaacaaagcgatctcactggccaaatctcaacttggaccaaaggcattaagtgatttttttgaatggcttacactacaggttcagtccgctggcgcgattcaatcctctttaggagttcctataacctctatcggaatttttcctaaccagattgactctcgtgatcttgcatcagaactggatacagccctttctaaagtcttgcgctttgaggcagctttggaaaaattcgccgacatttctagcaatattgcaacctgcatcaggcaatttgattggagcgcagcatcacgccatcttgaagaatttgaaaaagccgagggggtttcatactggtcattagaaacgacccttgcgctcctgcagcagactgatggcttagaagaaatgaagagtagaagcgcaagcctatccttgtctgcctacggtctaactcgattctatctatattattttggcgtgcgaaatgagccagcgcagaattcagtccgctatagatcaaatacaactcgcaggatagacgacgcagagataagtgaggcactgagtgtttattcaaaatatagactttacggacatcttggctccaccgagcaagaccttaggctgatcttagcaacagaacagttcactactcctattgatctattcttcacattaataaaaatatgcaaaaaaatcgcttcaaatgaaaacgactacgctaccggagtactcgaacgagttaaaactgctgtccaagcgctttcagggattctacatagagttggaattaccacattaagcagcaacctcaacaaatcctcggaagaagagcttaatataagtaggctttctaaaacggctgtcctacttgccttcgagaaagaatcagataggcctgccattaaattagaagaaattcttgagcgcggattagcatctcagatttcaactcaaagcaatggtcttcatgctgaagagctagcaaaattcgcccttaacttcaactggctccccgaacttatagatataggagatatatactcactacctacactgcctaaaattttcgacagttgcacatcttcggcggcggcacagccgtcatcgatttcctctgcacttcaaattgaagcagctaaattagtgaacgacccctccgaactaggacctgagctcagaaaaatctgcaatacgttgaccaagaatgaaaagaatgaactctcagaaattgataacccattaactcgagactgtatcggagtaatagctagcaatcgatatttccacgcaggtgagcaagacaccgcagtagagatatgcgcaaagtccggaatatacaatccaaaaatcatatcctccctaccaattgtagacatgtactacggctacaagtggtcaaccataaaaagatcgggagatatgcttcatatagcaatcgcccttgatcatttactaaaaataatagacgagcgcacctataaaacctacaagcgctatgcgattgaggagttactaaaagaatacaaatgctctacaattgtcgacttacccaggaatctatctatctcaggccactccatagacttagtcgcgcatctgtgcgcaatcacatgcaatctaattacaattgagctacttcctggcatgagcagttctaaaaagtccaggcagacaaggagtgacttacttcgagctcttgcgaagttaaagccaccttttgaagaattgtatgttcaagaggctatgcacatagaagatagtctgcgcgttgatgatggccttgaggtcttggacgatagcaaggtttatgtggatgagcaatccatcatgaacgcgcttagtgtagaagcatctgcggatttccaacggtataaaaagttagtcgaaagcggcgttggggaaacggaggatctcgttgaggtcatgaaaagcttccgtactctttctgcgaaaaactttcaagtacctaagaatgaggctgacgatctcttgggggaactggttggttcaattagagagaaatttctatgggacccagtctctggattagatgtcctaatcggtcgtcggataagacatggcactattgcaagcgaattacgcggagtacttgaaccagtagagttgatatgtcaacgccctaccttaggtgctgattatcaactaccgactaagctagaaagcttctccgcaagattagaccccaaaaagcggaagatattaaaatccgcgttctcgagattttctgaatctatagattcgatcatcggcactcttcgcgacgaatacttctacgttaagtcaaaaaccaaagcacgaggcgtattcgacctaatagttacaacctcttacttaatgcttctgcgtgcagtggcacaagcttgcacctctgcagatcagtttctgaaagagtgcataggagtattttggtacgacatatccgccagatgcgaaattgctcgaccaactgtcgagaatgaaacaaagaagaatttgcaggcagcattctccaagctgaccaatgagcttagaagcaatggaattgaagatgaagtattactttcggatattgttcatcattctgaggaacttcagcgaagggcttctattattgcaagttggattagggttccaaacgcagaactaaatggtgaaacatataccctgaagtacatagtagatgttgcagttgcattcgtcacggggcaacatactaaattcgacccgaaaataaaagtttgcgtaccggaagacgtatatctagatcttcatggattttcaataattcaagacgctctttatctagcgcttgttaatatacatgagcattccggcgtcaaaggcgaaaatcaagtatccattaatatcaccttcgaccactccacttccttgcttcactttacaatagcgaatgacataggtcctggagccgcttctcctgagaaggaagctaagctaagtgcattgagacaagacataaagaagcgcgcttatggggaaagagccaagcaaaatagagactctggccttagcaaattggctacaatcgtaatgcaatatcaaggtaccaatataaattttggctttgaagataatagatcctttagattagaatttcagcttctattcttgggagtcctcccctctaggaacagcggtcttgcgtctaccgaagaccagaaagttattgaggaagaattaagtgtctaa

SEQ ID NO: 347311 - DNA, 1299 bp, Pseudomonas aeruginosa
atggaaaagctagtagttgaagattttcttgtgataactaaagcggttattgagcttagaaggattaatgttttcattggtccgcaggctcaaggtaaaagtgttattgcgaagttggtttatttttttaaggagcttccatatgaggtcgctcaggcagggacctctgcaaccggaaaaagagagtttgatgcttcgttgttagttaagtttgaatctatttttcctcgctatgcatgggaaggtaaagagttttttattttttatgagagtgattatttctctgttagcgtttgtggtgaactttctggaagtaaaacaaagctaaaaataaaatattctagtgggctttcatctgcattgactgctgcccgtagaacatgccggaagctagggttggaagatgaggaatttactaggcccagattccaagtggccgcggatatcagggatgcagtaatctcagcgatctataaaaggcgtgatggacgaatagaggatgtcatgtatgtgcctgctggtagatcgttttttgcgaatttgcagaggactatattttcatttgtttctattagtgcgccaattgattatttcttaaaggaatttggggctttatatgagcggaccagagttaatgaggggctggtcaactctgtaagagcaggcaagagtcgtccgcggtcagtgacgaggcttgttgaggaattgatttgtggacggtatgtaccagagaaagatcaggattggatagtgggagcattggggcgtgtgaatgtcgcaaactctagctctggtcagcaagaagcattgccacttgctatggttttatcgacttggccatatcttccagggcgtcagctgtttagaagtttcgtaattgaggagccagaggcgcatctgtttccattagcacagagtcaggtggtttcgctcattgcggcagcatataacttcgggaatcaagaggctagttatctaataactacgcatagtccatatatactctcttcattaaataatttgatccaggcagggaatgtggctcagaagttgaggtcgggagggaagcagcttaaagagctatatagcgtggttcctagggaacatcttgttcagttctctgatgtctcggcgtattacgtcgaggctgggcaggtcaaagaaatactagataaagaaatgtgcttgatagatgctgcggctattgatgatgtatcaggatttatttcagagcgctttggaaagctaattgagatggagttctccgatgacgaaagtctgtatgacaataaaaaatga

SEQ ID NO: 347312 - DNA, 702 bp, Pseudomonas aeruginosa
atgcctaggcaagggcgagtggttttaccgaattatccgcttcacgtggtccagcggggacacaatcggcaagtggtattcgccgaggacgaggactaccagcgttacctctccgatctacgggacctcaaggatgcctttggtatcaaggtctacgcattttgcctgatgaccaaccatgtccatctgctcttggcgcctggtgattcgctgtctggcttggcgcgactgatgaaaacgctggcggcgcgcacgacacgatatcggaatcgcttggagggccgttccggaacattgtgggaaagtcgctataaatcgagtgtcgtacagagcgatgcctacctgctggcgtgttgccggtacatcgagcttaaccctgttcgggcgcggatggtggacgatgtggcggcctatccctggtcaagttatgggctgcgggcggattggttgaaggagccaaactggttggatatggatccctgcttcattgagctaggtcagacggccgaagagagatatcggcgatacgtaacgttcatgaaagaggcgataccggccgaggaattgaggctgattcgcgaggcggttcagcgtggacaactgacgggcaatcaacggttcgtggacgagatcgagcgggtagccggggtgagaatagagcggcgtgggcaagggcggccgagattagagcagggaaaataa

SEQ ID NO: 347313 - DNA, 192 bp, Pseudomonas aeruginosa
atgcctaggcaagggcgagtggttttaccgaattatccgcttcacgtggtccagcggggacacaatcggcaagtggtattcgccgaggacgaggactaccagcgttacctctccgatctacgggacctcaaggatgcctttggtatcaaggtctacgcattttgcctgatgaccaaccatgtccatctgtag

SEQ ID NO: 347314 - DNA, 690 bp, Pseudomonas aeruginosa
gtggtacacccagatgatgttcgctcagcacatcgccaacctgtcgcccatctgggggcgcaccaccggtaccggacaccctggcttcacgctgttcaaccgtggcggcgcgccgttgaccttcgacccgttcaacaagctggaccggcagatgaatgcccacggcttcatcttcgggccaactggctccggcaagtcggcgtccctgaccaacctcatctgccagatgctcgccatgtacctgccgcggatgttcgtcgcggaagcgggcaacagcttcggcctgctggccgacttagccaagcggtttggcctctcggtccaccgggtgcgcctcgccccgggctccggcgtcagcctggcgccgttcgcggacgccatcaagctggtcgagagccccgaccaagtgaaggtgctggacgccgaagacatcgaggcctcggactcggtccagggcagcaaggccgacctcgaggacgaccagcgagacatcctgggcgagatggagatcgtcgcccgcctcatgattaccggtggcgaagagaaggaagatgcgcgcctgacccgtgccgatcgcagcgccgtccgccaggcgatcctggcggcggccaggacctgcgccgccgcgaaccgcacggtactgacccaggacgtgcgcgatgcgctctacgaggcctccaggagcgatag

SEQ ID NO: 347315 - DNA, 660 bp, Pseudomonas aeruginosa
gtgagactcttgaagggcggctgggcagccaaacgatttcaaggtcccgccctgccctgggcggggctgctgctggtcttgctggctgcatccgccgtaggggtagagcttctggtgaaggggctgccagccaaccacagcctctacggcgatgcgaaagcgcgctggacgatcaatgaatacgccgacctggagtgccccttctgcaaggtctacaccccgcggcttaagcgctgggtagacagccatccggacgtgaacctggtttggcgccatcttcccctgcagatgcatggcgaggcggcccgccaccaggctcgcctggtggagtgcgcggggatccaaggcggcgccaaagccttctggagcgctatcgatgcgatcttcgctcagtcggccggcaacgggggcgggctggctggcggcacattggactttcctgaactggaccaggctcgactggagaaatgtgcgaaagacatggacctggtggaccagttgatcaagacggacatcgacattgcacggtcgaacggcattacagcgaccccgaccctggtcatccgggacaaccagacgggacgaagcgtgaagcttgaaggcatggccgacgagaccacattgctgtcggcgatagactggctagccaaggatctctag

SEQ ID NO: 347316 - DNA, 378 bp, Pseudomonas aeruginosa
atgaaatctggcatcgcggcccgtcgcctgttcatcaacgacaccaaggctttggtgcataccgtagacgggaccgccatgctggtcacgccaggaatcttcaagcgttatgtccaggagcatccggagcttgaaaagctggcccaggccaaggagaccgccgcctggaagctggtgcagcgcgctttcgagaaacaaggtcttcaccgaaagaccagtaaaaacctgaacatctggaccatcaaggtttctggtcctcgcaagacgaaagagctcaaggcttacctgctccaggatcccaaattgctgttccctgagcagcctctggacaacccaagcctcacggtcatcaccgatgccgaagtaggtgtggaatga

SEQ ID NO: 347317 - DNA, 378 bp, Pseudomonas aeruginosa
atgaaatctggcatcgcggcccgtcgcctgttcatcaacgacaccaaggctttggtgcataccgtcgacgggaccgccatgctggtcacgccaggaatcttcaagcgctatgtccaagagcatccggagcttgaaaaactggcccaggccaaggaaacgaccggctggaagctggtgcagcgcgcgttcgagaaacagggtcttcaccgaaagaccagtaagaacctgaacatctggaccatcaaggtttcaggtcctcgcaagacaaaagagctcaaggcttacctgcttcaggatcccaaactgctgttccctgtacagcctctggacaacccaagcctcacggtcatcaccgatgccgaaggggatgtcgaatga

SEQ ID NO: 347318 - DNA, 387 bp, Pseudomonas aeruginosa
atgcccgaagaacatctgtttcaggatgggaccctcagcttcctgccgacccgtttgaaccggcaaccggtggtcatcggcggcctgaccgcagacgaaatgtggatcacggtcttcaccagcggagcagccgggttcgttcttggcatcccggctgccttggtcgcaggtaacgctgcctgcattccactgggcgcgctgctggtcggcgccctcggcctgggtatcggcaaccgcgtcctgcggcggatgaagcgggggcggcccgatacctggttctaccgccaggtggagatggccctctcgctgcgctttcccgtcttcggcaaccgtcgcctggttacgcgctccggcgcctggaccagtcgacgcacggagtccccatga

SEQ ID NO: 347319 - DNA, 1698 bp, Pseudomonas aeruginosa
atgactacgcaagaaatttgcgcgggtgcgccctcacatgaatcggtcacatggcacagcatcgactgggctcaatgtcatcgtgaagtgcgaaggctccaagcgcgtatcgtaaaggcaacacgggaaggtcgctggggcaaggtgaaagccttgcaatggctgctgacccactcgtttagcggcaaagctatggccgtgaagcgggtgaccgaaaatcgtggaaaggcaacgccgggggtggacaaggtgacttggtcaaccccggaggccaaaggtagggccgtcgaaacacttggccggcacggctacaagccgcagccgctcaggaggttgatgatccccaaggcgaacgggaagatgcgcccgttgggaatcccgactatgagggaccgtgccatgcaggcgttatacctgctggcattggaaccgattagcgagacgaccggcgaccgcaactcctatggctttaggcctggacgcgctacggcagatgccgtcgagtactgcttcaaggtactcgcccgaaaggattgcgcggaatgggttctggacgccgatatttccggttgctttgacaacatcgaccactcttggctccttgcatccatccccatggatcgcaaggttctatccaagtggtcgaagtctggcttcatcgaaaatggcagcttctttccgacagaagctggaacgccgcaaggcggcatcatctccccggtgcttgcgaacatggcattggatggtcttcaacgcgagttggagaaggcgtttccgcgctcaacagtgcaggggcgtcgagcgaagctcaatctggttcgatacgcggacgactttgtgattaccggagccacgcaagagttcttgcgtgacgaagtaatgccggtagtcatcgagtttctggctaagcggggtctctcgctctcgccggaaaagacgcggatcgtcaatatcagtgaaggctttgacttcctcggccaaaacattcgcaagtacagcggaaagctgatcatcaaaccctcaaccaagagcgttgtcacgcttttggccaaggtgaaagaggcagtcaccgctcatcgggcatcaaagcaggcggatctgatacggacactcaatcctgtcatcaagggttgggcgatgtaccacaggcacgcatgttcgagcgaggtgttccagaaggtggacaaccagatatggcgttatctctggcattgggccaagcgcaggcatccgaagcggggcgtaaggtgggtgaaggagagatactttcaccaattgaagttccgtagctgggtgtttgccgacaggacgaatgtgccgacatcaggcgtagtaccgacactggcattagccagcaaggtaaagattgctcgccacagcatgatcaaaggcgatgccaatcctttcgatcccgaatgggaaacctattttgaggctcgtctgggcttcaagatggtaggtcaactgaagggccgtcaacgtctgttgagactatggttggatcaggaagggttctgccctatctgtcaaacaaagatcacgagtgagacgggatggcatgtccatcacatcacgcgaagggtcgatgggggttctgacaacccctccaatctggtcttggtacatcagaactgtcacaacctgatccatgtccgcggtattgaggtagtgaaaccggttcccgcaaggggactttga

SEQ ID NO: 347320 - DNA, 501 bp, Pseudomonas aeruginosa
ttgatcctgcaactgggtagcggccagtggctgcgcgacggactcaacctgatcatcaacggcccgactggcgtcggtaaaacctggtttgcctgcgccctggcccaccaggcctgccgagagggctacagcgtgcgctacctgcgtctgccgcgcctactggaagagttgggcttggcccacggcgacgggcgcttcgccaagctgatgagcggctatgccaagaccgacctgctgatcctcgacgactggggcttggcctcgttcaccgttgaacagcgccgtgacatgctggagctactggacgaccgctacggccagcgctcgaccctcgtgaccagccaaatgcccgtggacaactggcacgaactgatcggtgatccgactctggccgacgccatcctcgaccgcctggtgcacaacgcttatcggatcaacctcaagggcgaatcgatgagaaagcgggtgaagaaattgacggcgccgggcgcctcagactaa

SEQ ID NO: 347321 - DNA, 915 bp, Pseudomonas aeruginosa
atgcgcaccttactgctctcgctaatcctgggcctgttctgcgcccagctcactctgagcgcgaccgccgcgccgatcgaacatatctatgccttcggcgacagctactcggataacggcgccagtgatcgtttgacccacgagatgctggagaaaggcatcaaggatgcccagcggctgcctggcgagctgtattggcaaggccgctggagcaacggcccgacggcggtggaagtcctcgcccaacgccttggcgctcagctcactgactatgccgtgggcggtgccaagagcgggcgaaacaattattacgcctggatgacgccctatcaggacaccggcttgtccggacagatcgaccagtatctgggcgggctcaacggccagcccgccgatcccacggctctttacttcatctttatctctgccaacgacttcttcgagcacgccgacttcagtctgaccctacctctggagcagttggccagggacagcgtcgaacaggtgttagaggccgtcagtcggctggccagggtcggagccaagcgttttatggtagtcggctcgaccgagctgagcgtggtgcccgccgtagttgccgctgggcaggacgaacaggcccgccgctaccaacaggacttcaatgacgcgttgccgatgcagttggagcagttgggcaaagcccaggaattggacatcgtttattttgatcatagcgccgttagcagcagtatccgcagcgcccctgggcagtacgggctgagcaacctgactgccccatgccagcccacctaccccgaggtcaaaagcgcctgcgcgacgccggacagctattacttctgggacgaatggcatccaacccggcgcgtgcatgccctggtcggcgaggcgatggcgcagcgttacggtcattga

SEQ ID NO: 347322 - DNA, 954 bp, Pseudomonas aeruginosa
atgaagcgtctgatcgtggcgtgcctggccgccttctttatctcctcacttgccttcgccaatgcgccatcgacgttctctgctgcgaaaaccgtcgccaagaacaaggtgttctatgaccaggcgtctactgggctcggcgacctctattgcggctgcgcatgggagtgggttggcaagtcaggcgggcgaattgacgccgcctcgtgcggctacgagacgcggactcagcagacacgcgcggagcggatcgaatgggagcacatcgtcccagcctgggtcttcggccaccagcggcagtgctggcagaacggagggcggaagcactgcgtggcggacgacccggtgttcagagcaatggaggccgaccttttcaatctctacccatccgtgggcgaggttaacggcgaccgaagtaactaccagtacgggcgggtggctggcggcgctcctcagtacggagcatgcactaccagagtggacttcaagggacgtgcggccgagccgcgtgatgaggtcaagggcctagttgccaggtcgaccttctacatgtacgaccgctacggcctctcaatgtcgagacaacaacagcagctgctaatggcttgggatcgccagcatccggtgtcggcgtgggagcgcgaatggaacagccgcacggctagagtcatggggtaccacaacccgttcattaccggcgaacgcgcttggacgctggggcacaagccatcgcgtgaggggctcgtgagccagattgatacccgcatccctactacccaatccgctagtgctgtggctggcgacgcgatcatcgggaaccggaacagccgggtgtatcacttgccgcggggctgcccgagctacgacaaagtggcccccaagaaccgggagatttttgcaagtgagtcagcggccatcgccgcaggctacagaagggcagggaactgtcgctag

SEQ ID NO: 347323 - DNA, 891 bp, Pseudomonas aeruginosa
atggagttgcgtcatctacgatgctttgtcgtcttggcagaggagttgcatttcacgcgggcggccgagaggctgcatatagagcaaccccccttgtctcgcgcgatcaaggaattggaagatgagcttggggtcacgctgtttgaccgcgaccgcaggggcacacggctgaccgtggcgggggcggcattcttgcaggacacccgccgactcttcactgtcctggagcaagcgcgtgaaaatgccagagccattgccgcgggcctgaggggcagcctgcgcattgcaatttccgatggtgcgatggacccacgactatcggcgttcctagctcgttgccgcgcggaagagcccgaggtcgagatacgtctctccgaggtaccgctgaccgagcagatacggggcctacggtctggcgacttcacgatcggatttgcacacgcggcggatgttggcgaaggcatcgtggctgaaccgatctggcgagacccgattgtgatcgccgtgccagcgcggcactcgcttcttgcgcacaagcaagttccgctgaacgaacttcagggtcacccactggttctgtgcgacaaactggcctgcgaaggctactgccgagaactaaatcggctgctacaggttctggaacacagactcaacgttgtcgaagaagtgtcgtcgctggacatgatgctaacgctcgtcggcgcaggctatgggattggtttcatgacggcgaccaagattcccatcagccagaggccggacgtggtgattcgccctctggcgcaggacacggcggtaatcacaacctatctgcttcggccagaaagcagcaactcatcggtttcgctggatcgcttcatcgaacgtctgcgaggacctccggatgactaa

SEQ ID NO: 347324 - DNA, 186 bp, Pseudomonas aeruginosa; identical to SEQ ID NO: 322823

SEQ ID NO: 347325 - DNA, 189 bp, Pseudomonas aeruginosa
gtgcagcgcctcgccgcgccgccacggcgcctgccggtgcgcgcggcgctgccggacggtttccgcctgggcctggcggtgctcggcctggtgctgctgatgagcggcatcgggcacctgttctggcgcgacatccagcatgaaatggcggcggtgacccacctggccgatgcggagcaggcgccatga

SEQ ID NO: 347326 - DNA, 2538 bp, Pseudomonas aeruginosa
ttgtctgccatccacgatctaatcgcccaggtcagtgatccgcggctgcgtgagcgcttgactgttgaatgggataatgcgtctaaagataagaaattcggcttggtctttgaggaccatctgccagagttgttaccgctgttcagtgccaagccgcgcaagggcgatttggtctgccgccgtcagggtgcgctgaaagatgtgtggcaaatcaagtccatccacgcgggcgtggccacctgcgtcaagcccagcaacgaggcacaccccagcgaaccgacccgcgctgcggcagagccagtgcagttccctgcggacgaattgctggtggtgtgtgagtttggcgagccgatcttccccgcgctggtgccggtagatgccgtggccaacggcccgcttgacgccccctggcacacgctgatcgaggccgacaactaccacgcgctgcaattgctggattacctgtatgccggtcaggtcgattgcatctacatcgacccgccctacaacaccggcgcgcgcgactggaagtacaacaacgattacgtggacggcaacgatggctggcggcacagcaagtggctggccttcatggaaaagcggctgaagctggccaagcgtttactcaagccggataccggagtgctgatcgtcacgattgacgagcacgaagtgcatcaccttgggatgctgctggagcgggaatttccggaggcgtaccggcagttggtgaccatcgtcatcaaccagaaaggcgtcgcccaggggcgtctgtcccgcgccgaggaatatgcgttgttctgcttcaaccctggcgtcacattggcagcacaccacgacgatctgctttcgcccgaccgcggggattccaagcgctttcaaacgccgcgatgggagcggttgctacggggtggtaccaactcacggcgcgaagatcggtatggattgtttttcccgatcacggttgatccggagaagcgcaagatcgtcgagattggcgatcctttgccgcccgatcaacaacctgacctgagtaatctgtctgatcgccgcacggcatggcccttgcgtactgacggtacgctcggtaactggcgggtcagcccaccgaccttgcgccagctgctggccaaaggctacgtaaagctgggcggctttgatgaggcacggggaacctggaccattctgtaccttgggcaaaaggcacaaaaccagatcgaagcaggcgttatcgagatcgttgaccggcacgaagtgactggcgaagtgacggtgcgttacaccgaaagccagcagcgctccattaaaacggtgtggcaccgtgccacccacgatgcgggtaactatggttcgagcttgctgcgcgggattctgggtgaaggtgggaaattctctttcccgaagtcgctctacgccacgcgcgatgccgtggcagccgtagtccgtgatcgccccaatgccctgatcgtggattttttcgcaggcagtggcactacgctcaatgccgtcaacctgctcaacgccaccgatggcgggtcacgccgctgcatcctggtcaccaacaacgaagtctcggcagaagaagccgccgcgctgagcgcccgcggcttgcagcccggtgatgcggaatgggaggcgcaaggcatctgccgttcggtgacctggccgcgcagcaagtacaccatcctcgggcagcgtgacgatggcacggtgctgaccggtgaatatctgaccggcaaaaccgtggagcgtgagaaagcgcgcagcttcacgcagatcggctttgtcgatccggcacagctcgacacactgcccaagaagaagcaggtggtggcgctgatcgatggtctaccgcagacgctggtgaaagatccgtgccccttcatcgtgtcggaaggccacaaggccagcgtgctgtttgacccggcagccgcggaagactggctggaggcgctggacgggcaagagcacattaccgatttctacatcgtcacgcccgtcaagcgtgtgttcgaccagttgaaggcgcaggtggccgaactgctcggcccgattctggtgccggaggaagaaaagcgcccgatgagcgcggggttcgccgccaacctcgcctacttcaagctggattttctggaacgcgaacgggtgtcgctgcgccgcgccttccgcgaaatcctgccgctgctgtggctgaaggcgggggccgtcgggccgcggcccgagttgaaacgcggcgagccggagccggcgctgtttgcgccggagggcagcaatttcgtggtgctgctggatgaaacccggatgggccgtttgctgcaagccctggaaggccgcactggtttgtcgcaggtgttcatcgtcaccgacgcggacgaatccttcaaaaccatggcgcaggacgtgcgcgaggtggcgggcaaggccaaccccggcttggcggtggtgcagttgtaccgcgattacctgctcaatttcatgatcaacaagaatcaggaccgcgctgccggtcacaccgatatccagggagcgcgggcatga

SEQ ID NO: 347327 - DNA, 2526 bp, Pseudomonas aeruginosa
atgaaggtcacgctgttcgattttcagaaagactcgctgggcaaactacgcgatgctttggtcagtgcccgcaagagcgtgtcgccggataaccagcaagtcgtggccttctcggccgccacgggcagcggcaagaccatcatgatgacggcgctgttcgaggccatcctggatgagccggatgatcaactagcatggccgctggattgggcaccccaaccggatgctgtgatcctgtgggtgtcggacatgcctgagctcaacgagcagaccaagctcaagatcgagagcaagtcggacaaggtgtaccgggtcaaccagctcatcaccatcgatgcgcatttcgacgcgccccggctggatggcgggcgtatctatttcatcaacacgcagaagctggcagtcaatcagccgctgaccaaccgtggcgacggacggcagcatctgatctgggaaacgctgaccaacactgcgcgcgctattcccgaccgcttttatgtggtgatcgacgaagcgcaccgcggcatgacttcgggcaagggggcgcaggccgcgcagaccctgatgcagcgcttcttgttgggttaccccgaggttggcttggtcaagatgccgatggtgattggggtgtcggccacgccgaaacgattcctggatttgatggcgagtgccgagcacaccgtgaccacgcacaaggtggccgtgccggctgaggaggtacgcaagtccggcctgctgaaagaccgcatcttgattcatcaccctgaagccgccaccacggcggaaatggcgcttttggaagaagcggctcggcgttgggggcagatgacggttgcctggagcgcgtactgccatgatgaaaaagagcaaaccatctggcctgtgctggtggttcaggtcgaaaatggctcagaccggcaactgaccaagacggatcttggcgcagcgctgaccgtgatcgagagcgccattggccgtcgcctgaacgaaggcgaggtcgcccatgcgatgcacgacacgggggacctggacgtgggcggccgccgggtgcgcaaggtagaagcttcgcggattgacgcggacaaaaacatcggtgtggtgttcttcaaaaccagcctgtccactggctgggattgcccacgcgctgaagtgatgatgtcgttccgccgtgcggaagaccacacctacattgcccagttgctgggccgaatggtgcgcacaccgctggcacgccgcgtcgagaaggatgccgcgctcaacgatgtgcatctgttcttgccgtacttcgatacgggtgccgtggaaagcgtggtggcttcgctgcacaacgccgaagatgtcccgcctgctgaaacgggttccagccgaaatttggtggtactcaagcggcgtgagggctgcgagtccatctttgtggcactcgacgaattgatcacctaccgcgtgaatgccgcccgggcgcaaagcccgctgcgccggtatatggccatctcacgcagcctgaccatcgatgagatcgatgatgatgcctggggccaagccaagcagcagattgttgagtggatggggcagcgggtcgccgcgatcaaggcggcaggccagttcgatgctgcggccaaagcgattacgcaggttggcctgcggaccctagctgtcaataacggcgctggcgtagctgagccgactgcggactatcacattgatgcctcggacgtagacattgatcggctgtttgaagaagctggtcgcgccttcagccatggcctgcagatggagtactggcgcgcccacgcggatcgcgatgcgctggatgtgaaggtcgaggccatcgttctggcccgcaacgcggcagaaatggctgttctggaatccaaggcggaggcggccttcgacagcctctatgaccagcacaagaaggccatctacaaactcaaggagcagcggcgcgtcaattacgagaagctgcggctggcgacggccaagcccaacgaagtgccatggcaattgccggcatctatcgacttcaagcgactgccgaccgatccgctctgggagcggcatctgtatgtggagggtaacggccagttccgcgccgagctgggcagttgggaagccggggtattgaaggaggagctggccaaagccgaagtggtaggctggctgcgcaatctggatcgcaaaccgtggtcgctggaaattccctatgagacgggtggcgacgttcgcccgatgtttccggatatggtcgtggtgcgcaaagtcggcagcgacttcgccatcgacattttggaaccccacgaccctagcctgagtgacaactttgagaaagccgtcgggctggcaaagtttgcggaaaagcacggcgcgctgttcgggcgcatccaactgatccgcaaacagtcttccgcgggtggcgagcatttcgcgcgcctggagatcaatcaggccgccacgatcaagaaactgctgctgatcaccagcaacccgcagcttgatgagttgtttacagcagtggcaggtaagtga

SEQ ID NO: 347328 - DNA, 303 bp, Pseudomonas aeruginosa
atgaaactgctcaacacctacgacgaccgcgatgagggcgaagcagccgccgaaaagctcagcggggagagacggcttgccagcgaacgcgacgccaccgtggtcatctacaatctattcggcataccaagctggggtaattttcatcgccttggcatgtacaacctaggcgagctgaagaatttgcttgagcgacgagctgcctggcagccgacagaacaagccagacatagcgagattattgccacacttaagaccgtagcgaagaactacaacatcgatctgcctgcacactggctttaa

SEQ ID NO: 347329 - DNA, 171 bp, Pseudomonas aeruginosa
atgaaacagctgttacggacttttgcctccgctttcatgtttgccgggatcctggccggctgcttggcggtactgctgctggtgctcctgatggtgcgctttccaccactgctgatcgctgtggtgttggcgtgctggaccctatgtcgactgcaacggcgttttgactga

SEQ ID NO: 347330 - DNA, 1629 bp, Pseudomonas aeruginosa
atgagcagctatacctctcgcctacagcgccatctaaagaatcacgccaagcagctccgctatgttgccgataccaggcacagcgaagctttggacatcgctgcggccgacttcggattctctggttggaagcaggccaccgcccatatggccatggctgaaattcggatacgaggcgcgcaagcgtcgtttgccagcgaggttgctcgcctggctgcagaactgcgtgtattacctggctatccgtaccggctagaagatcgtaccggtgtgagatttgaaccggctgacaagcaacaaaccgaagcagtagccaagcgcttggtgttgctccagctattcgaggacattcatgcacccaaggggctctgccattcagtcagtgctcggctctggttccgtgcacccatgctgttcgatgacgccgctgagatctgccagcgtgctccttggaaaatcagacgcctttcgctcgcactgatgaatgagcccaaagcttctgaaaattcgtggctacatgtccagcctccaaccccagaagtcgcgcgcattacgattatcgagtatctgcatgcattgcattcaatatccgtgatccgttcgttgactgggtctcctgaggaagttgttgggcacccagggttcaaagaatttgccggttttgcattgaatgccctgctggccggtaaggagtctaaagaggctctccttaggttgctggatcacgcgggaatcagcggctgggtaaaggcaacctctagtctcatcgatcccaaacgattgtattgggtcggacgccaggagtcggagagcctgcaatccaatcaaggcgtatcgatggtgattggacccgccttacacccacgcctacgcaggccactgaactcgctatcacacgaaaagcatgaagaaatttccactgctttggcgcgtgtcggcaagcttgtccaaggcaaagcaggcttggagcgcaacctcagcgagatccgtgaaaccctggctggctggatggctttagaaattggtggccaggaaagggccaacaagtgctatttcagtatgtaccgcgcttaccggccggtgccattccttgctccggcagaagaggtatctgctcgcaccgccattcagactatccgagactgcattgaagctggctacgaaaattgcatgccacgatcaaggttgctgactcaggttattcagctgcaaaagaaattcgaccgttggatggagaaaactgaaggccactggctgaagacctctcacaagctaccgatggactcgattggcttagtggccatcgacccgaagcatgaactctcgctcgactctgagtctgtctggaaacaaacgacgatcatgggaggcagcagggaggccgatttaatcgctgcggtccggccactcctattcaaatcatggagggaggaagaggagggcatgggttatgacttcaatgcagcagacccagatagcgagcagtcgattcttgagcatctgcatgatcttgctttctatcgctacacgggcgcagcgctgacacgtgcgcaatatgaaaaggaggtgcgcaaagccttctatttcgagcctgagcatgtctggttcaagcaacgaaaaatcagatga

SEQ ID NO: 347331 - DNA, 777 bp, Pseudomonas aeruginosa
atgattggagcaaggacacgatattcgctcgttcagtttcttggcctacaggaacccgacgttacccgaattctgctgcagaaatataatgttccggatgtgtcattacctccattgcagttgctgcgagcgctggaaagtgtgctgctatcgcttgatgaacacaccacaatgcaggttctttccgaggtagtggcatcagatggtgatctgcgagccagaatcaatccgaaatatcggtttgatgagcgtatggccgacttgacgcagtgcttgctcttggatggctacctagtccaaaacaaaaaactggtcctaacagatccatcgattgctggtgcctcacctgttgaggatgacctgatccaggcacttagtaattgcggggcaccaagaaaggcggaaatcatcgccagaatcaacgactcggcaagtaccttcagggccagcccacctgatttcaatgccactctggtgcacgcccgagttgcactggagaccttggccgctgatatagctgcaaatgcagctaatcggcaggcgacaccatcaccatatgacccaactaaatggggtgaggtaattgcctttctgcgtaagtgcggtgagatctcgctggaggaagagaaaggattggccggggtatatggcttcctgagcgtcggagcccaccgttcagtaggcattccgcaagaccagatgacccgtctcggccggtcattcgctctcaatatgtgttggttcctgctcaagaaccatctggaacgaatcaaataa

SEQ ID NO: 347332 - DNA, 648 bp, Pseudomonas aeruginosa
atgccgcagcccagtcggaataccattgctgacttgatcatgcaaaacatccctcgtgacctcctgctgggcattgaggaaggcctgaatgtgggcgcggaacgagcattctcggctgccaaaagcatgcacaccggccatgtgaaacacgcggttggccaaatgcgtgcctttcacatgaacgagacgttcaacgacgcactggtcgctggcggagctaaccctactccgatcaagggcaacagcctcgttgttgggcgcgctggcatgctgacgttgagtcgttttaacgtctccgcccgcacttggaacaacggtcgccgtagcgcaatgcgccgtcaacttgccctggcaaaccaagcgattgagcaactgattcagcccggactcttcgctccgaccccaatcacccaagcaacggttttcttcgtggcatcgttcagtggttctatgtcgttcgagcctgagaccccgcaaacgatctacatcgctgtgcctgacaaggacatgaaatcttggattttccaagagcctcttgagcggttctgctcacgttacttcgaagtcgaaaaccctgttcagccagacacggctcagcccaagctcaagccgggcgtggcagcggaaacgcggaaaaatcagtcatga

SEQ ID NO: 347333 - DNA, 1203 bp, Pseudomonas aeruginosa
atgagtcgcggggtcaatggattccaatcgggccgcctgagtcaagctctcgcggcccgccgtcttcctcaagttcagctcgccgcgatgatcggtgtgtcgcctgcgactgtcagcaaatggcgcgcagggagccaagatcccgaagccgatgcgcttgagcgtctcgcctccgttatcaatgtaagccctgagtggtttacccgaccattgccggccaaggtttctctccctctgttccgaagcaacgcttcggcacatgttgccgcccgacaaatgctggaggctcggctggagtgggctcaggacatctgcatcgcccttgaggagttcgtggacttccctgaggtaaagcttccagttcgacgctacgagtcgcccgagcagatcagcgcttcggatatcgaagaggctgcttgtgagtgtcgagatctttgggggttaggtcgacgagctattcccgaccttgcactagctgtagagggggctggggtaatcctcgttcgcgaagaaaccggcatcgcgcctatcgaaggattatctgcgtggagtgaagctctacagaggccgatgattctgctatcagcagacaaggcgaatgggttccgcagccgattcgaccttgctcatgaacttggtcatctggtgctccacaaaggcatagagcgcgctactgatccagttcggtacaagcagatggaagatcaggcgcatcgtttcgccggggctttcttgctgcctgctgagacctttgcggctgaggtgaagttaccggccaccttggatagcttgcagctactcaagcagcgttggggggtctcggtggctgctatcgtgatgcgccttcatgctctgggaatgatcgaccaggacgagaaatcgcttctgttcaaacgtcgctctgctcgctggggtgtgaagtccgaaccaggtgacgatgctcgttctcctgagcagcctcgactcctcaagagaaccatcgagcttctcgcttcgtcaggcgttctgcctattgaggccgtcccgaattacatcgggcttggcgcatttgatatcgagcgcctgacaggcctttctgaaggctatctgtctcaaagtggagttgtgctgcccctgactaagctgaaggccagcgttgcccgcgatgcatcacctgcagcggctgaaggcagcgcgacagttctgccttttaaccggcgctga

SEQ ID NO: 347334 - DNA, 2460 bp, Pseudomonas aeruginosa
atgacttcagctcttcatttctgtgaccgcgaacaagaactccaactactgaccgagcactggcaaagagccagcaacataaactccccggcgccccacctggttgtgatcaagggcgaacgtggcctaggaaagactcgccttgcgcttgagttctaccgctggctctcattaaatcaaggccccccaggtaatggcggctactggcccaacgccttgaatgttgtcggtagaaatcatgaggtgaatcccgatccccagttttgcaattttgccctgccaatcccttatctgtggtggggagtgcgctgcgccgatcaggaagccgaaaacagcgtcgccggagacgccatcgctagccacgacaggctcgtagccccacatcttgtgacgctctccatgcgcgccaggatggagaaccgggccatctcactcggcaaggcatggctttcggtgggcatcgatgcggcagcaagcaccctccaggtcgataccattctctccgtcggaaaggctatcagcgaaagcataaagatcatcaaaggtggtcttgatgaaaaaagcccggctcatgccggctcggccgcctccaagtgtgcgctatcccgaagcgacgcccttctcgtagatcttgagaatatcttcaaccccgcgctacgcagcttcgccaaaaccccgggggtactctttattgatgatgcgcagttctgtgcccatgaccctgcactacctagcttcctggagcgtctactgaaacgcgccagcactcagaagtggccggtattgattctggcgacgcattggcggcgggaattctctgcctggggcgggatgcctacctgcgagtcgcaaaactctctgccacagattatcgcgcgggtggccggttccgattccggcctgatcgttcgcgagattgatctcggggtggtcgccgatcttgggccggcgctggttcagcgctttcccggactaaagcaacaccaacagctgcagatcctccagcgcgtgggcggtaatccacgctttcttgagcagatagtggcgctcatgggtgaaagcgaagactacttcatcggtatcgacactgaacaggcactcactgaggagggcctggaagaaatcctaaaggcgacgccggatatcttcaccacagcgatgaagcgcctgcgcaccgcaccggaagaagtccagcaggctttggggctggcaagcacccagggcatgcagttcctgccacggatggtggccgagatgggggtcgatctcttggggcacccgttagcggatcacctggcagcagctgaagatccctacagtatggtgctgggtacctcctccgaatcacccgtcggggcgttcacagagcgacttatgcaggaagttgcaaccaaacgccgccgcacactcgcctcactaggaggtgagcaacggatcggcaatgcgctgcgcgagcgcctttgtatggtgctcgatcacccgagtaccgaacaaggttactcggaggaagagttcttagtcgcctatcgcctcgccttgcttgaatttggtgatgcacggggcaggcccgacaaacgacgttttgaagaagcaagcgtgcggctaatcgcccttgaacgaagcagaggctctcatgaagctgcagtcaccatcgaaacccagctgtacagggtagaatccgtgccagctagccatgcgtttatacggtgctggcaggctgcaggatctcatatccaagccagcgccatgagcgagagcctgatctggattaaggctgatttgcatccgcctcttctagagcacctcagcttccgaattaaaaaccaaatctttttagttcgtgtcattgataccgatggcaaagtagacactcaaggcacgacagctgggctaattcaccatgcacaacagtggaacggcgtaccgtgcctgctgccgatgcggctggaaaacggcgcatggaaaccagcgaatcccggctggggcctgattcatgcgctgaataacatgccggtggacccgccggatcttggcagcgatagccctgtggagatgaccgattgggagctccatgattttgcagtgatgtgtgtcagaaagcatatcgaagacaatcttggcaggcaggtaactagctcttgcaataatcctctcataaaccccagtttcttctttgagggcgagaacggactggaatgggttgttgtacgcgtcgcgcgcgatgaaaaaggcggacagcgaccgggagatgcaatgcttactcaagctatgctacgtgatcatggatatcctattggccacttcgcatcgattggggttgtctcctccggcgggccgctccagcctttgattaggggcgccggaatgcacctctatttcaaggggcttgaaccttttggggatggcccgccgatgctcattaccgaaggacctcgctggcgcaaaagctattattcctga

SEQ ID NO: 347335 - DNA, 981 bp, Pseudomonas aeruginosa
atgaataatctgctcaacactcccgagcacgcctcaggtgttgcactcgccgagcgccggctgactgcttccgagtttcagaagttgaccaaggttccggctgcggtcgagtggtttgctaacctggataacccgcgcacacgccgcgcttaccagggcgatgtggaggacttctgcagctttcttggcatccacgccccggatcaattccgcgccgttacccgcgcccatgttcttgtctggagaggccaacttgagcaaagaggtctttcaggggccactatccgccgcaagctagcagccttggccagcctgttcgatcatcttctcgaagccaacgccgttgcaggcggtaacccggtgcatggggttaagcggccaaagattgaaaccaatgaaggcaagactccggcccttggtgatcaccaggccaaggcgctgcttgaagcacccgatccggccaccctgcaggggctgcgtgatcgcgcaattctggcggtattgctctaccacggccttcgtcgcgaggaggccgcccgattgaccatccaggacatgcaggaacgccggggtatcaagcacctgcgtgttcacggcaagggcggcaagttgcgctatctgcccatgcaccctatcgcgctggagcgtatccatgcgtacctggagatttccgggcatcacttggagcaacctgcggtaccgctttttttgccattgcggggtaaaactacgggctcaggcctgagtgcgggtggcatctatgccctggttgggcgatatgcccgggcagcaggcattgaggtagatggacttggtgtacatggtttacgggcaacggctgcaaccaacgcacttgagcatgaggcagacatcgccaaagtgcagaagtggctgggtcacgccaacatcagcacgacgaaaatttacgaccggcgtggattgcgaccggaggactcgcccaccttcaaggtgcgctattga

SEQ ID NO: 347336 - DNA, 2007 bp, Pseudomonas aeruginosa
atgccccgtcccaccgatagcactaccagcctctccctgaccgcctcggcgctggcagccctgttcccggagcgtctggccggggaagaacgcctgaacgcactgcccggttgggaactgctgggctacagcgccagccccttagccctggacggcgcaatcgccacccatctcaccgccaccctgcacaacgacgccgaccagcgtccgctcgacggcctggtcgcggagatccgccaactccccggcgatgccagcgccgagcgctaccaggtgctgttgcgcccctggctctggtggctgacgctggccagcaacaaccgggtgttccagaacctggccaccagcgacatcgtcacccaggtcttcgaccagcacggcttcagcgactaccagttgcagctcagcggcagctaccagccccgcgaatactgcgtgcagtacggcgagagcgacctcgccttcgtctcgcggctgctggaggaagacggcatcttctggttcttcacccatgccgccggcaagcacaccctggtgctggccgacagcaacgacgccttcccgccgattcccaacggcccgcaagtggcctacctgggccaaggaatcggcgtgcgcgagttgcagggcgtgcgttcggcgcagtacagcctccaggcggtatccgggacctacagcgccaccgactacgagttcaccaccccgggcacctcgctgtactcccaggccgaggcggtttccggcgccgccggcgtctaccagcaccccggcggctacaccgccaaggcccagggcgacagcctgaccaagcaacgcatcgacggcctgcgcagccaggagacgcgcttgatcggcgagagcgactgccgctggctggtgcccggccactggttcaccctcagcgggcatgatgacgattcgctgaatatcgactgggtgctgacctcggtcacccatgacgccagtcacgcgcactaccgcaaccgcttcgaggcgatccccaaggccaccgcctaccgccccgcgcgggtcacgcccaagccgcgcatgcacacccagaccgccctggtggtgggcaaggccggcgaggagatctggaccgaccagtacggccggatcaagatccagttcccctgggaccgcgacggcaagaacgacgagacctcctcctgctgggtgcgcgtggtgctgccctggagcggcaagggcttcggcatgcagttcgtgccgcgcatcggccaggaagtgatcgtcaccttcatcgacggcgacccggaccgcccgctggtcaccggctgcgtctacaacggcgacaacgccctgccctacgcgctgccggacaatcagacgcagtccgggatcaagaccaactcgtcgaagggcggtggcggcttcaacgagctgcgcttcgaggacaagaaggacgccgaggaagtcttcctccaggcgcagaaggacctcaacgtcaacgtgctcaacgacagcaccgccagcatcggccacgacgagaccctgacggtgcagaacgcccgcacccgcacggtgaaggaaggcgacgagaccgtcaccctggagaaaggcaagcgcacggtgaccatccagaccggcagcgacagcctggatgtgaaggacacgcgcacggtgacggtgggcgccgaccagacccacagcaccggcggcaactacagccacaaggtcagcggcaacttcgagctgacggtggacggcaacctgaccatcaaggtcagcggcaccctcgccctgcagagcggcggcagcctgaccctgaagagcgacgccgacctcgccgcccaggccggcacctcgctgaccagcaaggccgggacgtcgctgaccaaccaggccggcacctccctcaccaacaaggccggcaccagcctgaccaacgatgccggcgtcagcctgaccaacaaggccggcgccgaacagacggtggacggcggcggcatgctgaccatcaagggcggcctggtaaaggtcaactga

SEQ ID NO: 347337 - DNA, 987 bp, Pseudomonas aeruginosa
atgacgctacgagtagcttccttttttgccggaatcggcggctttgatctaggcttcgagcgggcgggcatggaggttgtgtggcagtgcgaggtaaaccccttctgccggaaaattcttgctcagcactggcccgacgtgccgcgtgcgtcagacattacaaaggtaagcgctgatgaaattccagatgccgatgtttgggttggaggattcccatgccaagacgtctcagtcgcacgcatgggcccccgaagcggactgcgcggaaagcgctcaggactcttctacgactacgcagcacttattgagcgccgccgcccccctgttgtcgttatcgaaaacgtaccaggtctcctctcttcccacgaagggcgagacttcggaatcgttattcaaacgctggccgacctcgggtatggcgtggcatggcgagtgcttaacagccgctacttcggagtcccccaatctcgccaaagagtctttattgttgccacttatagagacccgggacttgccggaaaaatactttttgagccccaatgcagcgaagggagcgattcgtcgagcggatcaaatgggaagaagtctatttccccctttaagacaagctatggagattctgtcaaaggcccaatcgtccaaggaatagcgtattgtctttatgcctgttctgcgcgacacaccgggactgactggagtcgcacttacgtatcatacccagaaggccgggtacgcagactcaccccgcttgaatcggaacgaattcaaggctttccagacaattggacacgcccattagatgccgatgatgactcggacaaaatcgactcccttcgataccatgcagcaggaaatgctgtaactgttaatgttgtcgagtggattggtcatcgtgtatatgcggcactaatggaaaacaaaaaaccatctaagcctaaagctcgacgccaacgtcctcatacaagcgagttagcagttcgggcttag

SEQ ID NO: 347338 - DNA, 1176 bp, Pseudomonas aeruginosa
atgaaaattcaaaaaagatccagtaacggtcgcggtgaatatgaaatcgctggtagcattgatggtattggtacatcggctattttagcgcttccactggttattgatgcaggtaatacattcggtcaattgccgaccggaatcaggctgcttactcagggcggaaagcctcgtttaaggcttattgaaaagagcggtattcatatacagcgacagcttgaagctctattgctaatgccgaagtctaggcgcgaggaaagtcagcttgaaggtgggcagccggttctcattgcgggcagatatattctatctgaggttgaggtagtcgagcttgaagtatttgaaaatcgcgccgtactaaaactgggcggaatcgagtgtaagaatgatagtggcgttcagcaggttgacttttctaagagaatggcggcactagatcgcttgtatttgaatgctgataaattgcctgagcatgtatccgcagcgctacttaagcatcgcgactacattgttcggactggggcggttgataaaggggctgagcggctagttcttgaattaattcaggccacagaagaggctgtcagggatagtggtgaagtcttaatttcaggtgaagacccggttccgcttctgcttgatcttcttagtaccttaccgactgtagatatcccattcatcgacgagatcgatcctagggatattgagatcaggcgccgtatagctgatcgttggcggcttcagaaagatcgcgggccatcttcggttaaatttagaaaggctgtcagagacgcatatgactcgacttgcttgttttgtgggttgaagttggttgcctctgaggctgtacgaatcccgggtgtagatgccgcccatattgttccttggtcggaatatgatgctgactttgtccataatggactttgcctttgtaagttgcatcactgggcttttgatcagtatttgttagcgctgaagtttgaagaagtttcaggctacgagattgtagtcacagagctggcgaagcaagcgtatggcccagaatcgagtgttttgaatcacttcaatgctttggctgggccaatacaagatgcaagattgcctgccaagttagcagataggcctaagcccgaactgctaactcgcttgtatgaggacgttggcgtcgagctttag

SEQ ID NO: 347339 - DNA, 432 bp, Pseudomonas aeruginosa
atggattacagatacggcagtcatacggtctaccagatcgagtatcactttgtttgggtgactaagtaccgatacaaggtgctcagcggtgaggttgctgagcgagtgcgagagctggtgagacagacgtgcgaagcatttgaaattcggattgtgaaaggtgtggtgagcaaggatcacgtgcatattctggtgagcagtccgccgaatttggcgccgagtgagatcatgaggcggatcaaggggcgtacggcgagcaagcttttcgaggagtttccccatctgaaaaagcgctattgggggcagcatttttgggctcgcgggtacttttgcgcgacggttgggcagatgacggaagagatgatcaagcagtatctggagcatcattttgagccgagcccgaacgataatttcaggatggagcctgactga

SEQ ID NO: 347340 - DNA, 450 bp, Pseudomonas aeruginosa
atgagcctcttcagcgaacttgtagcccttttcgcctcagtttttcagccaaaacccgtgtacacgaccatcatctatcccagccaaggaaagcctgtcgtggtgcatgacggcctcagtattcgccatgagcgccgatggcaactggccgaatcgctgttggaggacgaagtcccgagcttctccttcagctctctgcacaacgatcccacgaaccaaaccgagccggtcgagctgtttcaagcagaaagtttctcctcggatttgctcgccagcagcttccagcccatggacaccatgtgcgtcaacccagccaacggcatgcccatgatggacagttgcttcgatgttatggggaacgcatatggcactgacatgatgagcgacagtatgtcgttcgatcatgccagtggccttggcagtagcttttcggccttcggttttgactga

SEQ ID NO: 347341 - DNA, 675 bp, Pseudomonas aeruginosa
atggctgagactgaaaatgcgccaagctggctaaatgaactcgatcgcaaagaggcggagtgggcagcgagctacctgtcgaagcgatggcctgaagggcttaaggccaagcccagcccgacaccccccatgctttaccactcgctcgccgagtcgatccatgagctagaaaaatatgcagcaggcgtaaagctcattgaacggatgagaaactccatcagacagcggcgctatagactggcggaaggcgggcgaaaaacgtgctctttcacgcttccaacagcaaccaaatccaagctcaaggccctggcgaaaagacacaaaactactgaaacaggcctgattgaaaatctgatcgaggcagcctctaagcaggtctcgatatacaaagaggaagctaggcacgaatctcaggcaatgaaagccatacgcaacgcacgcaagcttgaacaagagctagccaagacccggattgaagaaaccaagaagcagctgcatcactgcatgaaacagcttgcgcagtgggagacctacctaggggaagcgctccccgccctcccccccgagaacgaagcggccgcaacgattcttgcagagcagcgcctgcgtataatccaagaggccatcgacgctgctgtagccaagcatgcaatgatgagcccaagggccatctga

SEQ ID NO: 347342 - DNA, 1293 bp, Pseudomonas aeruginosa
atgatagccttcttgaagattgatcttgaggctgaatcaagattcttcctgcaagcatttctttgcatgaatgacttgagtctggaggccccttacaagatcaagtcggtagcgaagcagctctgcttgacggagagatttgtccgggacgcatcgcgagagttggtcagggctagacttctgagggaaagcaagcaggaaggcggggttgggcgtcctggtgttggatacgttgcctcggagcgcttgcttagagtgctcgccgaagtaggcagagaattcacccaccaagagctaatgcttcgcctttttcttgagccggacatttacgcagttggagagggtgaaacgtcggtatcgacagatcaggaggaaaagtcatcccgctccgctacccgcaaagacggtcgacctgctgcccctggtgccaaggggcggctgggggctgcctcccggatgttattggccgctcttctcagcgaggctgacgagtgcggtgtcgtgactgggcttggagggccgaggctcagggccatgactggactcgactccttatcgatcaagcatcaattgaagcgtcttttgagcttggggttcgttcgtagctatgtgccggggctttcgaatggggttttcgttggctcaaaggtcacgagcatttactacctgaaccttgatcacccgcagctccgtgtgaagcagaggcagcggggattggtggtgtacgcaactcaggggccgaacaagtacgacatgcttgaatcggcaatgcctacgatagaggcactaaaagtattggggcctagagctttggatatgctctatcacaagctggcaagccatacatcccacctgctgacggctatttggacggaccctgagtacgagcttgttgacgttaaagcggcagtttttgaaaggattgctggtgagctgggtgggccactgactgttggtgctgatcggggtgtgcctggcccatgggatggcttgatggaaagcttccatgctgaagcgtgtagatgggccgagagcatctacaaagggctgcgccgaatgaaagtttggcaaggatacaggccccagctggttagactcatccctgctccagtcagaagcgatggctggagcattgtgtcgctggttgtctatccagcccccagagccagcaatacatgtctttgggtatgggacgtgcgcggagggaggcttgactcgtatgtgcgagaggatgcattggacctggcgctgcgctatgaggtggcgcttttgaccaaggtcaaggcgccctag

SEQ ID NO: 347343 - DNA, 972 bp, Pseudomonas aeruginosa
atgaacaaccgcaagcacaacacccacctctcacagtccgacatagccctgaagatcgaatcactcgtccaggctatcgagcgcagcgatacacccgcattccggattacgcacaaacggtcaggctatgagcaggtcgagcagaccagactctcccggtacttcaccaacgtccagcagatgtacaacctgttcgatgaccgagtgccgtacgactacagcgaacacctgttagcgttccgggaggcctgtgacgacattggccttcagcgttcacccaatggccctgtctgcatgagtgagacggggacgtactggctcagtcatgaacagagcatgaacgtcctgaccgaacggatccgtgagttgacccgccagcggtggtatcagcgcaaagctggggatcgagcctatgaggcacgcaagcaagcgaaggagatcgctgcctactcggatgcagtgatcaatcgttactcccgcactacgatcgtcagactggacttgtactaccgccctgaagctcaggtcaggttacgagtcgagcaggtattcgatcacctagacgatctgatctatgagcacgaccgtcaccggactttcgagcacctgattggctacacctattcagtcgagcaaggagatcgcagtgacgggagggggtaccacatccatgcggcctacttcttcaatggcaaccaggtatgccgggatgtctggaaggcgattgagatcagtgagctatgggaggaggtcacgcgtggtcagggctatgcccacagctgcaaccatgagaaggaacggtatggtgacgagtgcggtatcggcctgatccagcgggaggatcagtcgaaacgggcccatgtgcacaaggcaatgaagtatctggtcaaggacggtcagcacctgcgcttgaagcctgcgggggcccgctgcctgcgtaagggcactctgaaccgtgttcggcggcgatga

SEQ ID NO: 347344 - DNA, 210 bp, Pseudomonas aeruginosa
atgagcaccgaagaaatcagagagctgctgctagacctgcaagggctcgctttggagacggagcaagctgagcaggcgattctgcgcaaagcccagaagcgtctgggccaactgtctgaggcgccatccagcgaaattgaaaggcgtctgcttcgaggcgtgatatatcgagcggaagcggcactagggctgaaaagtcagatcgagtag

SEQ ID NO: 347345 - DNA, 3747 bp, Pseudomonas aeruginosa
gtgcaggcactgccttcggccgttagggctcagggcagcctgcctcgcctcgaagagcggagcgccgttcttgccgagcctccggttgggcagccggcgttgcaaaccctgccgtcggttgcgcgcgttgagggcgtgcccagcaatgccacaccgagcaacagccacaagtatctgatcgagaccaacccggcgctcaccgagctgaagcagttcctcaactcggactacctgctcggtggcctgggtatcaatccggacgatagcaagaagcgcctgggcgacggtctatacgagcagcgcctggtacgcgaagcgatcgtccagcgtacggggcagcgcttcatcgccggattgaacagcgacgaagcgatgttccgctatctgatggacaacgccatcgccagcaaggacgtattgggactgacccctggcgtcaccctcagcgccgcccaggtggccgcgctgacccacgacatcgtttggctggaagaagtcgaggtgaatggcgagaaggtcctcgcccccgtggtctacctggcccaggccgaggggcggttgggcccgaacggcgcgctgatccaggggcgcgacgtgaacctgatcaccggcggggacctgaggaacgccggtaccctgcgcgcgcagaacgacctcagcgcgacagccggcaacatcgacaacagcggcctgatcgaggccggcaaccgcctcgacctgctggccagcggctccatccgcaatgaccagggcggcatcattgccgggcgcgaggtaagcctctccgcccttaccagagacgtcatcaatgaacggacggtgacccagcaccagtcctcctacaggggaaccggtaccactgaggcatttgccgatagcgccgcgcgtatcgaggctgcgcagaagctgaccgtttcggcaggacgcgatgtagccaatattggcggtgtcatcgacagcaagggcgacctcgccttgcaaggcggcagggatgtcctggtttcggctgcggtagcggagcggggctggacggcaggaagccaggtataccagacccagacgacccagatgggcgccgaggtcgtggcggggcgcgatatcagcgtcagtgccggacgcgatatcagcgtcgcgggcagccgcatcgacgctcgtcgcgacgtgacattcgaggcgggtcgcgatgtgggcctggtcgcggctgccaacgaagagcatgcctatggcaagaccaagaaggtcactttccaggacgacaagatcacccagcaggccactcgcgtggacgctggcggcgacctggcgatcaatgccggacaggacctgcggctggtcgcgagccaggccagcgccggcgacgaagcctacctggtggccggcgacaagctggagctgctggccgccaacgacagcagttactacctctacgacaagaagagcaaaggcagcttcggtagcaagaagacccggcgcgacgaaatcaccgatgtgacggcagtgggcagccaaatatccagcggcggcgacctcaccctgctcagtggcggcgaccagacttaccagggcgcgaagctggaatcgggcaacgacctggccatcgtcagcggcggcgcggtgaccttcgacgcggtgaaggacctgcaccaggaaagccacgagaagagcaagggcgacctggcgtggcagtcgtcgaagggcaagggccagaccgacgaaaccgtgcgccagagccagctcgtcgcccaggggaatctggcgatcaaggccgtggaagggctgaagatcgacctcaagcatatcgaccagaagaccgtgagccagaccatcgacgcgatggtgcaggcggatccgcaactggcgtggctgaaggaggccgagcagcgcggggatgtggactggcgcatggtgcaggaggtgcacgatagctggaagtacagcaactcggggttaggggctgcgccgtcactggccattgccatcgttgcagttgcttacctcggcccggtgtatggcgcaatggccagcaacctcgccattggcaccatcaacaatggcggtgaccttggcaaggggctgcaacaggccaccagtgctgacagtctgaaagggtacgccatcgcagcggccacggcttatctcgtcagcccgcagttggacaaggctttcggcgtatccagtgacaacatcaacaaagtcaccaaaggattcaagctcagcacagttgagggaatcggtggatttgctgcctacagcattgcccaaggctttgctcaatcggtcatgcagcaggccgcctatggcggcagctacatcgacaacctcggtaatgccatggcaggtcaggcgcgcaacctgggaatggcggtaggtttcaatttcattggcgactcggtcaaataccctgatggcagcccgccgaaaatcatggctcacgccctgatgggaggtctgctggccgaagcctccggcagtgacttcaagactggagcggcggccgctggtgccaacgaggccatgatcaacctccttgggaaaatggtaggtggcgatcaaaacctcgaactgatggcctcgcaactcgttggcgtagccgcggcaagtgcggtcaatggcgatgtgagtctgggcgccgagatcgccaaaagcgggacggcgtacaaccggcagctacacccagatgaaatcaaattcgcatcggatgtgaagcgcgtcaaacgttatgcccaggaaaatgggctgagcgaggacactgcccgcaaagagcttctcagcacggccgccatgatggtggacaatggctggagccaggccttggccggcacagacatcaacgctgcccgggctgctcagtatctgcgtacggagctgggcacaggcccggacagtaatctcttccaggtgacccaggctgactactacaacgagcgggtggggctgacggcgctattcaagaacaaggaggccctgaccagcgttctggaaaacatagccctagcgaatcccgcgagctatacgagggaccccgcgaaccgtgcggaagtgctgaatgccaaaggtgaaggtagccaagcgggctttgggctggcactggaagggatcgtcagcgcgccttcaaaaactgccttgtggttgatgggtgcgctaacctgttcaagctgtgcggagcgggatatccagaacgcttggaactcggttgcctcgttacctgaagacatccgtatgaaaggctatctggatgccttgcacaccatgcaaggccagggtgccagcgtggtgcgggacaacgccgcgagttcgactgcattgggagttgaggttgggctggccattgatggagggttggcaggggcaggcaagggcgtcgttacggatggtccgaaagaaatacctaaagacttaggcaaggtttcttttgatgcgtctaatggtgtgggaactatttattcccccagagtcaccttgaattccggtgagataatatttgatgggttctctgtaggtacttcgaagggactcattggcgtcggggctgatggggcggcagaattggtcgggccattgagaaaaatgctctcttactctcagtcccaaggcgcgcagacaattaccttgaaggggcactatgcatccgagcaaggatcgatgttaggaaccggcagcgttaataatgtgaatcaaaaattttcctttagttttcccgcaactactgatgggttgaaagcgttcttgaaggagctcgggaagtga

SEQ ID NO: 347346 - DNA, 300 bp, Pseudomonas aeruginosa
atggccctgaacctgatcaacaagctctacggcatcgagcgctacctgaaagatgctaacgacagcaagcgcttcaccgcccgtctgcaacgcagccagccacagctcgaccagctcaaagcctggctggacaagatccagccagaggtcgccgggcaaaccgccttgggcaaggtgatgaactacctggcaggcaactggaacaggctggtgcgctacatcgaaggtgggcatctgccgatctacaacaaccgcgccgagaacgccatccgtcggttcgttatcgagcgcaaaaactga

SEQ ID NO: 347347 - DNA, 354 bp, Pseudomonas aeruginosa
atgagtcaagtattgtgcagacgctgtaaccgtctaatggtaccgcgtgtaattttcagccgtagcatttccgctggttacggctggcgtatcggcggtggaaagccaatatccaactgttgtcctttctgtctctcggagcactgggattcagatacgcctgtaagcgagctacgtggcagtgtcttgatgaaaatactcagcattccgctgacaattattctgtttacgctggtgttgagcgtgtttatgaaggtaagcaattacttcggtggttcgtctctggtcgagtggatgggcataattgtcgcggttttggctacttacaaattcggtcgctggttcgtaaactga

SEQ ID NO: 347348 - DNA, 141 bp, Pseudomonas aeruginosa
atggtagagagcaaccagcccatgggtgcgggcatgctggtccgtaaaatcgaactgatccggagtgggctcatcgtcgtccgctgccggggactctgcatcctcaagcaatccttccgaaagaagctcctcatcagataa

SEQ ID NO: 347349 - DNA, 957 bp, Pseudomonas aeruginosa
atggccaccgaattcggcaccgccacgaaccaccagaacctgatcgagcgcctcgtccagttcctcactgcgaaccccgacctggtcgcggctgggcaggcctacgagaaggttttcgacaacagcatccccgcgtccggcactgcgatagccgtgcgccaggtaacgctgcgcgcccccggcctgggcggcaccgatagcatctacatggggattcagagctacggcgataccgccctggactactacaaccttcgcctgatgggcggcacggcgttcaatcctggagcaatcccgcctggcggcgactactggaccgcgtttaccaactacagcccgcgggtccaggcactgctgtggaatcagccgatgccctactggttcttcgccaacggccgcaggttctggatggtcgtcaaagtcagcacgatctacgagtcggccggcgccggcttcatcctgccaccttgtccgccatcgcaatatccgtacccgctcgccgtggtgggttcctaccgtggcgacgtcgccacccgctggtccgacgtgagcgaccggcaccgaggcatcagtagcccgcttgagcgcagttgctatgtccgcgacccggcgggccgttggctgggcttcaccgtcgcatcgaacagcaacaacgagtccgactacaacaatcggaccctgctgccgctgggctgcgcccgctatgcgggtagtagcgacactgtgatcaaccagctccgcgactctttcagcaagttcccgctgaaagctttgcagttcgtcacccgcgaaaccgagggtcgccgatacctcggtgacttcgacggcgctttctatgtgccgacgctcaactcaggcgctgaagacgtgatcgtcgaggacggactggaccacgttgttttccaaaccgcctggcgctccggcaacccctggctctacgcaatcaggaaggactga

SEQ ID NO: 347350 - DNA, 924 bp, Pseudomonas aeruginosa
atggcctatttcacaggaacagcgaacaacccggccgacctgctgggcaagctgcgcgttcacgccgaaaccctcggctgggtcaccgaccgcgcctcggcatcggagtggctctgtcacaacgcggatggatactggtcattcagtgccggggccaatcagttccaaatggcgggcaatacggggttcgataacggcctggcgtggaacgcgcagccgggcaattccgtacagaacaatccctactcgtcgaaacaaccaaccgttgcccagctcagcggcgggccgttcacccgctaccacttgttcgctaccgctgcctatctgcacctgcacgtcgaaatcgcagctgggcagttccgtccggtgatgatcggctccctgaacaaacgtggcgtcggctatacgggcggtcagtatgtctgcggctcggtcatctattccgctggacaggcgttgaccaacaactggtcgtcgcatcctttcgatggctaccacattcaatacagcgacggcggaagcgtgttgcggctggatagtctcgatgatgggccgtccccggagtggctgccgttcgactacagaaccaacatccctcggcgcgtcgtcggccccggtcgcggaaactacagcagtcagtaccatcccgacgtggggctgatcgacgcgagcgcaaacgagctgaacagctcgaccacccctgtgccctgcgccatctatgcgttcggcgctcagcagcgctcgcggtatgtgggcgaggtgccggacttcgggctgtgcaacatggccttcctcgcgcctggcgatccgttggtggtcggcagcgacacctggcgcgtgtacccgctgctccagcgcggaaccgctaccgatttcggcagcaccagcgcctgggtcggctactgcttccgggtgcttgagtga

SEQ ID NO: 347351 - DNA, 1149 bp, Pseudomonas aeruginosa
atgagtcttaccatggggcctaataccggcctactgatcaacggggcacccggtgaggggcattacaacgaccttatgcgcctgttgcgctgggacgacttcttgcgccagccggtcgtcaagggccgcgtcgccacgctgccgacttccggccaggccgagggtgacacttacattttcaccggggccggggcgaaccagaaccgcttggcccgctggtgggcgactggcgcgaccacgcccatttgggagtacatgccgcccaggctgggctggcgtgtccaggtcgccaacgagacgacgccgagcggccaggtcaagacctacgagtattccggcagcgcctggactgagctggtgggcggaatggccgacgcgccgagcgacggaaagccatatgcccgcgaaagcggcgcttgggcggagctgggatcggcggcgaaatcggcgctaaacgttctgccgttcatgaacctgatgcccgacatgggtcggttcgcgggaaccgcagccaatccgctgaatacgatgttcacaacgtcatggactccaagcaccttcatcaatggctggaacggcgccaccctcgcagatgggggaaagttctcgttcgacaacagcacgaacggcggggcggggccggcgctcaatgcgcgggtccaggcgctgctcacggcaatgggccgcacattgacgtcagtgtcccgatacggggtcgagttcttcaccaccgttctgactgcgggatcgcagacaactaccggctcggccggcgcggatggggtcacgcggtatctgtgctgctccaacggcagcaaaacagttttcaacgcgggcgcatgggcgacggtcgtcatgtggttgcgggtcgaaagcggctcggctcatatctcgtcggcgccctatacgacccacaagctctggatcaatggcgctgccgctgcgcctggcgtggtgcttcctgctaatcaatgggtacatctgcgattctcgatgcagtcatacaacggctatgacaacgcgtgcccgtatctctacgcatccgcaggggctcagatcgcgctcgcctgtccggcgtggttcggtggcctcgtcgatccgggcatccatgttgcacccattcttacaatcaacggagcaagcgcatga

SEQ ID NO: 347352 - DNA, 579 bp, Pseudomonas aeruginosa
atggaatcgctgttcgtccctaccctgatcgttgccctcgcggaaatcggcgacaagacccagttgctggcactcctgctcgcggcgcgtttccgcaagccgtggccgatcatcgccggcatcgttgccgccaccctggccaaccatttcgctgccggcgcggtgggcgcctgggtcgccagcttcttctcggaagctaccctcagctggatcctcgccgcctccttcatcgccgtcgccctgtggacgctggtaccggacaagctcgacgacgaagagtccggactgaagaaatacggccccttcctcaccaccctgatcgcgttcttcctcgccgagatgggcgacaagacccaggtcgccacggtcatgctggccgcccagtatccgcatttctggctggtggtgatcggcaccaccctgggcatgctgatcgccaacgtaccggtggtactgatcggcaacctggccgccgataagctgccgctgaccctgatccgccgcctggccgcggccgccttcgccgcacttggtctgtacgccgcctggcacgccgcgcaattgaccggctggctctga

SEQ ID NO: 347353 - DNA, 261 bp, Pseudomonas aeruginosa
atgtcgtcgcagcgtgctaccttcgtcgggctggtggacggcctggtgcgccgggacatccgccgcttcggcgcgggacgcgaatcggggttcatctatcaccgcgccagggccagcctcatcccgctggccgtactgccgtgggtgacttacctggcactgccggtcagcgtgaacccgctgctgatcctgctgcccagcaccgcactgctcggcgtggcggtgtgcattgcggcggcgacgttcaagaagtatctctag

SEQ ID NO: 347354 - DNA, 612 bp, Pseudomonas aeruginosa
atgaacacagacaccatcgccaattccaatgcggatgaccccaccaaagcactgtgttcgctgagccaaaattggtggcttttcgcgctgcgtggcgtcttggcattgattttcgcagcccttgctttctggatgccacaatcggctctgttggccatgaccttagtgttcggcgcattttccttggtcaatggcgctttcaacttggttgcagcggtgcgccatatccagaaaaaagagcgctggggctggctgctgttcagcggcattgtcggcatgcttgccggcgtcgtcgtcctggtcgcccctttggtcgccacgatggtcatggcttcttttttatgggctagcgtgggggtctgggcgattttcaccggtgtgctggagatatccgccgcggttcggctgcgtcaagaaatcaagggtgaaatctggcttgccttcagtggactgctctcgatagtccttggcgctatcgtcttgtggatatttttctcccgtccggccgagtcattcctggccgcaggctggctgctgggcttctatgcggcagtctatggtgtcacgcttttgttcttgagttggcgtcttcgcagaacgcgccagggataa

SEQ ID NO: 347355 - DNA, 564 bp, Pseudomonas aeruginosa
atgaccgtagaccgcatcggcgaacgcctgcgtcgctatcgccgcgccgccaagaagaccctgcaccaagtcgccagcgaatccggtctcaccgcgagcttcctctcccaggcggagcgcaacctcaccggtgtatcgatctcttccctggccaacatcgccaagtcgctgaatatcccgctcaatgccctgttcgaccaaccggcacagccccagcccgactcccacgaaggcgagcgggtacgctacaccatcgagggccagccgctggcctacgaacgcctgtccagctccttccccggcaacctgatcaatgcggtcaagatgaacatgccggtgggctaccagtcggagctgatctcccatgagggcgccgagttctcctacgtcctgtccgggcagatcgtctacaccatcgaggggcgccagtaccccctcggcgccggcgactcggtgcacttcgacgcgaccaagacccattgcctggccaacgtcggcagcgatgtggcggaagtcctgaccatcaccaccatgggcctgttcgacgaccatccgacgccctga

SEQ ID NO: 347356 - DNA, 1218 bp, Pseudomonas aeruginosa
atgaccgtgggtgttggcgggagtacccctgcgcaggcgctggagcgtctgcggaacatgatggacggcgcgcagccgatcggcctggcgtcttaccgtgcgcgaatcgccgcggcccaggcgtggatgggcgagcatggcatcgccgcggcgtacctgcatgcaggcagcaacctgcgttacttcagcggcgtgcaatggcaccccagtgaacgcctggtgggtgcgctgctgcccgccgagggcgccctcgaataccttgcgccggccttcgaggaagggacggtgcgcgacttccaggtggtcgacggcgccatccacacctgggaggaacaccaggatccctaccgcctgctgctcgatcgcctggaggcgctcggcgtgggtgagcgcagcacggtcgcactgtgtccgagcctgccgttcggcatgttcgagcgcttgcgccaactggcgccgggcaggaacttcgtcagcgccgcgccgctgatcgaccaggggcggatgcgcaagtcggccgaggagctggcgctgatgcagcgggccaaggacatgaccctggaagtgcagaaggccgcggcgagcattctccgcgaaggcatcagcaccaccgaagtcgccgagttcatccaccaggcgcaccgcaaggtgggcgcgcccggttcgaccttctgcatcgtcctgttcggtgccgccagtgccttcccgcatggggtgaagcatgcgcaggtgttgaaggatggcgacatggtgctgatcgataccggctgccaggtgcacggctaccagtcggatatcacccgtagctatgtgttcggcacgcccagcgcacgccagcgcgaattctgggggatggagcgcgacgcccaactggcagccttcgaggccgcgcgtctgggccagccctgcgaggcggtggacgccgccgcgcggcgttcgctggaggccaacggcctggggccggactaccgcctgcctggcctgccgcaccgcaccgggcatggcatcggcatggatgtccacgaaggcccgtacctggtgcgtggcgatcgcacgccgctggatgtcggcatgtgcttcagcaacgaaccgatgatctgcgtgcccggcgagttcggcattcgcctggaggatcacttctacatgacggaggaaggaccacgctggttcacccaaccgagtccgtccatcgacgatcccttcggcctcggcggctga

SEQ ID NO: 347357 - DNA, 1599 bp, Pseudomonas aeruginosa
atgcgaccacgctctgccctgcgctacagcctgctgctactcaccttcgccgccagcgccgccatccaggcccagccgaagaccctggcggtgtgcaccgaagcggcgccggaagggttcgatccggcccgctatacctccggctacaccttcgacgcctcagcccatccgctgtacaacgcgctggccgcgttcgctccgggcagcgccacggtgatcccggccctggcggaaagctgggacgtctccgctgacggcctcgtctacaccttccgcctgcgccagggcgtgaaattccacagcaccgagtacttcaagccaagccgcgaattcaacgccgacgacgtgctgttcagcttccagcgcatgctcgatccgcagcaccccgcccacgacctttcgcccagcggctacccctacgccgacgccatgcaactgcgcgacatcatcgagcgcatcgagaagatcgacgagcaccaggtgcgcttcgtcctcaagcacccggaggcgccgttcctcgccgacctggccatgccgttcggctcgatcctctccgccgaatatgccggccaactgatcgccaggggcaagggcgacgaactcaacagcaagccgatcggcaccggcccgttcgtcttcacccgctaccgcaaggatgcccaggtgcgctacgcggccaaccccgactactggaagggcaagccggccatcgaccacctggtgctggcgatcaccctcgatcccaacgtgcgcgtgcagcgcctgcgccgcaacgaatgccagatcgccctgacgcccaagccggaagacgtcgccgcgttgcgccaggacccgcaactgacggtgctggaagaagcggcgatgatcacctcacacgccgcgatcaacacccggcacgaaccgttcgacgacccgcgcgtgcgccgggcgatcgccatgggcttcaacaagtcgtcctacctgaagatcgtcttcggcgaccaggcccgcccggccatcggcccctacccgccgatgctgctcggctacgacgacagcatccgcgactggccctacgaccccgaacgggccaaggccctgctgaaggaagccggcgtcgccccggacacgcccctgaacctctacatcagcaccggcagcggccccggcggcaacccggcgcgagtggcgcaactgatccagtccgacctggccgccatcggcatccgggtgaacatccaccagttcgagtggggcgagatggtcaagcgtaccaaggccggcgaacacgacatgatgctctacagctggatcggcgataacggcgacccggacaacttcctcacccacaacctcggctgcgcctcggtggagtccggggaaaatcgcgcgcgctggtgcgacaagggcttcgacgaagccatccgcaaggcgcgcatgagcaacgacgagagccaacgggtagcgttgtacaaggaagcgcagcgaatcttccacgagcagatgccctggttgccgctggcgcatccgttgatgttcgacgcgcaacgcaagaacgtcagcggctaccgcatgagcccgatgtcggcgcgggacttttcgcgggtgaagctggactga

SEQ ID NO: 347358 - DNA, 1176 bp, Pseudomonas aeruginosa
atgggcctggacaagaacatcgccaggatcgagaagctcgacgagcacacggtgaaattcaccctcaacgaggtcgacgcggccttcatccagaacctggcgatgcccttcccatcgatccagtccgccgaatacgccgcgcaactgctcaagcagggcaaggccagcgacatcaaccagaagccgatcggcaccggcccgttcgtattcagccgctaccagaaggatgcgcagatccgtttcaagggcaacaaggactactggaagccggacgaggtgaaggtcgacaacctgatcttcgccatcaacaccgacgcctcggtgcgcgcgcagaagctcaaggccggcgagtgccagatcaccctcaacccacgccccgccgacctcgacgcgctgaagaaggacccgaacctgaacctgccgtcgcaggccggcttcaacctcggctacatcgcctacaacgtcacccacaagccgttcgaccagctcgaagtacgccaggcgctggacatggcggtgaacaagcaggccatcatcgacgccgtctaccagggcgccggccagttggcgagcaacggcatgccgccgacccagtggtcctacgacgagaccatcaaggacgcgccctacgatccggccaaggccagggagctgctgaagaaggccggggtcgccgaaggcaccgagatcaccctgtgggccatgccggtacaacgcccctacaaccccaacgccaagctgatggcggaaatgctgcagaacgattgggcgaagatcggtatcaaggcgaagatcgtcacctacgaatggggcgaatacatcaagcgcgccaagggcggcgagcatgacgccatgctgatcggctggagcggcgacaacggcgacccggacaactggctcggcaccctctacggctgcgacgcggtggacggcaacaacttctccaaatggtgcgacgccggctacgacaagctggtcaaggatgccaagcgcaccaccgaccagggcaagcgcaccgagctgtacaagcaggcccagcacatcctcaaggaacaagtgccgatcaccccgatcgcccactccaccgtgtaccagccgatgcgcaagacggtacacgacttcaggatcagtcccttcggcctgaactcgttctacgaggtcagcgtcggcaagtag

SEQ ID NO: 347359 - DNA, 702 bp, Pseudomonas aeruginosa
atggagcagatagtcgtaaacggtgttttcataggtaaagtcgaagaaacctggggcggattggtcagcgcgatcgacaagctgccggtcgagcaggagttctggctgggccacgatggcctgcccggcgacgaacaggccgacatccgccaccacggcggcctcgagcgcgctcttcatcactatcccgccgagcactaccgctactggcgcaagcgccacccgctgaaccgctggcaactgccggcgttcggcgagaacatctcgacctacggcatcaccgaagccgaggtctgcatcggcgaccagttccattggggcgatgccctgctggaagtcagccagccgcgttcgccctgctatcgccagggccagcgctggaatcttcccgagctgcccgacgaattgcagagcggcggccgctgcggctggttctatcgggtcctgcgcagcggcatggtgactcccggggaccagctgaagctggtccagcggcattaccctgaactgaccgtcgcccgcctgttgcagtggtatttcggcgatcccctggagcctctcgggttgcgccagatgatggcctgcgacgcgctatcccagcgttggcgcaagacagcggcgaaacgcctgtccagcggcgtggtggaagactgggggccgcgcctgcacgggccgtcggattaccgggagcatgcctcttga

SEQ ID NO: 347360 - DNA, 180 bp, Pseudomonas aeruginosa
atgacccccgaatgctcggccctggtagatgccgatgatgcaggagaacagggttgggagttccaacgtctgcgcggtgtgctggctagaacgctgggatttacgagtgtggagatgctcgacgaacacggcacgacctatctgtgcttcagcggctgcaccatcgagcgaattgcatga

SEQ ID NO: 347361 - DNA, 963 bp, Pseudomonas aeruginosa
atggtcgtcgaggtatttttcggcatccagcgcggccatgcagccggcgccggcggaagtgatggcctggcggtagacgtggtcggccacgtcgccggcggcgaacacgccttcgatgctggtctgggtggcgttgccttcgctgccgccgtggatccgcaggtagccgtcgcgcatttccagttggtcctggaacaggtcggtgttcggcttgtggccgatggcgatgaacacgccggccagcgacagttcgctggtgctgccgtcgatggtgctcttcaggcgtacgccggtgacgccgctggcgtcgcccagcacctcgtccagggtggtgttccagtgcaggcgcacgttgccgttctcggccttgtcgaacagcttgtcctggaggattttctccgaacgcagcttgtcgcgacggtggatcaggtggacttccttggcgatgttggccaggtacagcgcttcctcgacggcggtattgccgccgccgaccacgcagaccacctggttgcggtagaagaagccgtcgcaggtggcgcaggcggaaacgcccttgcccatgaaggcttcttccgacgacatgcccaggtattgcgcggaggcaccggtggcaatgatcaatgcatcgcaggtataagtgccactatcgcccttcagtgtgaaggggcgctgttgcaactcggcggtgtggatgtggtcgtagacgatctcggtgtcgaaacgctcggcgtgctgctgcatgcgggtcatcagcgccgggccggtaaggccttcgacgtcgcccggccagttgtcgacttcggtggtggtggtcagctggccgcctggctggatgccggtgatcaccactggcttgagattggcgcgtgcggcgtacacggcggcggtatagccggccggaccggagcccaggatgatgaggcgcgaatgcttgacttcactcataaaaagactccataa

SEQ ID NO: 347362 - DNA, 1218 bp, Pseudomonas aeruginosa
atgaccgtgggtgttggcgggagtacccctgcgcaggcgctggagcgtctgcggaacatgatggacggcgcgcagccgatcggcctggcgtcttaccgtgcgcgaatcgccgcggcccaggcgtggatgggcgagcatggcatcgccgcggcgtacctgcatgcaggcagcaacctgcgttactttagcggcgtgcaatggcaccccagtgaacgcctggtgggtgcgctgctgcccgccgagggcgctctcgaataccttgcgccggccttcgaggaaggtacggtgcgcgacttccaggtggtcgatggcgccatccacacctgggaggaacaccaggatccctatcgcctgctgctcgatcgcctggaggcgctcggcgtgggtgagcgcagcacggtcgcactgtgtccgagcctgccgttcggcatgttcgagcgcttgcgccaactggcgccgggcaggaacttcgtcagcgccgcgccgctgatcgaccagggacggatgcgcaagtcggccgaggagctggcgctgatgcagcgggccaaggacatgaccctggaagtgcagaaggccgcggcgagcattctccgtgaaggcatcagcaccaccgaagtcgccgagttcatccaccaggcgcaccgcaaggtgggcgcgcccggttcgaccttctgcatcgtcctgttcggtgccgccagtgccttcccgcatggggtgaagcatgcgcaggtgctgaaggatggcgacatggtgctgatcgataccggctgccaggtccacggctaccagtcggatatcacccgcagctatgtgttcggcacgcccagcgcacgccagcgcgaattctgggggatggagcgcgacgcccaactggcggccttcgaggccgcgcgtctgggccagccctgcgaggcggtggacgccgctgcgcggcgttcgctggaggccaacggcctggggccggactaccgcctgcctggcctgccgcaccgcaccgggcatggcatcggcatggacgtccacgaaggcccgtacctggtgcgtggcgatcgcacgccgctggatgtcggcatgtgcttcagcaacgaaccgatgatctgcgtgcccggcgagttcggcattcgcctggaggatcacttctacatgacggaggaaggtccgcgctggttcacccaaccgagcccgtccatcgacgatcccttcggcctcggcggctga

SEQ ID NO: 347363 - DNA, 564 bp, Pseudomonas aeruginosa
atgaccgtagaccgcatcggcgaacgcctgcgccgctatcgccgcgccgccaagaagaccctgcaccaagtcgccagcgaatccggtctcaccgcgagcttcctctcccaggcggagcgcaacctcaccggtgtatcgatctcttccctggccaacatcgccaagtcgctgaatatcccgctcaatgccctgttcgaccaaccggcacaaccccagcccgactcccacgaaggcgagcgggtacgctacaccatcgagggccagccgctggcctacgaacgcctgtccagctccttccccggcaacctgatcaatgcggtcaagatgaacatgccggtgggctaccagtcggagctgatctcccatgagggcgccgagttctcctacgtcctgtccgggcagatcgtctacaccatcgaggggcgccagtaccccctcggcgccggcgactcggtgcacttcgacgcgaccaagacccattgcctggccaacgtcggcagcgatgtggcggaagtcctgaccatcaccaccatgggcctgttcgacgaccatccgacgccctga

SEQ ID NO: 347364 - DNA, 672 bp, Pseudomonas aeruginosa
atgcaggcgttgcgcagtggtgggggacgggtcctggtgggcatgctggcggcgggcctggtcgccttcggcggttgggcatggctcggcggcgacgccggggcgaaggcggcgcccgcgccggccagggtcccggtgaacgtggcgcgggtggagcggcgcgacgtcgagcaacaggtcagcggcatcggcacggtgacttcgttgcacaacgtggtgatccgcacccagatcgacggccagttgacccgcctgctggtgagcgaagggcagatggtcgaggcgggcgagttgctggcgaccatcgatgaccgcgccgtcgtcgccgcgctggagcaggcgcaggcctccagggcgagcaaccaggcccagctgaaatccgccgagcaggacctgcaacgctaccgcagcctgtatgccgagcgtgcggtgtcacgccaactgctggaccagcagcaggcgacggtcgaccagttgcgcgcgaccctgaaggccaacgatgccgatatccggcacgttgtacggcagtccgagaatcccggcttcctgccgaggcgcatgcgcccgtgcccgacgacccctgaagatgtccagtcagcccactctatagagttggcgttgtgccggaaaggcacatttcagtcccacttaacaatagaccgcagcgtttga

SEQ ID NO: 347365 - DNA, 381 bp, Pseudomonas aeruginosa
gtgccaaccaaagaagaattgatcaataagaagattggcaagacgctggcgcgaaagcggcaaatcgcaggtttcacccaagaagaagtagcagaccgcttgggaatcggcagcgaggcgtactcgcgtatcgaacgcgggttggtcagccccggaatcaccaaactctatgaattggccgacatgttcgagtgcggggtggagacgttcctagtagaaggcagtcgccgtccaactgaccaaggcgagcgtatagcgcgtgaactagcgagtctgagtgcctcagatcgggcaatgatcgtcgcactcgtgtccgcgctaacgaaacgactcgccaaggataagcctgctactaagtctagcgcggaagaatctgaatag

SEQ ID NO: 347366 - DNA, 147 bp, Pseudomonas aeruginosa
atgttctacccgctcgatcagcattacctgcgccgcgagtatgaggatttcctggaagaggccgccaaggccattctggggccgcaaaccacgaagcgcaatccgtatcacaacaaggacgaggatttccaggacgactgggagtga

SEQ ID NO: 347367 - DNA, 930 bp, Pseudomonas aeruginosa
atgaagtccccgaagcaagaacgactcgacctgacgaatccgattttcagcgacccgcaccgtgcgttgacctatctggagggtgttcggtggcccaatggtcgaatctgcccgaaatgcggtgaagccaatcacagcagcttggtaaggagcaaaaatcaccgccctggcctgtactactgtaacgggtgctgcaagacctttaccgtaacggtaggcacgatctttcaggggtcgaaagtgccgctgaacaagtggttgctcgtgttccatctcatgtcggccagcaagaagggggtatccgccctgcaggttcaacgaatgatcaacgtcgcgtacaacaccgcctggtccatgtgccaccgggtgcgtgaagcgatggctcccaccgagcgagagttgaagaagaagcttgggggctcggatgccgaagtcgaagtcgacgagacatactggggcaacaaaaagaagaagccgaaaggcgcccgggggtgggcgcacaagatgaagatcatctcaatagtcgagcgtggcgaaggcggtcagaaacggtcgttccatgtgcaggacaccaaggccagtacggtcatgcctttgttgaaagcacacgttgatacgcagtcgcggatgatgaccgatgagagcggtatctacaacaacatggggcgcgaattccgatcccatgaaaccgtcaaccatagcgcgtgggaatacgccaggggcgacgtgactaccaacacggttgaggccagcttcgccctggtgaaaagggcgttccgcggcatcttccacaagctgagtgagaagcacctgcatcgttatttgaaggaactggactacaagtggaacacgcgtggtctcaccgatacggcgcgtatgttggacgcactgcgtcgcacggtgggtgtcgcttgtcgatctggcgattga

SEQ ID NO: 347368 - DNA, 360 bp, Pseudomonas aeruginosa
atggcttatcgaatgagactgacccactgggtgggcctagccgacgctttgctaaaccgccacgtgacgtattacttcaagtcaggtcgctcagatggattcatattcatgaccgggacagaaggaggactgaccaattttcatctacataccttcgaaaaagtggacggcgattacatggtatttacgggcatcctgccgaagagtggcagctttcgcgaaggcgataatatagatttagcaacagaaagagttgccgactggctcggcatatgtgcgggtatgaatcagagtacgctcaatgcagtccaagcattgggtgatatttttgtgtccttcgggagcttagaaccggaataa

SEQ ID NO: 347369 - DNA, 360 bp, Pseudomonas aeruginosa
atggcttatcgaatgagactgacccactgggtgggcctagccgacgctttgctaaaccgccacgtgacgtattacttcaagccaggtcgctcagatggattcatattcatgaccgggacagaaggaggactgaccaattttcatctacataccttcgaaaaagtggacggcgattacatggtatttacgggcatcctgccgaagagtggcagctttcgcgaaggcgataatatagatttagcaacagaaagagttgccgactggctcggcatatgtgcgggtatgaatcagagtacgctcaatgcagtccaagcattgggtgatatttttgtgtccttcgggagcttagaaccggaataa

SEQ ID NO: 347370 - DNA, 693 bp, Pseudomonas aeruginosa
atggatgatggagactttagaaaggccagaggattcttagtaactttctcaaccctcaccatacttgcttggtatttttcagcagaccttacctcctttagcatcctaggagccccactaaaaataaaggaaaacaccgaagacatatggttggcagtatttttagttaacatatacttcattcttagatacattcaaaccacccctgacccattgctagagcaacacaataaaataatagattaccttcacgaatatcttataaaatttaccatatcggaaaatcgcaatgaaataattgatattgcaaaaagctcatgcgaaacaggcccacccaaaggggcaaaactggtcaaaccaaaacctaaaggaattatggcttttagagtagaaaaaaagagtgaattagatgttatattcgaaaacggcctaattgggcgccgacctccagattaccgagtaagaatagatatcccatatatatttcgcatggagacagggtctctaggtcaagcaacgggaacatccataataaaacaccccagcaagataactatctatagagcaagagttttgtctactatcaagggttctttcctcaccccatggtttacagacaaattattcccaatagccctttctcttttctcagcttcaatatccataattaactggataaatatagcattataa

SEQ ID NO: 347371 - DNA, 240 bp, Pseudomonas aeruginosa
atgggaacctcaatccgcgcattcctgctgcgcctcggccgcgagcgtgtcaccaaggcgctctgcatcgtggccaccgtggcggctttcatccacgagtaccggcagttcgacaacccggcgctacacgatctggtggctccgctggcactcgccatcgttgttccgatcctgtacctgacaccgcttgtttggctcgtttaccgctacctagtgaggcccaaccatgaaaaccgctga

SEQ ID NO: 347372 - DNA, 606 bp, Pseudomonas aeruginosa
atgaacctcaagaacggcgcgaaacgcgcagccaaattcacattcgtcgatatgccgctgtcgatcctcggatggcggcagatcaaggccaacaatggctacatccgcgacctgtggcgcacgctgcgcaacccgcagtgcccggagtgtgggcgcggtgtgatgcacctgcctgccgattcccagcctgatgacaaggcgctttatggctgggaatgttcggcgcggtgcggtttccgcgtgctggcaccggaagaccccgctgaaatccgccgcatcgtgcaggcacgatccgagacacgcggcaagcagaggctggcgtttcttggcgaccccgagcgcgacaagctcatcaccagccacctgcgcaagtcccgagcctattgggtagtcgcttccgccgtattcctgatggccgtgtggcaactggccgtaggcgcatcgctgatggtcgttttgagtgttctgtccatgtgcctgccgttctctatccatgcgatccgctggagctatcgggcgtggcaagttcgctcaggcacgctgttcgttgagggcgcatttggccgttacgtccgcgacatgctttgggttcgggggatgcagtga

SEQ ID NO: 347373 - DNA, 141 bp, Pseudomonas aeruginosa
atgcctcatcaagaagtttcgcccggaaccgggcgtggattgaaacccgataccgccgtgctggccgtcctgctcgcagttgcagacgccgtgctggcccagcgcaaacgccgcaaacacacccggagggctttcggatga

SEQ ID NO: 347374 - DNA, 525 bp, Pseudomonas aeruginosa
atgagctatcagtatgactacaccgccgaggcgaacggtcatgtcatcggactgcggcgcggatatgagcaagggcacgctgctggctatgttgatgggcacaacgacaccgctgcacgatggcaaaagcagattgatgaggaatgggcaccactcgttgatcggctgactgccgagcgtgacgaagccatccgcgaccgcgacgagctgctggagcgcgttcgccatgcgggccagcagacccacaaatggagcaaggcgttttacagcctgttgtgcgccctcgattcggcgctggaggtgctccaggacgcaccgcaggagatgcgcacccggatgatgctcgatctcgccaagcgtgccgagtacatgcacggcaagggctggatcgactcgatgccgcaggacaacagcgtcctgcgttcccgcgcacgtccaaccgctgaccagcttcgtggatggtggaatcaggttctccaccacgccaagaaggcggcggaaacagaccagtcccccagtccataa

SEQ ID NO: 347375 - DNA, 2892 bp, Pseudomonas aeruginosa
atggcagccgccgatccatccatgccattttcgccctgcgattccgccgcaggcgcttgcactgatgtcagcgtcggaatccttgagtggatcttcggcggtgtcatttcaaaactgacacagggggccgatcctgacactgttgatgccagcgtcagcgtgatggcttcgatcttctcggtcttcaactcgggcctgctggttgtcgccagcctgatcgtcagctacgtcgccatcatgggcgttaccaacacggccaacgagggagaagcgatgggccgcaactggtcgtcgctctggacgcctgtgcggatcgtctcgggtggcagcgtgctgctgccgaccaccagcggatacagctttatccagctcatcgtgatgatgtttgccttgtggggagtgggcttcgcaaacagccttttcaagatcggcactgagagcggaatcatcaacggcgcactcaccgcgaccagcgcccagatggggttgggcagtggcgcgaagccgaacccgaattacccgctctacgacatccgccagttcgcgcaggaatacttggctgtggcttggtgcaagcgcaccgtgaatgccgcgttcgcggatttcggcggcggcacgccgaacgtcagcgcggccagcgcaccagaccagaccattgccgaaggcggcagcaagaaagcaatgatctatcaggcgaaggatcgaaatgccgtcaccaatctgggtggcggtgtgccgctttgcggctcggtgaaggtctatagctattcggctccggctgccatcgccgccgaaaccaccacgtcagcggcaacggtcttcgatccggccaagattcaggataacgcggcggcgatgagcgcagttcgtgtggcagcactgaacgccaaggctgcggcggtcaacaaggtgatggccgacattgaagcgtgggtggctcaatggcccgcgaccatcaacgaatccggctgggagaacgtcacgagcgaccgtttcaaccagattgtgaatcaggcgcaaagcaccctgacggccagcctgaccgcgcagatcgcggcggatagcaccctgaaaacgatcatgcagcaatacgtgaatgacatcacggcggatggctgggcaatggcaggcggcttctatcagcgcctcggcggtatcaaagaagagctgggccgcatctatgctgaaagcgttgcgcaggccactgcaccgaacctcaacacgctgccgcaaggaccgcattcatcgctggctgccaacagctataccacggtctacaacaccatcatcagcaaatccgtgagcggtgcaagctacagcacaccagacacgccacgggccgccgatctcaagtccaatttgattccggccagcctggatgacctcagcatcgacacgcttggcagccgtggtgacagcttcatgtcgggcttcattcagtggggcatggagcgtgtgaccagcaccatgatcggcaccgatggcgatgtggacgctattgctcgcatcaaaaccacgggcgatgtactcgcgttgctgcaatcgactggctttgccgccgaccggctgatccacacctcactatctggcctgaaagccgctgcggcagcagtgggcagtgtcagtttcatgggcaacaaggttgatgccaccccgttggccgatacgttcttgcagtgggtcatttataacttcttgaccccgctggccgaagtcacaacgtggctcgggcggctcgcgttctatttcggcgtgttcctgccgagcctgccctacaccatcttcatgatcgcagtggtgggctggctgatggcggtgctccagtcgatcattgccgcgcccctgtgggcggtcatgcacatgacgcctgaccgcaccttcgtcggcagccagacgcagggctacctgctcctgctgtcgctcttcatccgcccggcgctcatcatcaccggcctgtttgccgcgatgatggtcgccaatcccgtggttgggtacatcagcaaggcattctgggcgatgtatcacgccaacgtcacctcggcggagtctctgggctggttcattgagttcttgcagtggaagaactggctcatcgtgtacggattcgtcctgctgcccgtgatgtacatgattttcgggctgtcgcagaccctgccggacaccgtgctgcgctggatcggcgcgggcatcagcagcatgggcgaaacccaggcgaccgagcaaatgcgggccaactcggaaaaatacggcccaagcgcgttgcagggtggggcttcgccgaaaaatcctcgcaacgatggaaccgaccgccgcctgaatgacgaccacggtggaactggcagcctgggtggcccacgcaacccgactggtggcggcggaggccgcagcggtggtggcaactatccgcgcctgttgagtgccaacagtcaaggggttgcgccccagcagcacgatgctgcacctaccacgtctgcatcaagcggctccgcagcgcccagtgggccaacgcgcagcaccgccgcggcgtcagccagcgccgggtcatcactcaataccggctcgcaaggcgttaccggcagccgctggggtaacagcgaagacatcagcgacgctgaattcaccgaagtgaaagacacggccccgcgatcttctgcacaccctgcatccactggggaaactggggagaaagccagcaacgccgtgctcgctcttggctccgctggtgtcatcagttcggtttcggcggataccgcagacagtgacgttggcgggaacactcccgctctgcattacgacacccgctataccccgccgcctgccagcacggctgatagcggcaccacagttatcaatcacggcggcacagccgttgatggagggcaaccggcatga

SEQ ID NO: 347376 - DNA, 477 bp, Pseudomonas aeruginosa
gtgcagcaggcagaggaacagaagcgggggcggggacgccgcccggccagtgaactggcagaacagcgcgagcgggagatcgctgcgttggcagcagccgtggagaaacagcagaagcggctcgaagagctgaaagccgcgcagcgccgggcgcagaaggccgcacggcgaacctacatcaaccagcgcaagtatgcggtgggcggtctggcacagatcgccgggctgctggaagccgatcccggtttcgtactgggtctgatgctggaagcggcggaacagcgcgaccgcgacggcacatggcccagcgcggtattcgagaagtacaagcaccgtggcgatcaggtgctggccgagcgtgctgccgcacgcaagcgccgcaaatccactggcgacgacgaggaagacgatgacgtggagttcggcccggcagtcgtgcccatgcaggaaaaccgctatcaagaaggagcacactaa

SEQ ID NO: 347377 - DNA, 339 bp, Pseudomonas aeruginosa
atgaaagtctgggcattcgatgagaaccgggccgacttcgtagatgctgcgccggagcggatgaacgctgatccgaccgggtgctacatcatccggcgcggcgatgacgtgtttgtccgcgagcacggccaggaacggcccatgccggagcggctggccgtagccggggtgccgttcgaccgggagcagttcgaggattatttctaccccttgcccctgcgagcggagatgaaacgagacggccaatgggcgcgggcgcaattgcaggcccgcgaccgggccgaaatcgccctgccgctggagttgccgatctgggtgacgaaaggggagccagaatga

SEQ ID NO: 347378 - DNA, 867 bp, Pseudomonas aeruginosa
atgaacgacctacagcgagcagccgccagagcacgccccgcgcttgccgttctgtccgccgagcttggcgagccgtcaccggatacggtgcgggcgctggcgatcatcgggcagatgctgggcgacatcgaagccgggcggcatccactcgaccgccccgacaactggccccagcgtgaccgctggccggatcgtccgcactgggacaggtggcggtgggcgatcaaggcgcttgccgttgccagcggcacgaccgcctattgcagcgcgaaatatgaatacatgcgcgtcgatactagacaggcgcggtctgatgccctgaccggggcattgcttgacgttgcagacgtgatcgagctggcaagcgtccgagagcctagcggcaccatcgacagcttcctcggcctgtgtgcgggcagaactaccccggccttaaccatcgaagacatgaacaagattgctgcggcgggctgggcggggaagctggagtcagtccgactttccggcgatccgctggggtcactcgcaggcatcgacgagattatcaaccgtggcgaccgcgaggcattttccgggctgctgaacgccatcatcgagcagccgggcagccccatcgctgatcgtgtgcgcacgctctatgagcgcgttaggcatcgcgcagccgatccagagtttgcggcgtggctgcagtatcaggcggcctactggttggccgtggcaatgggccagttccggcctgccgacgcgacaagccaacgattcgccagtgtttgggatgccatagaggacgaccccactgaggcggagaagatgaaacgatggtctgcgcagcgaatgaaagccgacgacaccgaggacaagacgtga

SEQ ID NO: 347379 - DNA, 447 bp, Pseudomonas aeruginosa
gtgatcctgttcctcgacttcgacggcgtgctgcaccccgagtatgacaggcaggccgccccggcagacgtagcgttttgccacctaccgcgcttcgaggccgtcatgcgcgatcatccagaagtggagatcgtcatcagctcgacgtggcgcgagcagttcccgctcgatgacctgcgggcgcgattctcgcccgacattgctgcccggatcgtcggagcaacaccaatcaccccgcgcattgatggcaaatacctgccagcccggcgcgagggcgaaatcctcgactggttaaggcaggccgagcgcgagcatgagccgtggctggctttggacgatgctgcgtggcagttccagcagcaccgggacaggttgattgcctgcacttggtacgtcggctttgatgacgccgcagaggcggcactgcgggcacaactaagcgcatga

SEQ ID NO: 347380 - DNA, 606 bp, Pseudomonas aeruginosa
atggggcaacgcatcgggtacgcccgagtttcgacagatgaccagaaccttgacttgcagcttgacgcgctgcatcgagctggcatcgctgacgactgcctgtactccgacaccgccagcggtaaggatgccgagcgcaaagaattggctgcatgcctgaaagcactccgcgagggcgacaccctcgtggtttggcgtcttgaccggctggggcgcagcctgcccgaccttgtgcgcatcatcggtgagctagaaaagaagggcgtcggttttgaaagcctcaccgaaaaaatcgaaacaagcagcgcagcgggcaagctggttttccatgtttttgccgcgcttgccgagttcgagcgcaacctgatccgagaacgcacccgagcggggcttgtggccgctcgtgcccgtggccggtcgggtggccgcaggccaaagctgacacctcagcagatcaaagagatcaagcgactgatgactgacccaaccattccggtcagtcagattgctgaacgctacaacgtatccagaacgactatctacaaggtcgcaccacgccgggaaccggaagtggtcgaggcccagccagtgaagaagaaaccatga

SEQ ID NO: 347381 - DNA, 4773 bp, Pseudomonas aeruginosa
atgatccgtgacattctccagcaatacagggacgaatccgctttcaatcgtgatttgggcgaccgcttcgagcggctgatgcgggcctacctgaagctcgacccgcagtaccttgcattgtttgaagatgtctggctctggaaggattggccgcagcgggaagcccttggctataagttgccggacaccggcatcgacctggtggcaaagctgcgcgacgaggatggcttctgcgcaatccagtgcaagttctacgactccccgattccgatgggcgatctgggtaacttcttcacactctcgggtaaggggggctttactcagcgccttatcgtggcaactgcgccgctctccaagcacgcggcggatgcgctggaagggcagaccattccggtcgaactgatgaccttggaggacttggaagcctccccgattgactggtcacagttctcgctggacaagcccgatcaactgcgcaaactgcccaagaaagaccctcgcccgcatcagagcgaagccttgatcaatgtcaccaaaggctttcaggcccacgaccgtggcaagctcatcatggcctgcggcacaggcaaaacctacacctcgctcatcattgccgagcagatggttaagccgggccagaacatcctgttcctagtgccatccatcgcgctgctgtcgcagacgttgcgggcgtggacagccgatgccagtgtgccgttgcgctgctttgctgtgtgttcggatagcaaggccagccgcaatgaagaggacatgcgcatctacgaactggcttatccggccacgacgaatgcaaacaagctggcggcctccctcaccgcaacgcaggacgagagcgccatcacggtgatcttctcgacctatcagtccatcgaagtggtacatcaggcgcagcagaaaaccggcatggcgttcgacctggtggtgtgcgatgaggctcaccgcactgcgggctataccgctcccggtgaagaccattccgcattcgtgcgcgtccatgacaacgcctacatcaaggcaggcaagcggctttacatgaccgccacgccgcgcatctacgccgaagccagcaagagcaaggccgaagaaaacgatgtgcaagtgttctcgatggacgatgtggccaccttcggtccggtgttccatcagcttcgcttcgatgaagctgtccgtcgcgatctgttgtccgactacaaggtgctggtgatcgctgttgatgagttgcacgtcagcagggtgctcaacaagcgcatcgccgacagcggcgatgaactcaagctggatgacgcggtaaaaatcgtcggttgctggaacggcctgggcaagcacgtcgccgccgaggatggcatggatgtcagtgtcgatcctcaaccgatgcgcactgccatcgccttcgctcagtcgatcaagcactccaagctgctgaccgccgagttcgagcgcatttccgacgacctgggcgaccagatcgactatctccccgcactggaggccaaacacgtcgatggcaccatgaacgtggtcgagcgcaaccagaagctctcctggctcaaggacaatattggcaaggaagagccgctatgccgcatcctgaccaatgcccgctgcttgtccgaaggcgtggatgtcccggcactggacgctgccattttcctgaacccccgcgattccgtggtggacgtggtgcagtcggtcggtcgtgtgatgcgtaaagacccggctggtcgcaagaagtacggttatgtgattctgcccatcggcatccgcaaggacacctcgcccgagacggcacttgatgacaataagaaatatcgcgtggtttggcaggtgctcaacgctttgcgtgcccacgatgaccggctggacaagcagttcgccaccattgacctgacaggcaaaggcaatggcgtagtgaacgtcatcggcgtgggcggcggcaacgagaaggctgatgccttcggcggggaacagcttggctttgccttcgatccagaggaactcggcaagtggcaggacgccatgtttgccaagatcgtcaccaaatgcggcaaccgccgttactgggaagactgggccaaagacatcgccgagattgccgaccgtcaccagatgcgcatccgcgccttgctggaaaagccctattccaagggcaagaaagcattcgatgagttcctcaagggcgtcaggaagaacctcaaccccagcgtcagccagaatgacgccatcgagatgctggcccagcacatcatcaccaagccggtgttcgatgcactgttcgagggctacgcctttaccagcaagaatcccgtgtcgcagtccatgcagaaaatcatggatatcctcgatgcgcaggcgctggacaaggagcacgagacgctggagggcttctatgccagcgtgcgcgagcgggcatccggcatcaccgacccgaaagggcggcaaaagatcatcgtcgagctgtacgacaagttcttcaagaccgctttcccgcgcatggtcgaacggctgggcattgtctacaccccggtcgagatcgtggacttcatcctgcacagtgccgatgccgccctccaagcacacttcggcacccggcttgctgaccagaacgtccacatcctagacccattcactggaaccggtactttccccgtgcggctgatcgaaacggggctgattccgcctgacaagctgccctacaagtaccgccatgagatgcacgccaacgagatcgtgttgctggcctactacatcgccgccatcaacatcgaggaagccttccatcgcgtaacaggacaggagtatgagccgttccccggcatcgtactcaccgacaccttccagatgaatgagccgcagaccggcgatctggatgaaggcttgccagaaaaccacaagcgtgccgatcagcagaaggcaagggatattcgggtgatcgttggcaacccgccgtattcagttggtcaggacaatgccaatgacaacaatcagaacctgaagtatcccaagctggatgggcgcatcgctgcgacctatgcggcacactccaccgccaccaacaaaaacagtctgtacgactcctacatccgcgccttccgctgggcatccgaccgcatcaaggacgaaggcattgtctgctttgtgaccaacggtggctggattgacggcaacacgatggatggcttccgcaagaccttgcaggacgagtttgcggatgtgtatgtgttcaatctacggggaaatgcacgtactcaaggcgaacagcgccgtaaggaggcaggcaacgtcttcgactcaggctctcgcacaccggtagccattaccctgctcatcaaacgcaaaaatcatcaaggcaaggccgcgatccattaccacgacatcggcgactacctcagccgtgagcaaaaactggaaatcgtcagcagcttcggcagttatcagcaggtgccgtggcaaaccctggagcctaacgagcaccacgactggatcaatcagcgcagcggggatttcaatgccttcgttccgttcaacgatgaaccggatgcaatttttgctctacgatctaatggcgtgcaaacaaatagggatgcttgggtttacaactcaagcaaagccaatctagaagcaaacatgcagcgcatgattgacttttacaacgatcagcttgcattgcatgggagtatcgttcagtcggcgggttcggccaaggaaaaagaaaagacggccagccagttgattgacacaaaccctaagaagattaagtggacaagaggattgatagcccatctgagtcgcggtcggaaggggaccttcgaacacaaaaagattggtaaggccacatatcgtccatattgccaatcatgggtctactacgaccagcaatttaatgaatatttcaaagaaaggttttatccgtccgttgaatataagaatgtagcaatccaattgactggcactggctcaagtaaggaattctcttgcctgatttctagcatcctgcccgacctagaagtcatatcaaaaggtcaatgctttcccatgcactggtacgaaaaagctacggacaccaatccacaaggtggccttggctttggcggcgacgatgccagcctgcccgatgccaatggctacatcaagcgtgacggcattaccgacgtggcactggccaacttccgccagcactacagcaacgagtcgattaccaaggaagacatcttctactactgctatggtgtcttgcactcgccagagtaccgcgagcagtatgcagccgacctcaagaaggtgctgccccgcattccctatgcgccggacttcaaggcattcagccaggcggggcgcaagctcgccgacctgcatctgaactacgaaacggtggagccgtggccggtgcaggaggatgccaagcccaagggcgatctgaatgatctggcttactaccgcgtcgagaaaatgcgctttgcctcgctgggcggcagaaacaaggacaagagcgtcatcgtcttcaacagccgcattaccctgcgtggtatcccgctgcaagcctacgactatgtggtcaacggcaagagcgccatcgagtgggtcatggaacgctatcaggtctccaccgacaaggacagcggcatcaaggatgatcccaatgactggtgccgcgagcacaacgatccggcctacatcctcaatctcgtcaagcgcgttattcgggtgagcatggagacggttgcaattgtttccgcacttccggcaattcagtaa

SEQ ID NO: 347382 - DNA, 576 bp, Pseudomonas aeruginosa
atgcaaattcgggtacagacctacaagggaaaggacgggcaccccaagccgggcaagtccgtttctctgctgcgctacgcctatgacccagagaagcggcgctccaagcaaatcatcatcggtacggtagatcgctgggcaacggcactgccgcctgacattgaagccatcctgactgacgccgagcgtgaagagttcagggagtggatggccgagagagaccagcagctcgctgagtacaagcaaaaaaaccacttgctgcacgctgccgagcacatggggtgggcggcaaaagcactggctgccggagtggagccagtccggcctgagcggatttgggatgcgctggacgtgctggccaaggcgctggagaaggcaggacacccgaggccaagccgagcacgagggcgtccgtcgaagggcgaaacgccgacgccggatgatcttgttgccagcccttacgacgatccgatgctggctgccgagcaggaagagatgtatgagcggatggcgacactgccggatttcactgctgataaaggcgtatccaaagctaagcacaagggtaagcggtga

SEQ ID NO: 347383 - DNA, 705 bp, Pseudomonas aeruginosa
atgacaaaggctgatgagcggcgtcagttccgcttcgcactggtgaaggacatcctgcgctgtgagtcagtcaggaaactgccacatgaccacaaaaagctgcttttccggtggctggcgaatggctggagcatcaccgacaccccgcctgatacatcgcgtatccgggcgcttgaaaaggttgcgtctgacgcgcatcgcctttggtctgcaatcaacaacctagatgacaaagacgaaaaaagcctgaacttcaactatggccaaaccgcccaactctcgttacagcaaggcgctttgcaacgcctagagcaagacgccgtagccttggcttcaattattaagggtgaacaggcggacatcgtgcggctgcggaaaaggcggacggcgaaaaacattgtcaaaacgctctgtatgtttggaatcccgtgcaatacgcgcaatgatcgtgacataagtgagcgcaatgtgacgacagccatgcgctgcgtgatgttcgccatgctggaagccgatgcgaagaagctgcattggggcacagccgcagccatcgtcaagctgggctttcagatgctgaccgatcctgacgaagagaaggtggtattttcagaagggagaatactggttacggcagaggaagcggagattgcccggcttctcatgcgcgagaagccagaatggaacagtatcaggctggtggagtag

SEQ ID NO: 347384 - DNA, 207 bp, Pseudomonas aeruginosa
ttgctgctgatcagccacgtcagccgcctgactggcctgcattggcacaccctcaagacgctcgacaagcggcgcatggaagctgcggtcggcgtttttgagccaggcgaggtacgccgcctggtgatggacgagttcgccctgcacaagggccatcgctacgccacggtgatcattgatgccgagcgcacgggtgtagtggtgtaa

SEQ ID NO: 347385 - DNA, 336 bp, Pseudomonas aeruginosa
atgatccgtatcgatgccctctggctggccaccgagccgatggacatgcgcgccggtaccgaaaccgcattagcccgagtgatcgcggtgttcggtgcggcgaagccgcactgcgcttatctgttcgccaatcgccgggctaaccggatgaaagtgctggtgcacgatggcgtcggtgcctggcctgcagcgcgtcgactgaaccaaggcaagttccactggcccggcattcgccatggctgcgaggtcgaactcgacagcgagcaactccaggcgttggtactgggcctgccgtggcagcgcattggcgccggcggtgtgcttagcatgctgtaa

SEQ ID NO: 347386 - DNA, 714 bp, Pseudomonas aeruginosa
gtgcgccaacttcaacgcatcggcgaagacgtcagcgagaagctggattacacgccgggcgtgtttaccgtcgagcaacatgtccggggaaaatgggcctgccgtcagtgcgaaaccttgatccaggcgccggtaccggcccaggttatcgacaaaggtattccgaccgcaggcttgctggcccacgtgatggtggccaagtttgccgatcatttgccgttgtaccggcaggagaagatttttggccgcgccgggctgccaattgcccgctcgaccctggcgcagtgggtcgggcaaaccggcgtgcggcttcagccactggtcgatgcgctgcgtgaagccgtgctgaaccaggacgtgatccacgcagatgaaacacccgtgcaaatgcttgcgccaggcgagaagaaaacccaccgggcctatgtctgggcctacagcacgaccccgttttcggcgctcaaagtggtggtttacgacttcagcccaagccgtgctggcgaacatgcgcgcaacttcctgggcgactggaacggcaagctggtctgcgacgacttcgctggctacaaagccggatttgtgcaaggcatcactgaaatcggttgcatggctcacgcccgtcgcaagtttttcgatctgcacgtggcgaacaaaagtcagctggccgaacaggccctgcactcgatcagcggcttgtatgaggttgaacgctag

SEQ ID NO: 347387 - DNA, 654 bp, Pseudomonas aeruginosa
atgatatcaccctgctacaatcccttcgctaggctactggagaaggtgatgaaacggactattgctttagcgtcgacgctgttcttgttcggttgctctaccggcccgttatggcaagcgattagcacaaccgatgaattcactgacaaaacgactatgatggtcacaactggcgacttctctacatcgaactcagtgatcactaggtcaatgcactactatcccgtcgtgcgtaaagaaggcgaggaaatctatgtaggcctcatgtccggcggccgttacaagatacctgtaggtaccgttcaactccgagtcgaccagaatgaggcttggaccattactcctcaagaaaccccggtcagcatgatgccggaagctcctcaatactctatgaatctccctcctgaccaagctgagatcgtaaaaaatgctcaagcacaggttatgaccagcatggcccaagcgatgagcccctataccgtaactagcggcgacaaggctaagaagatcctgaagcaaatgctctcaggaactacgctgaaataccgaacggtaggcatcaatcaggcagcctcgaccacgggtgaagtgctcatcgatccatcgctagccgagtcactaaagcgaatcgggatcagcccatcctcgctgtag

SEQ ID NO: 347388 - DNA, 1047 bp, Pseudomonas aeruginosa
atgcaatcgcgtttcgggcgcattccgctggatcgaattatcaccgaatggactgaggagcacccgatcaacccgcgcttgttagccggtgaggtggccggcctgcttcgctcgatgtcacctgtcgatcaacatattcaggaggcatttgtttcaactctcctgatatctcctacttccaacggtggcaccgttacgattggtgcgcttgctgattacttcgatagtgccagccaaggaaagccagcccaaaacatcatcacaaaggctggtattgcgcccatttctgctgtatccgtctggcgccagtggatgaatagcttggctgtagaggcgacagagcgggccttacaggtagcgggatttgccgttccagctaatgactctcaggcggccattatggctgttaacgcttcgccaaaagttcatcatgacagccagttacctcctccttccggtagtgagcccggctatctcaagctgcgtcaggctcagcagcgtcaggaaggcgaacgaagtgcagccgagcggcttgatgagtggcaacgtaaagctcgacgactcgaggcagagaatgccactctctcggggcgattggctctttctgaagcggacttagacgccgagcgggaagcgagaggtgccgaacgtatagctcgtctggccgcggaagaaaaattagaatcagcacaagcagcagcagcaactgctgttgggaaagtagcggcggattttgcagatctacagcgtccactcaaagaagtggcggcgtttctcaaaaatgtcaatacgtcaaaggatagcgtttcaaactcaacagatctcttggttatagctgggctgcttgagctgctgctggaccgaaaccgtcctaactatactcaaggtagtgccgcggatgctattgccattaaaggttggtacggagcgggtaaacgaaatgttaacgcagcgtttgcggctgccaaagtggctgcgaaagaggctagcaaagaggccaggtctaaagcgctagacatgcacggaagtaacgcccccccaatctga

SEQ ID NO: 347389 - DNA, 237 bp, Pseudomonas aeruginosa
atgactagacgcattggagcgaaagcactcggtgaccagctctacagctatatcggcgccatccaggacttggctaccgctgtccaccaagacatggggttcgatggatcggccgatccggctcctcgccttactggtgaccagcgggaagcgatccttctgtcgatcaccacgctcgccactctggcccacggtgatctggtcgacctgctgactgagatggaggttccggcatga

SEQ ID NO: 347390 - DNA, 390 bp, Pseudomonas aeruginosa
atgagcagacctcgcacttacgccgacaagactctgggcgataccgaatacctgctggagcagtggggcttatggcggatggatgggatgggagttccagcgtgcgtctcgccggctgctgccctcatgacccaggccatgccgatgtccagtcccaaggcctaccgcattaccgatgaggtcgctgtggccatcgatcgcatcctggcgcgtctaatggcccgcgctccgcgagccggtgacttcgtttggttctacttcggcgccaagtggccagcccatcggatcgcgtgccagtactcgatcggcgaggcgaaggtacgagaggagttgaaactggccgtcggctggatcgacagtgccctggagcatctccgtgagagcgcctaa

SEQ ID NO: 347391 - DNA, 222 bp, Pseudomonas aeruginosa
atgagaaatcctgatatcaaggtcgtaaagcttgagggtgacagcttgccgtactccgtacagctggccggccactcagtctgttacgtggttatgcatggcttcacactgcgaagcgatttcttgtattccgaggaagaggctgaggtagtggccgatgcgatacaccaagagctttttggcaagttgagatcgatgctgggatctgtccgagggaaataa

SEQ ID NO: 347392 - DNA, 792 bp, Pseudomonas aeruginosa
atgaaccgcacccttaaaaacatgacccttgccagttgccttgcgctggcccagggctgcactgccttgggcaagtccaacagttttaccgttacggcggacctgccacctgagtttacttacgaagccacggcggcctatgtcccggccaaaggtgagacttgcacagtgccggggggaaaggatacccaagttggctacaactcgggccgggaaaagtacaaacgtgattcgaagattttgttacgtcgcacggtcagcggctgccctctggtactgcagagcatcgatttctatatctatggctggtacggcaaggctaggggggacttcgggcgtgactcggccctgatcgtcgtacgagacaagctggtcgaggtgaaaaagggcactttcaatgcggccggggaaagcgagtttgccgggcaatgccagtggctgtttcgtacagccgggaagacccgtgttctgagaaagctcctcgattgcaaaaggatggatgagacgggtgtacggcgcaaagcgaaacctttcgtggtttacaccctggaccaactgcccggcaagacggtgaggttgaggatcaagctggctgacgaagagctgccagctatcggcgacacgtgggtcaaggtacctggagggtggaaacgctgcttgggtgataattttgaagatcaatacgcattttgctatggaaactataaggacttcagctccttcagaatgccggatggacgcaactgcaccctctatcccggttgtacggaaaacaaggcggtgaccccatga

SEQ ID NO: 347393 - DNA, 1260 bp, Pseudomonas aeruginosa
ttgtccctacccgactacctacctgatggctacttcgacctgctggtggtggacgagggacatgagtacaagaacagcggctcggcccagggccaggccatgggcgttctcgcagccaaggcacggaaaaccgtgctgctgaccggaacgctcatgggcggctacgccgacgatctgttctatctcctgttccgcatcctcacccagcgcatgatcgaggacggctatcggcccaacgcgcgcggcagcatggctcctgcagccatgtcgttcatgcgcgaccacggtgtgctcaaggatatctacaccgagcgcgacggtgattcgcacaagacagcgcggggcaagaagctctcggtacgcacggtgaaggctcccggcttcggcccgaagggcatacaccgcttcgtattgccgttcaccgtgttcctgaagctcaaggatatcggtggcaacgtactgcccgactaccaggaggagttcgtcgacgtgcccatggcgcctgagcaggcctcggcctatcagcgcctggcggccacgctgacagcggagctccgccaagctctggcgcgacgagataccacgctcctgggcgtggtccttaacgtgctgctggcttggccggactgctgtttccgatcggagatcgtcaagcatccgcgaagccgggacaccctggccttcgtgccagcgatcttcggcgacgagcagttgatgcccaaggagcaggcgctggtggacctctgcctcgaggagaaagcgaagggccgcaaggtcctgacctacacggtctacagcgggacgcgcgacaccacgtccaggctgaagaaagtgctcgagcaatccgggctgaaggtggcagtgctacgtgcttcggtcgataccgctcgacgcgaggattggatccttgaccaggtcgatcgcggcatcgatgtgctgatcaccaacccggagctggtgaagaccgggctggacttgctcgacttcccgaccatcgcgttcctgcaaacgggctacaacgtgtacaccttgcagcaggccgcgcggcggtcgtggcggatcgggcagaagtacccggtgcgggtggtgttcttcggctatgccggcagctcgcagatcacctgcttacagctgatggccaagaagatcgctgtggctcagagcacgtcgggagacgttcccgagtcaggtctcgactcgttgaaccaggatggggattcggtggagatggcgttggcacgacaacttattgcagcatga

SEQ ID NO: 347394 - DNA, 927 bp, Pseudomonas aeruginosa
atgcgtggtttcgattcgtacctcacattccagaagctcgaagtgttctgcacgattgttgaactcggcagcgtcacccgtgccgcggaccggctgtgcatcgctcagccggtggtcacggcgcatgtgcggagtatggaggcgcggctgggttatgctctggtcaagcgctcgggtcgcaacatcgccctgaccgaagcgggggagcgcatttatcgctgggcggtggaggtcatcacccgcacccgcgaggtcgagcgcgagttggcggggctggaaagcggcgaggtaggaagtgcggtggtggcgacctcgatgtcggtgggttcttatgcactgccgccactgttactggatttccaccggctgcaccctgacggattggtaaccgtcgaaatttccagcccgcaggccgccgtcgatgccacgcgcattggcgcctgcgattttgcggtgatcctgctggcgggcaaccagaatctttacggcctggtcacattgccgctctgggaggacgaactggtgttggtgtgctcgccctgtagtctttgggcggggctgccggctgccgacctcgatttgcaccaaatgccgtttgtgagcacgcctcgtaacatgcctcggcgtgaactggaggaatccctgttgcgtcggaacggcctagagcagcgtcgggtggtgatcgagctaggccatccggaagcgatgaagcatatggtccggcagggtgttggcgtgagtttcatgtttgcctcggcggtgcgtgccgagatcgggcgtggcgaattgcaagtactggagcgtgcagatctatcgatgaaggtgcccatctacctggtgcaccgcgcggacaagcatttctcggcattccagacccaactggtgcgattcatgctcgcccgagcgatgcctggtgtggtgcgctga

SEQ ID NO: 347395 - DNA, 1698 bp, Pseudomonas aeruginosa
atgaacatcgacagctatgactatgtcatcgtcggcgccggctccgccggttgcgccctggcttaccgcctgggcgaagacccgagcgtccggatcctggtactcgaagccggcggacaggaccgctctccttatattaaggttccactgacttggggcgtgattctcaagaaccggctgtttgactggggttacttcactgagcctgagtccggcatggacgctcgcaggatcgagtgcgcccggggcaaggtagtcggcggctcctcgtcgatcaacggcatggcctatgctcgcggagcccgagaagattatgacggctgggccaacgagttgggcctggttgattgggcctatgccgacgtgctgccctacttcaaacgcagcgaaagctgggaaggtggtgaaagcgcactgcgcggcggcgcaggaccagtgacagtgggtcgacttgactatcgcgatccgttgattggcggctttctagccgcgacccgcgcctgtggctaccccgacaaccctgattacaatggagagtcgatcgaaggcttcgggccgatgcaggccaccattcgcaacggcctgcgctgcagcgcagcggtcgcctatctgcggccagccctggcacgcggcaatgtcacactcataaccaatgcgctggccaggcgcatagtgttcgacaatggccatggcacgccacgcgccatcggcatcgaatacttccgcaacgacgcccttcaccgcgccgacgcccgccgggaggtcattctctgtggcggggtgatcaactcgccacaattgctaatgctttcaggcatcggccccgcagaggagcttcgagcgcacggtatcgaaaccctgataaatctgcccggagtgggtggtaacctacatgaccacattgtcttcgacatccgctggcggcggcgcgtccccggccccctacatcgcatgatgcgggccgaccgcattggcctggatgtcctgcgcacattgctcggcggcaatggtttctccagccgaattcctgccgctgcggtggggctcatccgcagtcacagcgatctcaaacaacccgacgtgcagttaatcctggcggccggcccgatgaatgccgcgccatacttcgctccgttcaagcaggcctatagcgacgcattcgcaataaagggggtgtacctgacaccggaaagccgtggccgggtgactctgcagtcagccgaccccgcccagcccgcctgcatcaagcagaatttccttgccaccgagaacgaccggctggccgttcgccagatgtttaggcgcatgcgcgaaatcggtgtccagcctggcctggacgcgtacatcgccgaagagctagctccagggctcgccatccaaagcgatgccgaagtggatgccttcatccgagcccaggcgatcaccttgcatcatccagtcggtacctgtcgcatgggcagggaagatgagccgcaggccgtactcgacagccagatgcgcgtgcacggcgtacacgctttgcgggtggtcgatggctcggccattccacgcatcatccgcggtccgaccaacgcgctgatcatgatgatggccgaacgcgccgctgacttcatatcgggtcagagcaagccagccaggcagcgccagccgccccattccgcgcacacctcgcaccagccgtctaggagcctgcaatga

SEQ ID NO: 347396 - DNA, 948 bp, Pseudomonas aeruginosa
atgatccacgcctgcaatcactcatctcggcacgcgcgggtcgtccagcatgaccggcatgcctttcgcataggcctgggcgaagtcgaggtgatccgcctgtacgacacctcgctgctcggtgaaaccgcgcaaagttggctaccggacttcgacaggcaacgggtggccgcgcacgagtgctggctagcaccgacccactacgacccggagagcggtcgcatccccatgccagtgcacagttggatagtgcgcaccagccgtcatacggtgctgatcgatagttgcatcggcaaccacaaggagcgcccaggactgccggaaatgcaccaactcaatacgcgctatctagacaggatgcgggcgctgggcgtacagcccgaagaaatcgactatgtcatgtgcagccatctacatgccgatcatgtcggatggaacacccaactggtgaacgggacgtgggtccccaccttccctaatgcccgctatgtgatttcccaaatcgagcacgaacatctgctgcttgctctccaaggtcaaggtcgcaccggtcctgcctggttcgggccgatgtacaacgacagcgtgctgccggtgatagaggccggccaaagcgtgatgttcgccgacacctacgccctcgacgatacctttctcatccgccatgcaccgggccattcgcccgggcatgtccgaatagaactgtcctcacagggcgtgcacggggtatttagcggcgacatgctgcactccccgatccagattccgttctggcaatggagcagcaaggtctgcgaagacccagcgttagctgccagaagtcggtacgaattgctgagtttctgcgaacagaccggcgcgcttctgttaccgggccacttcgaagccccctacacaggtcatatcatcgatgacagcggcaccttcgcgatcagattcctggcctga

SEQ ID NO: 347397 - DNA, 1200 bp, Pseudomonas aeruginosa
atgagtacgccactaagacagcagtcgatcatcatcatcgtcggcggcggcataggcggcctggccgccgcccaagctctggcccagcaaggtctgaacgtgttactgctggaacaggcctgcgagatcaaggaaatcggagcgggcattcaactaggtccaaacgcgtactcggcgctggacgcgctgggggtaggcgatgtcgccagagagcgctcggtgttcaccgaccatctaatcatgatggatgccatcgacgctaaagaggtagtgcgcatcgacgtaggagaaacttttcgcaagcgcttcggaaatccctatggcgtgatccatcgcgcggacatccatcgctcgattcttgagacagtgcagcgcaatcctcttattcggctccagacctccacccgcatcgagtcgatggaagcggacgccacgggtgtgaccttgtacgacaacagaggcaatcactaccgggccgacgcagtgatcggttgcgacggtgtaaagtcggtcatccggcagacgctgctgggcgatgacgcacaggtgacagggcacgttgtctatcgggccgtcatcgagcaagcgaacatgcctgtagacctgcgggtcaatgcaccaatgctatgggccggcccccgttgtcacttggtgcactatcctctacgcggcggtcagcagtacaacttggtggtgactttccatagccgcctcaaggaacaatggggcgtcagcaacggcagcaaagaggaagtattatcctactttgaggatattcatgaacgtccgcgccaactgctcgactgccctacgtcttggcgccgttgggcaacggccgaccgggacccagtggagtgctggggaaaaggtcgcgtcaccctactgggcgatgccgctcatcctatgacccagtaccttgctcagggagcttgcatggcactggaagacgccgttgtactcggccagacggtgaaggtatgtgaccataatctgacagcggccatgcggctctacgagcagactcgcataccgcgcaccgcgcgagtgttgtggtccgcccgcgagatgggccgcctctatcacgcgaagggtgtggaacgtcaagtccgcaaccagctatggaaagggcgcggccagtcccagttccatgatgcgctccaatggttgtatggatggaacgcctccacttgcctgctgtag

SEQ ID NO: 347398 - DNA, 906 bp, Pseudomonas aeruginosa
atgcatcacgaagagcataagcaacagccagagcaagagccggctcaagaagcatctagcaaagcaacccgggtagggcaggatgtgagccccgagcaggttggccgcgagttgaactggtacgaacagaagctcgccgatcggagggaacgcctccaggaacgtgcagcgaagatttcagacgagagcggcgcgctctaccagcgagcgaagaccatggccagcgctatccctttcggacaaccgatcctggtagggcatcacagcgaagggcgggaccggcgctaccgcgaccggatccacagcacttacggcaaggcattcgcgctgcaggacaaggcgaagcactacgagcagaaggctgcggccgtggggaccgggggaatctcgagcgacgacccggacgccatcgagaagctccaggccgagttgcagcagctggaggcgaaccagcaacgcatgaaggccgccaaccaggtgatccggaagcacaagaccctcgaggctcgacacgccgccttggttgcgcagggtttcagcgagagcctggccagccagatcctgacgcccgactgcttcggcggcatcggcttcgcttcctactccctgtcgaacaacaacgccaatatccggcggatacgtcagcgcatcgaggacctgcagaagcgccgggaagcctccgacgtggaggttgaggcggatggctacacgtaccgggaggacgtcgatgcgaaccgggtgatgttcatcttcccgggcaagccggatgagccaacccggcagttgctgcgacagaacgcgttcaagtggagtccacgccggggcgcttgggttcgccagttgaacaacgccggccgttgggctgcccgccaagtccgcaagtcactgggcgaggcgctcgaatag

SEQ ID NO: 347399 - DNA, 1083 bp, Pseudomonas aeruginosa
atgtcggaacatgaaggtaacgaccaggtcgcagacgttcgggctcgtgttttccgggaggccgatcgcctctatgaagaactggggcgtgagcgcttcccgcaggtggaagcggtgcgccgggctgcccgggcggacatgaacacggtcacacgggtcatgaaagaatggcggcatctgcaaaccgccaaacctgagccggtccacctggaactgccgcctgaactgcacagggaagcacttaccctgggctccgccttgtggagtgctgccacggaaatggccaatgcgagcctgcgaaaggccgaggcagactgggaccaggagagggcggatgctgaatcgacgcggatagaactgtcgcagttgtacgaagagcagcaaggagacctggagcggctgcgcgaggacaaacaggccttacagcaggcgttcgaggagcaggttctagtgatcgatgggctgcgccagagtttggcccagcagacgtcccgcgcagagtcggccgaggccaggaccgaggaaatcactcgccgcgtcgaggaccagaaaatcgagctgcaacgcgcccgggacgagttgtccgaggtgcggaacgagctggtttcggcccgtaagatccatcagaccgaactggaccagatcaaggctgtggccgcccaggagatcgacaaggccaaggcggaactcgctgaggcgaagggcagggcggaggcccagcgcgacgatctggcagcgcgtgtcgaggacctacagcatcgtcttgatgcggcgatgaaggacctctatcgcttgcaggcagcagaagaggccgcgagtgaacagcgcaagcgcgctgctgccgaggctcatgctcaggcggaacgcttcacccgggtacagggcgaacgtgacgccgcccgcaaagaagcccaggtggctgggctacgagccgcgcgcgccgaaggtgaacttgatagtcttcgggagagcaacgctcagctgctagaccgcctcggtagcgccgcagtccaacagcccgcgaagatcaaggccaagacgccccgcaagcccgccaagggcgattccgagagcaaggagtaa

SEQ ID NO: 347400 - DNA, 417 bp, Pseudomonas aeruginosa
atgagcatttcgaacaatgttgtgtcgagatcgatcctgcaggcggctcgcttcattgatgagtggcaggaggctgatctcgatcacctgaccgaaagccagatccgagctgctgttgcattcgccgtcaggcttcacgaaggctttcaagaaagcgtgctacagcggctcgtgaacgagtcctgtcacgacgagtatctcgagtacaaaggatgggaggaggcgttgctcaatgcggacggtcgcgttgcgagcaatccgtttgccgagtttggttggtggcatcgtatcgctaacgtaatgctgtccaccgctgacaacaacgtcggcagctccggcggttcctggggcggtaacactcattatcgcctcatggacatattcaaaagaaatttccaacagtggtatgaagattaa

SEQ ID NO: 347401 - DNA, 840 bp, Pseudomonas aeruginosa
atgaactggatcagcgccctggccgagttgcagcgtagcggcgaaccttgcgtcctggtgaccatcatcgaggaacgcggctcgaccccgcgcaacgccggctcgaagatggtggtcagcgccgagcggctctacgacaccatcggcggcggccacctggaatacagggcccaggccattgcccgggaaatgctagccgcgcggacccaggacacccgcctggagcgcttcagcctgggcgccagtctcggccagtgctgcggcggcgccacggtgctgctgttcgagccgatgggccagccgcaggcacacatcgccgtgttcggcgcgggccacgtcggtcgcgccctggtacccttgctcgccagcctgccctgccgggtgcgctggatcgattcgcgggaacacgaatttcccgcgctcctgcccgacggcgtggagaaagtggtgaacgacgaagtgctcgacgaggtcgagcggatgccgcccggcagccacttcatcgtcatgacccacaatcacccgctggacctggagcttaccgcggcgatcctggcgcgcaacgacttcgcctacttcggcctgatcggctcgaagaccaagcgcgtcaagttcgagcaccgcctgcgcgaacgtggcgtcgacgccgaacgcctgcaacggatgcgctgcccgatgggcctggagcaggtgaaaggcaagctgccggcggagatcgccatctccatcgccggcgaggtgatcgccacctacaacgccgccttcggcctggaacgcaagcaggggccgtcgagcgtcacccggctgaccccggagtcgcgccgcgcccacgaatcctga

SEQ ID NO: 347402 - DNA, 162 bp, Pseudomonas aeruginosa
gtgctgcgccactacgacagcagcccgcaactgcccaacggctacgccgggatgatcgtcctcgccctgttcccgccgctctggcgcgcggtgatggacccgaaggtgcgcgcctactatgccggcgaggaataccagcttaccgacacccagcgcatctga

SEQ ID NO: 347403 - DNA, 885 bp, Pseudomonas aeruginosa
atgtttgcctcgctttcctctgcctggatgctgcgtctgaaaaagtacggctactggatctggctgatcgcggtgctcggcatcccgctcagctactggtggtcgctcggtagcgactaccccaacgcctggccctggctggtgatcagcgtggtgttcgggctgatcccgatcctcgatgccatcgtcggccgcgatccggccaaccccgaggaagccagcgaagtgccggagatggaagcacagggctactaccgcgtactgtccctggccaccgtcccgctgttgctgggcatgctcgtctggtccggctggatcctcgcccacgagacccgctgggactgggtcggccaactgggctggatcctgtcggtgggcaccgtgatgggcgccatcggcatcaccgtctcccacgaactgatccacaaggacccgcaactggaacagaacgccggcggcctgctgctggcggcggtgtgctatgccggcttcaaggtcgaacacgtgcgcggccaccatgtacacgtctcgaccccggaagatgcctcgtcctcgcgctacggccagagcctctactcgttcctcccgcacgcctacaagcacaacttcctcaacgcctggcgcctggaggccgagcgcctgaagcgcaagggcctgccggccctgcactggcgcaacgagctgatctggtggtacgccatcagcgccctcttcctgctcggcttcagcctggccttcggctggctgggagcgatcttcttcctcggccagtcggtgatggccttcaccctgctggagatcgtcaactacgtcgagcactacggcctgcatcggcggcgcctggacaacggccgctacgaacgcaccacgccggaacactcgtga

SEQ ID NO: 347404 - DNA, 1617 bp, Pseudomonas aeruginosa
gtgcatactccattaaatgcatcagcgacaacagcaggggctctgttatctagctctacatttgaggtcccgccatatcaacgagagtactcatggttgcaggatgaagttgtagaattttggactgacctaagacatgctctaggtgatgattcatatttcttgggactcgtaatacttacagacgaagatggggtaaaacaagttgttgacggacagcaacgcatcctaaccctaacattgttagcagcagcactttaccacgaggcaaagcaaggagggcgaacagcacttgcagagcggattcaggctgattttctacgttctatcgactacgacactgacgaaacaaacccgagggtaactctttcggatgaagtagataatgaaacgttgcaagaaatacttgaacacggcagggggagcgccaattcctcaagcacagatgactccctgtcaaagcggatgaatgatgcttttatttacctaaggtcgcagctaaaggaggatcttgctcaagatccgttcaagcgtttaggtgcttggacagactttattactaatcgcttatacttcgcagtttttgtgcaccctgatcccgcgtctgcctatagggtatttgaggttattaatactagagggcgagagctaacaacagcggacttgcttaagaattacgtactcagccaaactccaaagttcgatagagagaatcgttaccaagagtggaaaaggatcgctcaacaattcaatgaaactggatcgaactcttttgttcaatatattaggcacgttgttacggttgagggcggtcatatcttgcctaaagacctattcgactttttagcccaaagagcgacgttttctaataaagaagctcctagtatcaataaactgatgtcgcttttggaaatcaacctaccgctctatttacaaatgattgatccctcgctggaaggaccggcagaacccgaggctctaaagatcttctcagcattgaatagcctaggggttatatccgtccgcccaatcctcttggccatggcgtcaactccagatgcactagagggcatgctttacattttgcgattggttgtgtgccgcatagtggttggcacactgggaactggtaacgtagagcgtcgttttggtgaggcagcgaagagagttcatgatgaatccgattggagaggaatccaagaggacttggcggatctgataccaacaaaagaagagtttgaagagcagcttcggaaacgatctctgaataaagccgtcctaacatttttgagacgttctatcattgaggacactaaaatcccagaaagaactggaacgcttcattttattcgcccacgacaagcttctgagtgggaaggctttagtgaagaagacgataatttttggggaaatacaatcggaaacacagtgctttcatcgcttgaaagaagacccaaaggtgcaagcacgtgggagggtttcaaggaaaacatcctaagtaccgcagtagcaggcgagtggacatcaaagctggagagtttcgatgaatggaacgctgaagcagttgttgaggtcggcaacgagctttctaaaagcgctgcggacatctggtactga

SEQ ID NO: 347405 - DNA, 804 bp, Pseudomonas aeruginosa
atggatgatcaaatactagaaaggctaaactctgttttggataggaagctagagataaactctttagggtcgttaacggcttccattaccgccaagcagaaagaagaaaaagatctaaatgaaacggcaattgcaattgattcaagcgccttcctgagaataaacaggataaatagaagcgaagatgttattgactatcttctgtcacagcacaaagccccactgatactgcccggacaggttatacaggagttctggaataaccaattaaacgttatagatacgcaggcagtatctttgaagaagaaacatgaagatcttaaggcactcacatcaaaaatagatagtgtatttgaagagtttcactccgacatggataaacttctgcttgattttgagacaaatcatggatatatatatgatgagtctacgaagcatagcactatgaaagcccttaaggcgctagagcaaaaggctatagttccgtatgttcctaggctgcgcttttgtcaaatggctgccgcgcgcaaaagaaccagaacaccaccgggcttcaaagatgatggagatggtgatttttatgtttggcttgatcttctttatggcttaatgaaaacaaagcatcaaggcgtaaaatttagtcacgtaatatttgtgactaatgatgctaaagttgattggagcagaaacggcatgccgcacccaattttagcggcagaaatggaagcagctgtaggtgcaaccttagaggtacttaaggtcgagcagttcgggacaatgattatcaataagagctctctatag

SEQ ID NO: 347406 - DNA, 819 bp, Pseudomonas aeruginosa
atggttgccgtctctcatcaaaaggttataaagaacttcccttccgctacgagcacaggagcacgacgctttgtcggaaaaacggctatcgtcgttggggcctctgcgaatgtcggccgtgctcttgccgagctcttggcacaagagggagcccaaatagttgttcactataattctgccaccaaaaaggacttggccgaagaaaccgcagccattatacgcaaacatggtagtgaggccctgattgttcaagctgaccttacaaaaccagcacaaaccgaagccctatttgatgcagccattgccaagttcggcaaagtagacatcctcatcaatactgccggaaagatcattaggaagccagtcgccgagtttgaggaggaggacttcgacgagctattcagtgtcaatgcgaaagctgcattctttctactcaaagacgcatcaaagaaaatctccgatgacgggcgcattctaagcttcgtcacgacgatggttgctgctttcgcgccaacctatgcgggttatgcaggaagtaaggcgcctcttgagcactttagtaaagcactggcaaaagagcttggctcacgcggtgttacagtaaactgcattgccccaggaccgcttgacacatcattcttctacccagccgagtctgaagagaatattgcatggctacagtccatgtcgattgacggaggaattggaaacattggagacattacaggccttgcattgtaccttgtttccccagaggcacgctggatgaccggaaccactagttttattaacggagggatcatatctcccatcaattaa

SEQ ID NO: 347407 - DNA, 957 bp, Pseudomonas aeruginosa
atgtgctgggttcagtgctttaatggcaaaacagtagttggtatgcaggtgtggagtgtcactggtattgatacgctagtgctagcttgcctatgtgtcgggtcagagccagcttcggtttttaataagcgcctagccatcacgtggttgtggactaccggaccttctttatggaataggagagcaatcatgagctcagataaccctcgtcatctcgcgggaaaggtcgccctcgttacgggttcctctagaggtctagggcgcgctatcgcccttcgtcttgccgaatgtggtgccagcgtggttatcaactaccgatctaatctcgctgaagccgaggctgtggctcgtatagcggaggggggcggtgccaagactctaattgtgcaagcagacgtttctcaggtcgatgaaatagggcggctatttaaagaagtggttgagcggtttggaaggttggatattgtagtggctaatgcaggggtcgaaaaagtaaatgttcctgtcgtcgatgtgacagaagacgatttcgatacgctttttcgcataaacactaaggggccgtattttgtaatgcaggctgctgctaaatatattgaggatggtgggcggataataaacatctcttcgtcgtcaaccgcgcgtccccagccagggctcggactttatggaacaagcaagtcggctcctaagtaccttgttcgggtcttggcgctagagcttgggcatcgtggaatcactgtaaattctcttgttcctgggccgatagatggggctggtatatttaccggggtggccgatgatgacccttataagagtggtcttttggctactattcctattgggcgtcttgctacacctgataatgtcgctgattttgtggaatttttagctagtgacaaatcgattttcatcacaggcgaagaggttctcatgaatggcggctcgagtaattaa

SEQ ID NO: 347408 - DNA, 774 bp, Pseudomonas aeruginosa
atggttgaccatagtatcaagggcaagaccgtcatcatcgctggtggcgccaagaacctcggtggccttatcgcacgtgaccttgctgcgcatggcgcgaaggccattgccatccactataacagcgcgcccagcaaggcggacgcagatgacaccgtcgcggcgatcaaggcggcaggcgcagaagcagttgcctttcaggctgacctgacgagtgcaggtgccatggagaaactgtttaccgatgtggtagcggctgttggtaaacccgacattgccattagtaccgttggcaaggtgttgaagaagccgatcatcgatatctctgaaggtgaatacgatgcgatgagcgcagtcaatgcgaaagctgccttcttcttcgtcaaggaggcaggaaaacaccttaacgataacggcaagatttgcctgctcgtgacggccctacttggtgcctacactcctttctattctgtctatgcaggcaccaaggctccggtcgagcacttcgttcgcgcagcatccaaggagttcggcgagcgtggtatttcggtcaacgccattggtcctggcccgatggacacgccgtttttctatccggcggaaggtgcggattcggtggcatacctcaaggcagcggccgcgctagccaagtcttccaagaccggtcttaccgatatcgaggatatcgtgccgtacatccgtttcatggtttccgagggatggtggatgtccgggcaaaccattctcgtcaatggcggcttctcgacgaaatga

SEQ ID NO: 347409 - DNA, 660 bp, Pseudomonas aeruginosa
gtgtctgaaaccttcaaggagttgtgtcttttcgtgatcctgaaggtcagatcggagcactatgcctcctatctgaaggccatgcaagatgaggtgtccggtgcccgtagcgagccgggcaatcttggttttgatttgttcgaagatattgagcgatcaaatgtgctctatctgctggaacattgggccagcaggggcgcgttgcaacatgaacatgcccgtcagtcttattatcgaactgtgcgcgccatggaggctcaagccctggatggagacgtccatgaacggcaactggaggagatcgagccgaatcggcctcgcgactcgagtgtcaagagcgttggtggtgcgttcgcacaggtgattattctcgaatctggggacgatgggattatcgcgatgcttgatagggtttttcgcgagacagtggcatcgcttcgtcaggtcatcggaaacaggatgctgtcgatgttccgtaatctagaaaatccccatgagcgcctattgttagacatatggagcgatgaagcttcccgcgatatggcgtggggccaagttggtgcgcgagggctggcgaagcttttggaagacacccgatggtccggcaaaacaatgttccggttaggtgatcgtggtaacgactttatcgggtgggggtga

SEQ ID NO: 347410 - DNA, 1803 bp, Pseudomonas aeruginosa
atggcttccgagtcgctttctgatgcagttgaatctgcgtctcatcatggcttcgatctcgtccctgtagtcgtgctacttggcgcagctgttattgctgtgccgctattcaagcggctggggctaggctcggtactgggttatctcgcagcgggtcttgtcatcggtccgtttggtatagggttgttttctgattcgcagtcgattcttcaggtggccgagttgggggtcgtgatgttcctcttcgtcatcggcttggagatgcaaccctcgcggttgctatcgatgcgaggagaaatcttcggactcggtctcattcaggtagtgctctgcattggcctgctcacctgtgtaggtttggtgttgggttactcgacggcgcaaagctttgtcgccgggaccggcttcgtgctgacctccacggccattgtgatgcaaatgctggaggagcggcgcgtactggggcagccaaaaggacgtcggatcattgcgatcctgctcttggaggaccttaccattgtcccgctattggcactggtcgcctttctcgcccctggtggcgaaagcgctacgcttgccgaccgactgggcgatgttgccattggattttgttccattgtgggcttggtattggcggggcgctatctgctggatccgctattcagcctgctcggcaaagccaaggctcgtgaggtaatgactgcggccgcgttgcttgtcgtccttggtgcggcgttggctatgcaacttggcgggctctccatggctatgggggcctttctcgccggcgtgctgctgtctgagtcatccttccgtcaccagctcgaggcggatatcgagccattccgaggcattctgctcgggctgtttttcctcggggttgggatggcggttgatctctcgattattgccgataattggcgtttgatcgcggtggctgttgttgcctacatggctctgaagattctcggcatctacagtgtcgctcggttcttcggctcggccaatcgggaggcgttggagcgggcagtgttgatggcacaggggggggagtttgcttttgtgctttacgccgctgcctccacagtaggactaatcgaccgtgagggcaatgccatcctcacggcgactatcatcctgtccatggctcttactccagtcctagtcatcctgcatgaccgtctgcttccaaaggcggttccctcaatgactggggtcgatgccgtcgataacctaacggcgaatgttctgttgatcggcttcggtcggtttggccagattgtcagccaaccactgttgagctacgggtgttcgatctccatcatcgagagcgatacggatgcgatccgggatgggcgagacttcggtttcaaagtctattacggtgatggaacacgcttggacattctccgggccgctggggcggcggatgctcgcctgatagtcattgctattaatgatcgtgaggcaagtctgaggattgccgaccttgcccgcgttgcgtttccgttgatacctgtgcttgcacgctcgtttgatcgtgaacatgcaatcgaactcattaaggctggtgttgaatggcaggtccgagagaccttcgagtccgcgctggtgcttggtgagaaagccctcgaaatgatggatgctcccgacgaagagcgtcagcaggtcatggaggaggtgcgtcgccgcgatagtgagcgtttcgctattgagacggttgagggaatttacgcgggacgtgacctgattcaaggcaatgtgccacaagcgccggtgaatccgaaaaaggaccagagctag

SEQ ID NO: 347411 - DNA, 249 bp, Pseudomonas aeruginosa
atggagcaagtcgaattggaactgcgttttttcttctgcctgcccttcgcacactcggaaaacctttgcgatcaagatctctctgtccgcctccatgcgacgctgggtcagccttggctggagcatgctgaggagcatcgcgacatcattcgtagatttggtcgttttcctcataggaatgcgatgtttggtcggcagaacacccctgaagagtcagagtttctcctgaatggtggctttggtggctag

SEQ ID NO: 347412 - DNA, 150 bp, Pseudomonas aeruginosa
atgccatcacgggtgttgggagtgaccgtaagtgtaggccgcgtgcgcggcattttaggcatcgaacgtatcgtccttgccgcacttgcgccggtcgcttttctaccccgcctgccgaatgaacgcatccatatcagcatctgcttgtag

SEQ ID NO: 347413 - DNA, 1386 bp, Pseudomonas aeruginosa
atgaaaaaattattcattatactcttcctgctttttcccatccaagaaaccttatttgctcaagcctatacagatgagccagaggacgtactggcgcgacatccatggaatatcggagtagacagggtgtactggcgaaattctgatgggaactttgcagcagacctttggaggagcgcaaatattttttctttttatgagcataatcatgccccaaaccaaccaatattagttttagatggacgcgaaatatatagcccagccaatcacgttccagcatttgttgtacgcggtcatgatggggctactctcaggatgcgtttagaggccggagatgtatctatccggtttcctcaagaccgtaacatgaacagggaacagcatgtagagatagtttccatgaggactgtttttcagcatgcggttgatatatggaactcagcactagaagccaggttgcgacatcattcttcgacaagcaatttttggaacttccttagattgcatattcttcccgatggggaggattctggtccgtcaaattttattattcgcgccggccgtgcctcagaggatttcacttatagaaaccaccaaggagagactctggtggtactagcacaaactgtgctcccaatgcgtcctaatcttcaaatcttcatgatgcctccttacttaagaggaaggccgggtgtcattgtcaatccttcgattagtttggatcatgctcagtaccgcaggctgtatcgatttgttacgaataataatccagattttaggaatggggaattacctgccgagggacaagagcactatgctgagatagcactgcttatatatgttgtggtcgccacccatgaattaggacatgcactcggcttggcacatcctgatgcaccaatatgggatgagaatgagaacgctcggattttacgtcatggacagaatgtttgcatattaccgcagtggcctttgacctttgaaagggctagattggagacggccgatattttggaaagccgttatccaattaacacgccggcagattctagatatcgactggctcgttcatatcctataatggtaggcgaccctttaaattacatcgaggggctctttggagggcttatgcgaggagtcacagtaagtgatgtgaccccttctctgcaagagcttgcggctctggatgttgctgcgtcatgtacctatcaggatcttcctgaattgagaaaacgagatgtcagcgataagaaaacaggggcacctttagcatgcccagaagtgacagtttcgagcaactggagaaaattggttgttacactagtaggggtgattttttcttatgcaaccaaacaagcagcattacctaataaagttgaactttaa

SEQ ID NO: 347414 - DNA, 660 bp, Pseudomonas aeruginosa
atgagtttcagaaaacacactgcacaacagcaggcacacatcaacaccttccggttcatcaccggcttcctgtgcatggtcatcgttgtgctggcctactgcgtctgggaagcccgcaaggacctctggatccacattccgcccgacctgcgctcaggaagcacccggttgtggtgggacattccgccagagagcgtctatgcgttcggtctctacatcttccagcaggtgcagcgttggcccaaagacggcgaggtggactacaagggaaacctgttccgctacgccgcctacctcactccctcctgcaaagtcttcctggagaaagacttcgagtttcgtcgtaacgccggcgagctcaggggacgcgagcgcaccacctcggaaatccccggtcgaggcattggcgagagcaatggccgcgtgatccagcactcgatcaatgactggaccgtcaacctggacatggacagcacggagtattacgccggcgagaagatcaagcgggcgctggcccgctacccgttgcacgttatccgcgccgacgtcgacccggagaccaatcccttcggcctgcagtgggactgctactccgacacgcctcaacgtatcgagcttgaggagccggccgcccccaccaagcgggagggaggtctatga

SEQ ID NO: 347415 - DNA, 1200 bp, Pseudomonas aeruginosa
atgttcgccaatgtcgttgacttatatagatcaacaggtcgtaagccagttgtagatagcgccttttcctatgaggggggatacgacaaaggccttgcggataagcttgaagctctgaaagagctacctcagcactttggccgttttttggaagtggagacctcacctgaaaaagggtgctcatttacttttaagctaccatctaatgagtacggtaagttctttccagatatcaagacgctcttggctggtagtacttctattaataagggcgtgtttcctgaaaacatctacatagtagatctgaactggatgttttcagaaaagaatgcacccgagccaatagcaaacctcaagaaggtctgtaggctggtgcatctgctctcagagttggccataggggttgaccgggaaacgaatcgggcctttttcaatctatttttcgccctacctcaagatggagtgaagcctccgcgcacgttcctgattgctaccaaggttactcctgagatggcagaggtacggctgaatcatttggacctactggagcagattctccaccctaaaaattccagcaagcctaacctacttgagcgcgtgatgatgttcaggttgtccatagctgatgttttagatacggccggggactgtggtaacccattcatgattgtagttcaagaatggagtaagattctctctcaataccgaattaatcttcagtcttatgttcatggattttcattcgagaaggttcggcaggaggtcgctcgcgctgagctggagtatgcgaagagcttaagcgagattcttggtgatattgcaggcaagctacttgcgctgcctgtgtctgtcgccgggattttattggtatacaagagcaatgaccccctagaagtgtgggtgctatcagttggactagtggttgtttcgttcattctactgtcaacgattaagaatcagaagcttcaggtaaagaggcttcagcacagttttaccatggcgtttgaagattttgagtctaggattaatacatatcctagaagaattcaggagttgcttgcagaaaccgcaacccaacttgaggtgcaagtaagatcgttaaataatactttcgaaatattgggcaaggtttcgtggttgcccgtattaggcgttgcggtaattcttgcaaccaaagtagtactctttttcattgggtga

SEQ ID NO: 347416 - DNA, 1143 bp, Pseudomonas aeruginosa
atgtttttcctcaagcacgccatcatccatagcttcaccaaagaagctcacaccgacgtaattggtaatgtcgtcaaaaaagacatcgttctagataccgagaaccgggcgctaatcgcgttggcgcaaggcattaatggtctgattggcaccactggcaatagcgttgtttacggccagttttccaatgatgggcgacaagggcctttccctgctgcctttgatgcgtacaccggcaacctgcctgacgctacagcatttctttcgctctcacatctcgtgatggatcaactggtcgagcaggcagcaaagcgcgtgctgtcgaccggcggccatatcctgtgcgctctatatgagtcccaagggtcccagttcttcctggtcgccagcatgaagcagaggggaggcatccagctcgatgagaactatgtacccaaagagattcaggaaattgatctgaataaggtccagcaggctgcccgtatcaacgtcaatgactttgtatacatcacgcaccagcttgctcaggaagaggctgaaattgaggatgatgcggaggctaaagaagctctggaagagcgtattgatacgacttacctctgcttcgtaagccgcgggagagacagccaagcgtctgactatttcatctacgcgcttgggtgtgcgaaaggcgttgcatctggcagagctacgaaaggagcaatcgatgctgtcgtcgcgttctttcagtccaaaccagcgctaaaggggtttagctacaaagccaaagaagcggtaattaagtacctcgaaagacaactggaagataaaaagccagcgcgactggatggtgtttgcctcgcggctgtaaagaatgtgcccgaggaccttgccgagcatattgaaggcattaaggacttccttaatgatgagaaatataaggttccggtagagttctctgttaacgcaaaaggccttaaagagaagacccgaattaaatctgaggctgcaagttggtctattcagttcgagcgcggtgccttaggcaaagaggaagttgcagatgttttttatgatgaggaatccaagaggctaatcttgactaacttgcctgattctctaatctctctgattgaagaagagatagcaagcagggataaataa

SEQ ID NO: 347417 - DNA, 219 bp, Pseudomonas aeruginosa
atggagcgcttgctcgagagcatttacatcaatgctcggccggcaatggagttgaggcttagcctcaccagctccggccgcaagagaatggtaaagattgtggatggggaggaggtcgaggttctgccaggtgaagtgcagtgcatcctggaggcccaaaagagggatgttggaatccttgccgatttcttagccaagagcctcttggaacgtatatag

SEQ ID NO: 347418 - DNA, 186 bp, Pseudomonas aeruginosa
atggagagcttcttccgttcgctgaaggctgagcgggtgtacctgacgcgctatgccagctaccacgaggcgaaaaacgacctgttcgactacatccgcttttacaatcaccgtcgccgccactcgacgctgggctatctcagcccgatggagtttgagcggcgctatgcgagcagtaactcttaa

SEQ ID NO: 347419 - DNA, 246 bp, Pseudomonas aeruginosa
atgaaccatgacgacatactggataaccgcgcagaactgctccacaagcaggaggcggatccggatgacaacgacgatctgcgccacagtgagctggtttttgcgttgcaggataaacaccacatcttctcgcttagcttgagtaccatccttcagtgcttgaaaatggccgagcatgaaggtgcagtccccgaacttcccgagggttggtggagccggatggctaatcgatacaggctgaattga

SEQ ID NO: 347420 - DNA, 912 bp, Pseudomonas aeruginosa
gtggatgtctacaagttgaagccagaggaaatcgatgaacgcctaatcgagcgcgaacgtttcgaagaagaaactcgacggcaagagccttggttctccacttcggacaatggcacggtgggacacttcgccgtttgtcctgcctgcgacaacccagtacaaatcataggtctttatcatttgcccgccaatgtgtctcgtccctatgggcgtcattacgctcgttcggttcaagatcttgccccggcggatgaagaggcgcgagagaactgcccttatttcaaaccaagggtacaccaaaagacagagcggaaagcctcggtaaacggcacgcctctgaaaatacttaaaatactaatcgcacaattcgacagggttgtctacctgttgcagaaagaactaggtgtgaaattctctaaaaaccttgctctccggatgctggaacagtacagaagggaaagaggatatctttataccggggcaacgctgaccaatataccctgggtatttgcctatatggctgattctcagagtctttttggacagcttttgctcgatggtgaactcgttaatacagtctccgctgaagtgccggcagcctcgattgatgaatatggccgagtttcctcgaaggtagatgaatcagggagaaaggagtatttcgatctcaacatgtgctttgtgaggcaccgatttcgtaaggacagccttgagggtgagctggtcgaggggatggaaatgctggtttccacaaggcggaaaggaaaggctatcgatatatataagaagtcgattgtatttaaccgtcagtacttccaaagtttgattgctttgcccgaggatcatccgcacagagacaatagcctggtcgaggcggcgcggcgggtgctgggagacttgctgcacgaatga

SEQ ID NO: 347421 - DNA, 273 bp, Pseudomonas aeruginosa
atggcaactcgaaacgtcgtccttcctgatccgatggagcaggacatcaacgagctggtggagaccggccgctatcaaaaccgcagcgaggtcatccgggcaggcctacgcctgttgctgcagcaggaagcccagaacagcgccaagctcgaagccctccgcaacgcaacatccagtggactgatgcaactggaacgcggcgagtacgacgagatcaccagcgacgacctggcccaatacctcgacgagctcggcaaccaggcgagccactga

SEQ ID NO: 347422 - DNA, 273 bp, Pseudomonas aeruginosa
atggcaacgcgaaacgtcgtccttcccgatccgctggagcaggatatcaacgagctggtagagaccggccgctatcagaatcgcagcgaagtcatccgggcagggttacgcctgctgctgcaacaggaagcccagaatagcgccaagctcgaagccctccgcaacgcaacatccagtgggctgatgcaactggagcgcggcgagtacgacgagatcaccagcgaagacctggcccaatacctcgacgagctcggcaaccaggcgagccactga

SEQ ID NO: 347423 - DNA, 444 bp, Pseudomonas aeruginosa
atgcaacagcagacctggactaacccccttcttcgtctctgcgccggcctggcctgcgcgctgaccctggcagcgtgctccaccagcaaggaggagatgctgccccacggcgaggccaacatgctcgacgtctgggagcgaggtgcgaccagctcgataggcaacagccgtggccggctgctcctcgatgccaggcaaacgctgcggcgcccaatcgatccgcagcaggctgcctccgcgaatgaccaggccgactacacccgcacggccagcaacgagatccacagccagttcaaacgactgcccaatcccgacctggtgatgtatgtgttcccgcacctggccggcagcgatcccgccccggtcccgggctacaccaccgtgttccccttctaccagcgagtccagtacgccatgccgggcgaacgcacggaggactattga

SEQ ID NO: 347424 - DNA, 123 bp, Pseudomonas aeruginosa
atgtatgtgttcccgcacctggccggcagcgatcccgccccggtcccgggctacaccaccgtgttccccttctaccagcgagtccagtacgccatgccgggcgaacgcacggaggactattga

SEQ ID NO: 347425 - DNA, 1965 bp, Pseudomonas aeruginosa
atgagtaccttgcaaccctggatcagtgatctgcgcactgcggtcaagctgggtttgcagggaatgttcaaagagccgccgatgacggcggtggagtgggccgacaagcatttctacatgtcggccgagtcctcttacaacgagggccgctggaagaccgcacccttccagatcgcgatcctgaacgcgatgggcaacgacctgattcgagtggtcaacttcgtgaagtcggctcggatcggttacacgaagctgttgctggccaacatcggctacaagatccagcacaagcgccgcaacgtgatgatgtggagtccgaccgacccggacgccgaggacatcagcaagagccacgtcaatggcctgatccgcgacgtgccggtcatgctggaactggcgccctggttcggtcggaagcacagcgacaacaccttggacaacaaggtgttcgcgaaccgccgcaacctctggatccgcggtggcaaggcctcccggaactaccgggagaagtcgcccgacgaggtgatctacgacgaactgtcgaagttcgacgccgacgtcgagggcgaaggctcgccgacattcctaggtgacaagcgcctggacggtgcggtctacccgaagtctatccgggggtctacgcctggggtcgctggcagttgccagattactaaggcggcggaagagtctccgcaccggctgcgcctgcatattgcttgccctcactgtcagcgggaacagcacctgaagtttggcggaaaggattgtgagttcggcctgaagtgggaaaagaacgagctgggtgaggccgagcgcgcctggtacgtctgcgagcactgtgcagcctgttttgaacaccgcgacatggtggtggcccaggctaaaggccgctggatctgcgacgagaccggcatctggacgcgcgacagcatcgactggttcggcccagacaacgagccgatccgcacgccgcgctcggtcagcttctactgctgggcgatctacagcacctggacgacctgggtgtcgttggttgacgagtggctcaaggtcaagggcgaccgcgagaagctgattaccttcatcaacaccacgcgcggcgaggtgtgggaagaggagcagggcgaccgcgtggagtggcagacgctctatgcccgccgcgagaactacccgaaggtgccgccgcaagcgcttgtcctgatgggtggaatcgacacccaggacgaccgctacgagggccgcgtttgggctttcggtcttggcgaggaggcatggcttgttcaccgtttcattctgaccggcgatccggccagtgaggagttgcggcgtaaggtcggcttggaaattcaccggcagttcactcgggctgacggcgttccaatgcgtgtcgagcgttggtgctgggatgccggcggccactatgccgatgaggtagaggccgagagcgtcaagcatggcgtgcactgggtggttccgactttcggggcgagcacatacggcaagccaatcgccaacttcccgaagcggcgcaagcgcaaggtctacaagaccgaactgggtaccgacaatgcgaaggaactgatctacagccgcctgcgcattgatgttcccatcccgtggcaaccgacgcccggctgtgtgcacttcccgatcgacagcgacatctgcgacgaggacgaagtgaagcagatcaccgccgagaagaagaagccggtgatggcgaagggtgttcgcgtcctgcgatgggactccggcgggcgccgcaatgaggcgctggattgcttcgtgtacgcccttgccgcgctgcgcatcagccagcagcgcttcggcctcgacctcgaccaacttgagcgcgcgcgcgttgatcccgtgccggagcaggtcgcccaacagcaaccctcgaacgaaaaccatgccagcacctctcggggctggctcaacactggaagcggaccatggctctga

SEQ ID NO: 347426 - DNA, 627 bp, Pseudomonas aeruginosa
atgcacaacgtatccaagccaactcttgacgatctgcctacatcgaagcaactactgcgttcaacatttattgcgatcgtcgccgccatcgtagttctggtcgccttcgtcctgccttccgagtacgcgatcgacccaacaggaattggccgtgcgctcgggctgacggaaatgggagaaatcaagacgcagttggccgaagaagctgctgccgacgccgcaatggatgcggctcaggccgccaccgtgacgacaagaaatgcaagcgccgccgctcctgcgcaggcgcaaagccaggtgacgagcgattcgccttggcgcgatgaaatgcgcattgcactcaagcccggccaaggggccgaagtgaagttaatcatgaaggccggcgaacaggccgagttcagttggatttccgaaggtggcgtagtgaacttcgacacccacggcgatggcggaggacagtccatcagctatgagaagggtcgcgctgtgcccgcaagtgatggcgtgatccaggccgcctttaacggcaatcacggttggttctggcgaaaccgtggggatgccgatgtgacagtgatcgttcgcactcgcggtcagtacgcggaaatgaagcgcgtcctgtga

SEQ ID NO: 347427 - DNA, 264 bp, Pseudomonas aeruginosa
atgaagattcgtccatttttgattgccgccctggctagcacgttgctcgcttcgccgttcgtgatggcccatcccggtgggcatgatgacgacgagaaagcgatgccgaagacatgcgagcaattggctgataccaagcggtacatcagcgatgtggcttatcccgaagtgaagaagctgaaagagcagtgcgacgccgcgaagaagaagccgactgccacgcagtctccggcaacccgccgctcgtccagcggcgggaactga

SEQ ID NO: 347428 - DNA, 702 bp, Pseudomonas aeruginosa
atggagcagatagtcgtaaacggtgttttcataggtaaagtcgaagaaacctggggcggattggtcagcgcgatcgacaagctgccggtcgagcaggagttctggctgggccacgatggcctgcccggcgacgaacaggccgacatccgccaccacggcggcctcgagcgcgctcttcatcactatcccgccgagcactaccgctactggcgcaagcgccacccgctgaaccgctggcaactgccggcgttcggcgagaacatctcgacctacggcatcaccgaagccgaggtctgcatcggcgaccagttccattggggcgatgccctgctggaagtcagccagccgcgttcgccctgctatcgccagggccagcgctggaatcttcccgagctgcccgacgaattgcagagcggcggccgctgcggctggttctatcgggtcctgcgcagcggcatggtgactcccggggacgagctgaagctggtccagcggcattaccctgaactgaccgtcgcccgcctgttgcagtggtatttcggcgatcccctggagcctctcgggttgcgccagatgatggcctgcgacgcgctctcccagcgttggcgcaagacagcggcgaaacgcctgtccagcggcgtggtggaagactgggggccgcgcctgcgcggaccgtcggattaccgggagcatgcctcttga

SEQ ID NO: 347429 - DNA, 387 bp, Pseudomonas aeruginosa
gtgatcgccgcctacgcccacgagatcgagcggctcaagcgcgagcgcggctacatcaccgtggacgtggtcagcctgaacagcgaccacccgcagaaggccgaattgcgcgccaagttcctcgacgagcaccgccatggcgaagacgaggtgcgcttcttcgtcgccgggcgcggcctgttcgtcctgcatatcgaggagcatgtctacgccgtgctctgcgagcgcaacgacctgatctcggtgccggccggcacccgccactggttcgacatgggcgagcacccgcatttcgtcgccgtgcgcctgttcaacaacccggagggctgggtcgcccagttcaccggcgacgacatcgccagccgcttccccctgctggaagactga

SEQ ID NO: 347430 - DNA, 2055 bp, Pseudomonas aeruginosa
atgactttgacttctgatagcggcaatcttgacctggatctcgacgctttgctgaaccggttcttcaccggcaaggtagtacgcaaggatctgaccaagcgtttgaaggaaggcatcaacgttccggtgtacgtgcttgagtatctgctcggcatgtactgcgcctcggataacgaggaggtcattgccgatggcttggaaaccgtaaagcgcatccttgctgaaaactacgttcgccccgacgaggccgaaaaggttaagtcgaagatccgcgagcgcggcagtttcaaaatcatcgacaaggtttctgtaagcctgaacgagcgcagggatatctaccaggcgctatttatgaacctgggcgtcaaagatgccgaaatccccagccgcttcatcaaggagtttgagaagctccttgcgggtgggatctggtgcatcgttaccttgaattacttcttcgaggaaggggccaaaggttcgcctttcacggtgcatgatctcaagcccatccagatgccgaacatggatatggacgcgttgcttgaggcgcgcaaggcgttcagtgaaagcgagtggattgatgtgctgctgcgctcaacgggcatggagccagctcatttcaatgaccgcacgaaatggcatctgctgacgcggatgattgccttcgtcgaaaacaacttcaactgctgcgagcttggcccccgagggacaggtaagagccacatttacaaggaggtcagcccgaacagcatcttggtttccggcgggcagaccaccgttgccaacctcttttacaacatgtcgcgcaggcaagtcgggttggtcgggatgtgggatgtggtggccttcgacgaggtggcgggcatctcgttcaaggacaaggacggcgtccagatcatgaaggactacatggcctcgggctccttcgcccgtgggcgtgactccatctcagcgtctgcgagcatgatgtttgtcggcaacatcaaccaaccggtggacaccttggtcaagaccagtcacctactggcaccgtttccaagcgcgatgatcgactctgcgtttttcgaccgtttccatgcctacatccctggctgggaggtaccgaagatgcgccctgagtttttcactaatcgctacgggctgatcaccgattacctggccgagttcatgcgcgagatgcgcaaacgaaactttgccgatgccatcgaccgtttcttcaaactgggcaacaacctaaatcagcgtgacaccattgctgtacgcaggactgtatcggggcttctgaagcttctgcatcctagcgctgactacgaccgcgaagctgtgcgccgctgccttgagtacgctttggagacccgtcgccgtgtgaaggagcagctgaagaaaatcggtgggatggagttcttcgatgtgcacttctcatacatcgacgtcgacaccctggaggagactttcatcagcgtgccggagcagggtggtggcggcctgatcccagaggggcagggcaagccaggaacaatgcacctggtgtctaccggtgccagtgggcacttaggactttaccgcttggaaacccagatcactggcggtagcggcaagctgaatatgtctggcctcggaagcagttcatcagcgaaagaggccctgaaggtcgcattcgactacttcaaggccaacatcaatcgggtgagcgcagcgtcaaaggtgggcgaccatgactaccacctgcataccgttgagcttcacaacacgggcgctcccaaagccctgaccctcgctggcttcgttgcttactgctcagcattgatgcagcggccactgcaagcgcagatggtggtacttggcgacatgagccttgggggaaatgtggtgccagtagaaaacctggccgaatgcatgcaagtggctttcgatgcgggagcgaaacgtatcctcctgcctatggccagtgtgacggacattccaaccgtgcccggtgaactgttcgccaagttccaaaccagcttctatagcgatcctgtggatgcagcgttcaaggcgcttggtgtgagctga

SEQ ID NO: 347431 - DNA, 2622 bp, Pseudomonas aeruginosa
atgtctgagctatccgcacaactcgccaggatcatcgatggtctgcaacagcagttcgcatccagccgtgtggtgtggtgggaggatccgcagggcgaattcagtgagaccctggataccctgtcactggaaaatgtgcaaattgtgcgtcggtcagttatgccggcgctcgcgatcaagcagcagatcgagctgctgaaccctgtcggtcattttctgatttacgaagacaatgctcgccctgagccagagcaggattggctgctggatattcgtttgtatgcagcgccattcgccgcagaccggacgtccatgctcttgcaggaactggggctgcgtcagcagactttgcgtgagcacctgaaactgcgtagcgcgttctttgccagtaaagatcgagttaccaagctccagcgactgctcaatccagaggacgatgaggcgtcgctggatctgaagatcctcgcggtactggccaaggttgagcaggctgaattgtttgcggtgctcacggccattttcgccaccttggccgaggctgaggagctggaaaacaaccccctgtgggagtcgatctgtaaattcgacatgcagccggtgttctggcagttgatgttgcaggctttcggttatcagcatggtgagccttccctgcgtcatttcttggtgcgtctgtttgctactgacatcgggcatgccttgcatacccatgctccggccaacctcaaggcccttcagctcaaccccgcacgcgctgccaatgtcgcggtattcctgtcgcagtggcgcgacagcaccttgcggcagcgtgcttatgatcgcttgtcgaaacgagtggcggcagatttgcgcccgactgaactgttggctcaggtgccaatggaagcgctgatggccgtcagtacctttgttgatgttgagcgtcagattgccgagcgtttgcgcgatgccgtgctctctaacaccagccaagcggttggcctgacattgcgggatatggccagccggcgcatggatggttactgggccaatcctcgctggccggataacgaggatgccaaccggtcggtgtggtacgcctattaccgttcgctgattgcagcatccgagctgttcgaactgaagttgcattatgccggtggcttttcttttgcgtccgctgaagcctgctatagcgcctataccagcgagctttatcgtttcgatcagctctatcggatgtatcacgaagccgctgatgctgtgtacgcgcgcagcccggatgccttgtccccgttgacctcacgggttgagcaggactacctgaacggcttcctgcaaccactggcgcagaagtggggcagttttgtcgatggtggcctgctgcaacagtggcaattgcctgagatacccaatcagcaaaacttctatgcggagcaggtggaacgctatctgaaaggtggcgaggatcgccgggtgttcgtggtgatcagtgatgcgctgcgctatgaggtagctcaggagctgagtgagtcgctcaatggtaagtatcggttcgccgcagagctaagtagccaacttggcgtgctgccgtcctacacgaagctcggtatggccagcctgctgccgcacaaggcactgagctacaccgatgtgggcctggtacaggtggatggactgagcagtgatggtctggaggcgcgcaacaagattctagccagcgtgaatggtctggccatgcgtgccgaagacttcctgactatgaacaagactgatgggcgagagctgatcaagccttaccgtgttatctacatttatcacaacaggatcgatgcggttggtgacacctcaagcaccgaaatcagcaccttcgctgcttgtcgtgatgccattgaggagctggagtccatcgtcagtcgcatcatcaataacctgaacggtcatcgggtgttggtcacagcggatcatggcttcctgttccaagactcagcgcttgaagctctagacaagagcaagctggtcaccaagccctctggggctgtggtctcgaagaagcgctatctgattggtcgcaacctgggcagtagcgagcaggtgcatgctggctatattagggacaccgcaggcatcagcgacgacatgatgttctggtcaccacgtggggtgaaccggttccattttgtcggtggcgcacgctttattcatggtggtgctgcgttgcaggaagtggctgtaccagtgctcaaggtgcaacaggtacgcggtcagaaggccaaagacacgacagtgcgtaaggcgcaggtcacggtgttgggtaacaacttcaccatcaccaccaaccgttatgtgttcaatctgttgcagacggaggcggtctccgagcgggtgctgccggcagtgctgcgcgtagggctatacgatgatgctggtgaggccgtatccgccgtggagctggtttccttggacagcgactctcagaatctcgaccagcgccaacgcaaagtcattctgacgctattgaaccgaccgttctcctcaagcgaacgctacttcttaaagctgcttgacgccgaaaccgacgttgagcagttccgaattgatgtccgtatcaacctggcgattagcaatgactttgacttctga

SEQ ID NO: 347432 - DNA, 963 bp, Pseudomonas aeruginosa
atgaaagccatcacgcctgatcaggctgaactgatcgaggcggtactggctgagcttgatgtcggccttttgactgccagcatcctggagaaggatgttcacgttaccgatgccctgcgtgtggttttggatatacagcatccagctacccgcttggttttctgtggcggcacgagtctatctaaggcttatgggttgatcgagcgtatgtccgaggatgtcgacctcaaggtcgtgcttgatgagccgaaaattggcggggcttcagccatcaagaatcacctgagtcagttgaaggctgaggtgactcaacgtctcgagtctttaggctttgtcgaggataaagatgctcgtattgcccgtaaccagaatcgctattttgctacccgctggctgtatgcatcccgttatgcgcatgacaccagcttgaggccctatttaagccttgagctgacggttcgtgccccgcagtttgttaccaccattcagcccttgggttacctcgtagaccgcctggcatctcgcccacaactccaagggcggattgagtgtgtggcgattgaggagacgctggcagagaaggtgatttcttttttgcgtcgttatgcccaacatcgtgcaggcgcgatgcaccagtcgtgggataaaacgctggttaggcacgtttacgatgtgttctgcatctgccgtattgattcgcaggtcacggtaaagggcgccgaaggtttccgggcattggtgcaattcgacactgaggagtttggccagcaatttccgccgttcgccgttgcggcaaaggacacgctacacgcagcgctagtgcaagctgagcaagatccagcgatacgccaggaatatgaaaagcacctgattccgctggtgttcggctcggtgcgtccgagtttcgatgaggcctatggtgtttttcgccagcaggctgaatacctgattggtaggctttga

SEQ ID NO: 347433 - DNA, 1071 bp, Pseudomonas aeruginosa
atggagtccgcaggttcagataatggactgctagggcttatgtctattatgggggcgttgtctgcgccagccaccgcagccgtagttgtcctgctttatcaggtcatcgcaattgtttctgtttggcgagcaactgctcaaaagcacgtttcattttgggggcgatggttaactagatatgcaatctgtttcaatgtctttgttgccgtattggtggtttcgttttgcctggttggtctgggtcttgggttgattctatattttgctgtccgtcatttcgtcttgaagaggaaaacgccagcgactgagttgcaagatgaaatagcgaagctggcatctgctacacctgttgagaaagcagatggtggaagtgttgagatcgtgcttggtgatctttcttctggtgagccaatgttggagcaatacgttcagtgtttgaactccaccgggagtttggctgagcgtattcatgtagttccaaatatttctccagaaagactgagggctgctattcgtgctcgtcattttgcagcggccctgggtaagcaaaaagcattgcttcttattgatgactcacgaggttttacaggaaaagaaggcttgctggtaactgatcagaattttgacttcaagcctgtctcaggtaaagcctcttcctatggatacagattgggttttgatgggtttgaaattaaaggcgcttcgattttcaggatgggggaggagtgtatttcctttcgtaatgtagacgctgaatctgtggaaaaagtcttcatgctattgaattcgtatttttctgatcaccggtcttggtgcgagagaatggctaacgaaggtgacagggacgcgcagttcaatatgtccatgtatgcgaaagataaaactgaagctcttgagtggctacgtatggctgccgagcgaggccatgctattgcgcagggcaacttaggcgctgagctggcaggaagcaaccttgaggattcttattattggctgtctcgggccgctgagcagggtaatgaggtttctattcagaggctgtcttcgacgcgatatgacattttccgttga

SEQ ID NO: 347434 - DNA, 2415 bp, Pseudomonas aeruginosa
atggaactaatcgattttttcaaagacaagaaatttgccggctgtgaacgaatttatattcgcccgcatatccccgccaaacagttaagtaatgctgtaggcgcttacagtgtgcgcgttgagccgaaggaggtggtcgttttgatcgacgacacagccttcggcagtggcaaagacgggatcttgatttgtgagaatcgattggtcatacgcgaagtgttctccagtgcacgtgcctatgattacgatgcaatcgactccatcagctgcgaggggcggcggctctttattaatgagcgcgaagcttacaagctggttcagcctgacaagcatgatttggctgatttttttgaactgatgaaccaatggatttcacgtcgtggtgcgtcggccgcgcagatccgcgaacctcgtgcagctgcacctacaagcggcaaagccaatgcgggtatgggcgagttcctctatgacgtgggccgcaaggttgtttccgacaaggtctacgtccgtccccatattccagcgaaaaagctacagtccgccattaatgcatacggtaatgggctatccccggaggatgtgataatcctggtcgacgatacagcctttggtagcgccaaagacggtatcttgattacggataagagcatttatataaaaatcttcaccgaatccctgcgcgcctatgaatgggaagtagtggagtcaattgatattgaaaaacggacgatttatatcaatggtgctgcttcaggaaagcttgtgcaggctacagaaaaagacattggccagctatttgacaagattgaagagtttttagctggtcagagccactcaggtgaaaaaaaatcactaggccaagcgtctacagcccagcgcgaggcgtctctggaactaagtttcgacctggaagaggtgttgccgcaggctaatcggcctgaaagcgtgcttgagacggggcaggtagcagtcgctactaatactgtcatcaatgctgttgaagcggaagggggtagtcaatcaaataataaattggccagttatgtctccacgctaattgctgataataaatcaaagataatcccgttgctaaaacaaaaggcaggcaacacttcgttagctgcgttgcaggatgatgccagtattcagcgtttgtcagaatatttatatgagcgtttgccttcagttgtgaagctcgcagtgagcgtggatgcattcaatcaatttatgatgaataaccgcgaaaaactgctcgcgaagctgttgattgaggagcaatccacccaagaaatttctgttgtctcagtgcaggatattggttcctccactgtacagagtgaaacacaggcaatagtctcagtggtagaggctgaagtcatcgccaaccacccaggtgaaggatttgttgcgtcagccaaaacttctgaacacgtgccccccaaagattcgaaggccaaagacaaactactgggttatgtcgcgactgcgattgagcaaaataagtcaaaaattattcccttgctcaaggaaaaaaccggtgaagcgtctttggcagcattgcgtgatgacgccaatgtcgaaaagcttgctggctttctttatgcatttttgccggcagtagtcaggcttaccttgagggaagaaatttttgttcagtttatgctggataaccgaaacaagcttttagataagcttgttcagagcgatttgctgcctgctccttctgcaagtcagcagttcttagggcaatcgctagaaaagtcagatgattacgaaagccaactcatggacttgctgagcgatgatcagccttctggtgattctggtggttctggtgattctgtagtcgccattcttgaacgcgtggttcagagcttgaggcgtgaggccgtagatgaccccgaatctaaatttctgttcgatctggcggttagtcacctttctgtgttgattttgaaggcgaaaaatattcaatctttttcacgggagaaagtagaaagtcaagttgggtttatgctcgcgttcatgtatggattctccttccataaaattccggaatcgattcgtaggcaggataatatttttgaggcttacatgacgcctctgcttatgactctggataagtacaaggagttttgtggttacgacctgcttgaacaggacggtgagtcgtttaccatttttgcgtatggcatggcaaaaatgctcagcaaggatcagctgaatcagatggtgagaaagattattgatgagcataagcacaaatctgttccgggggattttgcgcttgacgatattatgtctctgctgagggacgctaatgccgctgctgagcgttgggtcgttgagttgaccaaggaagctattgcggatgagcgagaagtacaacgcaaatggggtgatctactgcgttga

SEQ ID NO: 347435 - DNA, 324 bp, Pseudomonas aeruginosa
ttgcaccgctataacgagggcacgctctcgcgtatgcgcatggaatacgtcgtgccgctgcaaagccgcatgcaggctcgtatcgacaagctcaccgacgacatcgacagcgctaccagcagtgcccaacaaaaagccctgcaaaagcgcaaagacaaactcaccaaacaactcgaagaactccgccgctttgacgaaaacctacgcccctacgccgaccaacgcatcaccctcgacctggatgacggcgttaaggtcaattacggaaaattcggtaatctgttggccgaggttaagacgattactggtggcaaagaagaataa

SEQ ID NO: 347436 - DNA, 339 bp, Pseudomonas aeruginosa; identical to SEQ ID NO: 332086

SEQ ID NO: 347437 - DNA, 693 bp, Pseudomonas aeruginosa; identical to SEQ ID NO: 344394

SEQ ID NO: 347438 - DNA, 987 bp, Pseudomonas aeruginosa
atgtcgatcaccaagctccccgatggccgttggttcgtcgatgtagaaccgatcaagggcaagcgctttcgcaagcggttcaagaccaagatggaggcgcagcaattcgaggccaccgcgcgtcagaagtgtgcggaaaacccctgctggatgctcaggccgaaggaccgtcggcgtctctcggagttggtcgaactctggtatgaactgcacggccagaccctgagcaacgggcatcgttgcgtggcgattctgcggttggtggcaaaggacctgggcgacccggtcgctgtctccctggagcctgcgaaagtggctcggttgcgtagccgacagatagccaatggcatgtcgggcaagaccgcgaacaaccgtcttggctacctcaagtccatgtacaacgaattgcgccaactcggcgtcattgactatgagaatccggtagggcgcatgcggccgctcaagcttcaggaaagaccgctgacgtacctgaccaagcatcaggtgtccgaactgcttacggctctggatgcgcgcaccacgtcgccacatccgaagatggtcgctcgtatctgcctcgcgacaggggctcgatggggtgaggctcaggcgctgacgccggagcgtctgaaaggtaatacggtgatcttcgccaacaccaagtccaagcgtgtgcgctcggtgccgatctcggaacaactggccgccgacattcgccggcattggcagacccacgggccgttcacgaactgccttggcgtgttccgcctagtgctgctgtcgacctcgatcaagctgccgaaggggcaggccagccacgtactgcgccacacgttcgccagtcacttcatcatgaacggtgggcacatcgtgacgttgcagcacatcctggggcacgcctcgttgtcgatgacgatgcggtatgctcacttatctcaggatcacttgtccgaagcgctcagattgaaccctctcagtgtctgttag

SEQ ID NO: 347439 - DNA, 1278 bp, Pseudomonas aeruginosa
  misc_feature (943)..(943): n is a, c, g, or t
gtggtcgacacgccccaggtagtccaccagcccatcggcacgtgcccgggtcaggtcgccgctgcgatagacccgctcgccgttgccgtacggatccgggacgaaacgctcggccgtcagcgccggccggtccaggtaaccccgcgccacaccttctccacccaggtagagctcaccggccagacccagcggcagcaggtccaggtccgcgcccagtacataggccctgcgacgtcccagcaaggtaccgataggtgcgtaagccgcaccgcacggatcctgcggacgcgccttccacaacaagggcgtgacccccgtctcggtcggtccatagcctttgaacaggtagtccgggcgcaggctttcccaggccagctcgtagctggcctgcggcaccgcgtcaccgccgaagcagtacacccgcaccggcggcgggttgccgtcacgctcggcatgctcggccagttgctgcaggtacaccggcggaaagaccccgatggtcacaccgtgacgatgcatctgcgcataggtctcctccggcagccagatactgtcgtcgcgcaccagcacccgcgctccgttgatcaacgggtgcatccagccttcatgggcaccgtcgaaggcgaacgacatgaaatgcagctcgcagtccgccgggctcgtctcgtagcgctcgccggtcgcacggatatgcgacaccagcggtccgtgggataccgccacgcccttgggcaggccggtcgaaccggaggtgtagatcacgtaggccaggttttcctcggccagatcgacctccggcgcaccctccggacgatcctgccattcgcccggatcgtccaccgccaggctcgccaagccggcgggcaacggcagacgctcgagcacgtcgcgctgggtcagcaccagcgccgcgccgcaatcctccagcatgtagcgcaggcgntcggccggataggcgatgtccagcggcacgtaggcgccgccggccttgagtacggccaggaacgccaccatgatctccgccgaacggcgcatggcgatggccacccgcacctccggacccacgcccagttccaccaggcgctgggccaggcggttggcctggctgtcgagttcgccatagctcagccgctgctcgccgaacagcaccgcaatcgcctccggcgctcgacgcgcctgctccgcgaccaactggtggacgaacggccggctcggatagtcctcaccggtctggtcccagcgcgccagcagcaggtcccgctcggaacgatccaatag

SEQ ID NO: 347440 - DNA, 1128 bp, Pseudomonas aeruginosa
atgccgctctggtgggcgatgatgcacgccctgtccaagggcttcaccagcggcgccatcgcggccattccgtgcggcgcggatctgcggcagatgcgaatggaagtggacaacacgcgcgtgaacaacccgctgctggcacaagaaatcgctgatttctccagggactgctacgggccttcccgtgcgcggctgttcatgcggcaacccgacctgggctccgtcgccgaggacaacaaggcgttgcaagacctgaactggatcggctcccgattcctgttgaacaccccggggtactacgacaccgactactcgaagagtccccgtcagtcgtggccctacaacgccacccgcgatgccggcctgcctcaggtgggcggtggtggcggctacccaacctgcaagcagtggtgggctgactcagggatcggcttgcgtgatcggatcaaggaccaggtggatccggacctgatgaccagcttcctcaagtgggcgaaatggttgaaccaggacgaggtgaccgaggctgtcattcgccaggtgatctcaccctccagccaggtcaagggtagcgtctacaccgattacggcgggcaggtgggcggcaccgtctggaacggcatcgcgagaaccgcaggaaccttcggcgttgcgctgggcagcctggcctacttcccggcgatggatatggtccgccaggcactgccgatggtgatgtcgttcctgaagatggcaatggtcatctgcattccgatggtcctagtcatcggcacctatcaactgaaagttgccatgacgatgacggtcgtcttctttgcgatgatgttcgtcgacttctggtttcagttggccagatatatcgacagtacgatacttgatgccttctatggttcgggatcaccacatctttcattcaacccagtcatggggctgaatacggcgactcaagatgcaatattgaacttcgttatgggttctatgttcattgttttaccactactgtggatgaccgcgatcggctggtccggaattcaagcagggtctgttctgaacggattgagcagagggactgagggagttcaagccgccggcaaggaagcaggaaatagagttaaaaacgcagtttga

SEQ ID NO: 347441 - DNA, 708 bp, Pseudomonas aeruginosa
atgcccgctcagcgtgccgtcccctgcattggcgaaattatcccagacttcatcaaatactgcggagcagtcatgggtcggcgccatcgacgccgaagcctggtcgaccaggcgccagcgaattcgcgccgaactggctccaacgaggtcgccgctcacacggaacctgggctcatcgctcgacagcagtcgtgtaggagtatcgagatagccaatcaggccacgccccttgggagcgacatccagcaccatttgcaagccttccgccggcaggccgggcaagccagcatcagcaccgaccagacgcaggtcccacaccccacgcaagcgaccacccaggcgcatacccgcggtatcggccagatcgagcacggcctcgtcggccgtgggcggttcctcttcttcgcgggccaagtgacggcgggtgtagtaagccaccggcaacgccgccgctccggtcagcgccaagccggccatgaaacctcgtcgagaaaccgtcatcgtcctacctgtgtcaaccgcgaagcccgctttatccagctagaacgttccgtccgtcggcaaatttactggcacgccaccaagcctcgacaccatggtcgagaggggccatggctaaattttccctctcccgcctcgttcctccctgacaggtgggcccgcttcgacaggcaaccgccggcgctcctcgatctcgaccctgactga

SEQ ID NO: 347442 - DNA, 192 bp, Pseudomonas aeruginosa; identical to SEQ ID NO: 347313

SEQ ID NO: 347443 - DNA, 1482 bp, Pseudomonas aeruginosa
gtgcagtggactcacgaacagtcaccgatcatccagtcgaaggcatcgaagatcctggtgcgagccttcgccggcactggcaagaccaccaccctggtgggctttgccaaggcgaaccctaccctgagaatcctctatctctgctacaacagctcggtggagaaagccgcgaagggcaagtttccccgcaacgtagtgtgcaagaccgcccacagcctggctcatgcggtgtacggcatccagtacgcccacaagaagacgaagaacctgcgtctgaccgatatcgcccgcggactcgatacccaagactgggagttggtacgtgacgtgctggccacgctgaacaactacatggccagcgccgacgcggaactcggccgaccgcacttcccgcgcttccgcgacaaggcgttcctcaccagtgcccaggaacgcttcctcaagcagggcctggacatggcgcgagtagtctggaggcgcatggtcgacctccaggacaccggcatgctgatgccccatgacggctacctgaagctgtatcaactgagcaagcccgatttgagccagcgcttcgactgcatgctcctggacgagggacaggacatcaacccagtgatcgcggacattgcccattggcagcgcatcagaatggctatcgtcggcgatccccatcagcagctctaccggttcaggggcgcggaagatgccctgaacagcgactggatggtcggcgccgaggagcactacctgacccagagctggcggttcggccccgcgattgcgcacgtggccaacatcatcctctcctacaagggcgagacacggaaacttcaaggactgggcccgcagacgctggtgaaaaagtccctcccggcggaccttcctcaccgcactttcattcaccgcaccgttatcggcgtcatcgaaaatgccctgcagcgtgtgcgcaataatccggcgcccaagttctactgggtcggcggtatcgacagttactcgctgcgcgacctggaggatctgtacgcattcagccgaggcctgcgccaaaacgtccagaacaaaaagctgctccgggactaccgcgactacacccagtacgtggagatcgccgagatcagccaagacagtgaaatgctgcgctctatcaagatcatctcgacctaccctgatctaccggcgcggatcctcgagcttcgctcactgacccttgacgatgagctggacgcaacaatcaccttgaccaccgcacacaaggccaaggggctggaatgggatttcgtctgcctgtacgacgacttcaacgcggacccgctggcccccgacaccgacccaggcaagcgcgacgatgagttgaacctgatctacgtcgcagtgacccgcgcgatgaagatcctcgccatcaacagcctggtgctgtcgatcatgcagcggtacgtggacgacagaaagctgaaggagcagatagctagctgtgaaaaatga

SEQ ID NO: 347444 - DNA, 729 bp, Pseudomonas aeruginosa
atgttctgcatgggcgccgacggcgagatgttcaatcgcgaaggcacgccctggcctgaggccgaccttaccgtggtggatttcgcaacgtacgcgcgcgaaggctacgccgcccagctcgggatcgcctacatctcgctgctgaacaccgtgaacaacatcgccgaacgcgaccagttcaagggccggcccatcgtcaagatcaccgatgaagggcacatcatcaccaagcacccgctgctgctgccctacgccatgaagatcaccaagatgtggcggaaactgggcgcctggttctggctcgccacccagaacatcgacgacatcccagcctccggggcgccgatgctgaacatgatcgagtggtggttgtgcctgaacatgccccccgacgaggtagagaagatctccaggttccgcgagctgtcgccggcgcagaagtcgatgatgctctcggcccgcaaggaaagcggcaagttcaccgagggcgtgctcctggccaagggcaaggagtacctcttccgtgtggttcccccgagcctctacctggccctggcaatgaccgagaacgaagaaaagaaccagcgctacaacatcatgcaaaccaccggctgcgacgagctcgaggcggccttgcaggtcgcagcggatctcgacaaggcgcgcggcctgccacccttccccattgttttcccagaccaaccggcagtggagtgccaggacgaatga

SEQ ID NO: 347445 - DNA, 552 bp, Pseudomonas aeruginosa
atgcaaggcccccggggcgtgtactcgcctggcattgacccgctgaccgcgctgggcatcgaggcgcgatcagcagaggaacggcggcggtatgccgatctacaggtccaggccgaacggcgccgggtcgagaaggaactcgcctaccagcgcgcttacgacgaagccttcgcccgcgcctatccaggcgagggggtgatccgcctcaccgaaagcagcacagccaacccgtcgggcacgccggacatgagcccagcgttgcagagcagcgggcgcctggccctgttcgtccaggacaactgcaccgcctgcatccagcgggtccgcgacctgcaacagcagaacaaggagttcgacctctacttcgtcggtagccagaacgacgcagagcgagtgcggcactgggcaatcctcgccggcatcgacccgaagaaggttcgcagcaagcagatcacgctcaatcatgacgagggccgctggatggccctgggactgggcggggcccttcccgccctggtacaggaggtgaacggccgatggcaacgtctgtag

SEQ ID NO: 347446 - DNA, 387 bp, Pseudomonas aeruginosa
atgcccgaagagcatctgtttcaggatgggaccctcagcttcctgccgacccgtttgaaccggcaaccggtggtcatcggcggcctgactgcggacgaaatgtggatcacggtcttcaccagcggagcagccgggttcgtacttggcatcccggctgccttggtcgcaggtaacgctgcctgcattccactgggcgcgctgctggtcggcgccctcggcctgggtatcggcagccgcgtcctgcggcggatgaagcgggggcggcccgatacctggttctaccgccaggtggagttggccctctcgctgcgcgttcccgtcttcggcaaccgtcgcctggttacgcgctccggcgcctggaccagtcgacgcacggagtccccatga

SEQ ID NO: 347447 - DNA, 387 bp, Pseudomonas aeruginosa
atgcccgaagaacatctgtttcaggatggaaccctcagcttcctgccgacccgtttgaaccggcaaccggtggtcatcggcggcctgactgcggacgaaatgtggatcacggtcttcaccagcggagcagccgggttcgtacttggcatcccggctgccttggtcgcaggtaacgctgcctgcattccactgggcgcgctgctggtcggcgccctcggcctgggtatcggcagccgcgtcctgcggcggatgaagcgggggcggcccgatacctggttctaccgccaggtggagttggccctctcgctgcgcgttcccgtcttcggcaaccgtcgcctggtgacgcgctccggcgcctggaccagtcgacgcacggagtccccatga

SEQ ID NO: 347448 - DNA, 732 bp, Pseudomonas aeruginosa
atgcgccgtctgaataggcctgcattgagtaataaaactgttaggacactcgccagatccactgccagggtggcgcaagcccaagatccgaggcaggacgcggagactaggtggggcagaaaacctaaggaggctttcaaagaggtgcgctcttcgctggagaggatggcatcagggcgaagccgatgtatgtattgtgaagatagccaagggactgatatagaccacttcaagccgaaggcggattacccgcatgatgcctttacttggggaaactatcttcttgcttgcagttactgcaatagtaatttgaaacgcacgcagttcccgctcgacgctaatggcgaagccttactaatagaccccaccgtggaagatcctcggcttcatttgatgctacttccttctaatggggatttcatggcgctgggccctaagggagatgcgtctattcgcgtctttgggttgaatgataattcctttccgcggcgcttgcctaagggcaggagagatgcgttggttagcttggtggcgctgttgaaggactacgactccgagatcaatactagtccagctaaagctaaggatatcaaagccgcagttcaggacttcccttttagtgttgttctaacttcactcgttgatattgcaggttctgctgcgggtagcgcggttcttggggcgcaagttgttgacttgatccaacgacatgacgtcgggcagtggctttag

SEQ ID NO: 347449 - DNA, 1335 bp, Pseudomonas aeruginosa
atgtacatcactgaaattgaaatcaccgacttgcggagttttcgaggggctcactccgtttcactcgctcattcggatggtacctaccccggctggaccgtctttgcggggcgaaatggggccggcaaaagcacgctcctcaaagctattgcactctccgttatcggtccccttgcctcgagatcacttgcgggtgtttttaccgattgggtccggaaaggtgccgaatcgggaatggtcgcgtcgaggattgcatttacagagcaaaaggacactttccagtctggtggacgtgtgacgaaaacgcctttttgggcgggattgaagtggagtccgtcgagtcacgggcatgatgttcttgagcgatggatggataaagaaagcccaaacagacagcgaatccctgaccgcggcccatgggctgacggcccgtctggctggtttattgctgggtatggaccttaccggcaccttggcccaccgccagcggacgtcatcaagttaagcggtgatcctgtagtggctcgcctagtcaatctcttcaacgagacagcgacactgtcagacgccgtggattggttaaaacaggtccacctgcgtgcgttggagaatcgtcctggggctgagtcactgaagaacaccgttcttgatattctgggggatggactccttcccgacgggagtctagtaaggaaagttgattcagagggactttggatcgagcgtgacggtgtcactatgcctttagaacaggtcagtgacggctatagaacagtggcagctttagtggttgacattattaggcgaatttacgagacctatggcgggctagaggcttcaagaaatgagtcgggaaagttagtttgcaatcagccaggggttgtattaattgacgaggtagatgctcacttacatgtggcatggcaacaaaagattggattctggctaactcagacttttcctgtcattcagttcttggtcactacccatagtccgttcatatgccaggcagctagcagcaacggaattattagattgcccgccccaggtgagcaaagaacaattgagcacatagacgaaattacttggaatgcagtagtaaacggcggtgcggacgatgctgtaatgacagaactctttggcttggagcatgcacactccttggagtccgaacagcttcgccaagaaattgcgatcctagaaagtaagcttatgcgcggaacggccgataaatcggaagttgatcgatactctgaaattaaagacgtgctcagtgcagaccttggagagctagctgacagaaaactacgggcggttcttggagttcatgaataa

SEQ ID NO: 347450 - DNA, 963 bp, Pseudomonas aeruginosa
atgtccgatatgattcaacgcgcggccgaggtgccgttcgagctgggtggccagcgtctcgaccagatcgccgcccagctttttcccgaacactcccgctcccgtctggccggctggatcaaggacggacgcctgaccgtcgacggcgccgtgctgcgcccgcgcgacatcgtccacagcggcgcgcaactggtcctggaggccgagcaggaagcccagggcgagtggctcgcacaggacatcgagctggaaatcgtctacgaggacgagcacatcctggtgatcgacaagcccgccggcctggtggtccatccggctgccggccatcaggacggcaccctgctgaatgccttgctctaccatgtcccggacatcgccaatgtgccgcgcgccgggatcgtccaccgcctggacaaggacacgaccggcctgatggtggtggccaagacgctggaggcccacaccaagctggtggcgcaactgcaggcacggtcggtcagccgcatctacgaggcgatcgtgatcggcgtgatcacctccggcggcaccatcgatgcgccgatcggacggcatggcgtgcagcggcagaagatggcggtggtcgacgccggcaaggtggcggtcagccattaccgcgtgctggaacgcttccgtgcgcacacccatacccgggtcaagctggagaccgggcgtacccaccagatccgcgtgcacatgagccatatcggctatcccctggtcggcgatccggtctacggtgggcgcttcaggattcccccggtggccagccagaccctggtccagactcttcgcgagttcccccggcaggcgctgcacgcgcgcttcctcgaactggatcacccggccaccggcgtgcgcatgaagtgggagtcgccgctgccggaagacttcctctggctgctcagcctgttgcgccaggatcgcgaggcgttcgtcggatga

SEQ ID NO: 347451 - DNA, 1218 bp, Pseudomonas aeruginosa
atggcacatatcgattcgggaagccactccgcggaaagtgcggcgctcggcttctattaccagtcactttatgcacttttcagtgtcctccaagaatcacatgacgacgcggcagtctgcctagagcggctcgacgacgttgaagtgatctccaatggtcagccgcttctcatccagcttaagcactccattgttgagaaaccggtcgccgtgagtctggcgtccaaagcgctgtggaagacactcaaggcctggattgatgtactgccaaaacttgcgattgaggacacgcgttttcaactggtcacagttgctcccttgagcgcaaagggctttcttggttccttgcttgacgagtcgaccagccgcgagtctttgcattcagctctgctggatgaggctcagcgggtagtggacgaacaccaggccgggaagctagcggaactccagccgttgccccatacagaccgggtgagcggctgcgccgctttcctaaagcttgacgactcaacgcgaaagaccctgctatccagaatcactgtgcgccctggtggcagcaatatcaccggcgtatccgacgacattgcgggatgcctggtgaattttccgccagatagtcgccaggccatttgcatccgtctgatcgaatggtgggatcttcaggttatctttacgctgtgcggaaaacgtgagcggttcatcacgaagctagaggtccagcagaagatttccgagcttgccggcgagattgagcgcgatgagctctttccggatttcgagaacgccctcatgcctgaggatcatgtcccagattcgatgattgctcgccagattcaacttgtgggtgggactcgaaccgaggtgcggtctgctgagcgcgaagagtggcgcgcccgttcgcagcggcacaaatgggctacagaccgtctagatatggctgtacgtatcgatttgtatgatggccttcttcaggaagcttggcaggataagcatggagtcatgtccgaggagtgcgagcaggcggacgatataaagaagcgcagttcggggctcgagttactgaggtggactttcaactccgcacataccgaagttcgcccttttgctcccaactggagcgccacttactacgtgcgcggaagctaccaagtaatggccatcgacctgatcgttggatggcatcccgagtttaagaaactgttggggccagacacatga

SEQ ID NO: 347452 - DNA, 330 bp, Pseudomonas aeruginosa
atgtcattgcagtgccctcgctgtcactcccccaaagtcgcttccttccatcacgccatgaacgtcggcgccgccattggcaccgtgggcggtgtagcccgtggcgttagcgctgtcctggcaggtggccaggctggcgcagctatcggcgcattcgccggccctattggtatcaccctcggttccgtttcgggcgccattctcggaggcctagccggcggtgtcggtggctgtgcgctgggcgctcagctcggcgagtcgctcgaccgccacgtcctggcccacaacctctgcctgctctgcgggcatcgcttcaatctgccggcctga

SEQ ID NO: 347453 - DNA, 171 bp, Pseudomonas aeruginosa
atgaagctattgctacgcacgttcgcagccgcgttcatgtttgccgggatcctggctggctgccttgcgatattgctactggtgattctggtggtgcgctttccgccattactgatcgctgtggtgttggcgtgctggatcttcaatcggctaccgaagtctgaacgctaa

SEQ ID NO: 347454 - DNA, 168 bp, Pseudomonas aeruginosa
atgatcactaacctgcaacacaagaactttacgggcttcatcgatcagaccatcgatttctcgcagtgtatcaacatcgtcatcagcgggaacggcgccagcaagatccagctgttcaaggcctttctggttcagggcgggccaaaggacacgcgtgaggttgattag

SEQ ID NO: 347455 - DNA, 873 bp, Pseudomonas aeruginosa
atggatgccgctaaattggggcttcccccaagcgtaaacctgaacgcggttgcaaaagccagcggtaccgtcgatctgccgatgcgcctgaccaacgaggcacgaggcaacacgacgaccctttcggtggtcagcaccgatggtgtgagcgttccgaaagccgttccggtccggatggcggcctacaatgccacgacaggcctgtacgaggttacggttccctctacgaccgcagaagcgccgccactgatcctgacctggacgccggcgagtcctccaggaaaccagaacccttcgagtaccactccggtcgtaccgaagccggtgccggtgccggtatatgagggagcgacccttacaccggtgaaggctaccccggaaacctatcctggggtgattacactaccggaagacctgatcatcggcttcccggccgactcggggatcaagccgatctatgtgatgttcagggatccgcgggatgtacctggtgctgcgactggcaagggacagcccgtcagcggtaattggctcggcgccgcctctcaaggtgagggggctccaattccaagccagattgcggataaactacgtggtaagacattcaaaaactggcgggactttcgggaacaattctggatagctgtggctaatgatcctgagttaagtaaacagtttaatcctggtagtttagctgtaatgagagatggaggggctccttatgccagagagtcagaacaggctggcgggagaataaagatcgaaatccaccacaaggttcgaatagcagatggaggcggcgtttacaatatggggaaccttgttgcagtaacgccaaaacgtcatatagaaatccacaagggagggaagtga

SEQ ID NO: 347456 - DNA, 579 bp, Pseudomonas aeruginosa
atggccactcaaccactgctctacaccctacatatccaactggaaccgctgcagctcgatccgccgatctggcggcgcattcgcgtcagcggcgactgcaccctgcgtaaactgcaccacttcattcaggcggccatgggctggcacagcagccatctgcatgagttcagtttagggatgaaccgctacacgcccctggatgcggaattcatggacgacgacgaggcactggatgaccgcaagttcaagctgcgccgcatgctgaaggaaggcgaccgcctgcgctacctctacgactttggcgatagctggcagcatgtgatcgccgtggagacagttgagccctgcgacttcacgggcacctggtgcgaggtgctggatggcgcccgcgcctgccctcccgaggatgtaggcggtgtgccgggttatctggactttctggcactgatccagcaaccggccagcgaggaaggccgaagcgtactggaatgggccggcggctgtttcgcccctgagggatttgatcgccgagcggccaacgcggctgtgcagcgaatctgcaacaacctgtggggctga

SEQ ID NO: 347457 - DNA, 966 bp, Pseudomonas aeruginosa
atgaccaaacgaaacgccatcacccgtccatcccagtccgataccgctatccgaattgaacgtctcatcaacgccattcagcgtacagatagccaagcctaccgaatcacatactcgaagcatggtgatgaactggtcagtgaaaccaggctgtcaaagtacttcgatgggatcgagcagatggtcacgctgttcgagggagatgtggagtaccagtccagctggcacttgagcctctttcagcaagcctgccattccattggggttgagctcagccccgttggaattacctgcttgaacgaggacgaaacacgctacctgagcaccagcgagacactgaacgagctgaccaagtgcatccgtactctccgcacccaaaagaggttcatgcgtcgggacgctgaccagcgctacctggccattcagcaggagctcgaggtcggccgctacgttgatgccgtgcttgatcgctacgcccgcacctgcgtggtcagggttgatctgtattaccgtacagaggcccaagcgaggttgcgtgtggagcgcgtattcgacgacctgaatcggttgattgctgagcgtgagcgtaacctgattttcgaccatgaaaccggctacatctgcagcgttgagcaaggcgaggatcggggctatcacatccatgctgcgttcttcttcaacggctctgaagtgagtgccgacatctacagggcccagcggatcggtgagctctgggagcgcattacccgtggtcagggctgcttcaacaactgcaacctcgaaaaggataaataccaagacaggcttggcattggcctgatccaccggcgagacctgaacgcgcggggtcacgtgcattacgccatgcgttacctagtcaagagtgatcaacatctgcgactcaagccggtaggtgctcgctgcttgcgtaaggggcaggcaaggaggggctttcggggtgactaa

SEQ ID NO: 347458 - DNA, 240 bp, Pseudomonas aeruginosa
atgcgaattttccgcttgcaagacgttataaccgctactggcctatctaggtcgaccgtctacaaattcatcaaagagggcaccttcccgaagccggtctcgctgggtgaccgctgcgtcggctgggtcgacagcgaggtgcatgattggatcctggcaaggatcgaggagcgtgacctggcggcagagggtgctgcggtgcgctcaaccggccacctcagtatcgccagccataactga

SEQ ID NO: 347459 - DNA, 1311 bp, Pseudomonas aeruginosa
atgtctgcgctgatagttctgtcagaaactctggatgttgaagcagagtcaaggttcttccttcaagcgttgatctgtagggggcaggccagcctgggtgcttcattcaaggtcaagccggttgcaaagctcctttgcctgacagaaaggttggtcagagacgccacgcgcgagctggttgaggccggacttctggtgacccacaagcaggtagataaggtcgggcgtcccgggcaggaatatgaggtgtcgcagtacctgctcgatctgctcgcaaagccaggaaggggcgaggtcgctcatcaggatctggtcctgcgtctctttagcgagcctgagatctatgctgaggggctgctgactgaagccgaggcggggagggagaaggttgctcgtaagcaggtgcgcaaggatgggcggccggcagctccaggagcctctgggcgcctggggggctccacgagagtgcttctggctgcacttttgacttttgccgatcagtgcggggttgtggctggggtcggggtggcgaggcttcgagcaatcacgggcttgagcccggtggcgctcaagcatcagatcgggcggctagtcagcctgggcttcatacgtgttcatgttccgggtgtatccaatggcttcttcgttggggccaaggtccccagcacttactacctgaacctcgaccatccgcaactgggtgagcagtgcactcgtcgtgccgtgctggtttatgcagaagatggactatctcgctatgagcggctgaccaaggggctaacttctgatgtcgcaggggctcttctcgctttggggcctgccgcgctggatgtgctctatcacaagctggccaggtacacatcgcatctgctctcactgacatggggagagccaggtgagaagtacggtgaagttcccgcctctctggacggcatgatcgctcgagaattggagcaactgacggtcggcaagccggggcagagtgcgggggggtactactggcctggggttctcgatcacttctttgaggtggcgttcgagtgggcggagcacttgaagacgagactcaatgggcaggcgtggcaggggtacaaacctcagttggtccggttgatacctgcgccggaaccaaagccgcaagagggcgatgatcgcttgaggatcgtctccctgatcgtctatccggctcccgagaatcagaagggctgtattgtgtacaaggatgcccccggcggattcctttgtgagttcgacggtgaggctgatctggatgtgcggaaccgctatgagtttggcttgctaaccgagtag

SEQ ID NO: 347460 - DNA, 675 bp, Pseudomonas aeruginosa
atgaaggagactgggatgacgccgagctggctcaatgagaaggacagcgatgagtggcggtgggctgccggctacctatcgagccgatgcccctcgtcactgcaagacaagctaagcctcctcgcaggcgtcgacttcagccgtctcgtcaggtcgatccatgctctcgaatctgaggctgaaggcgtaaagctcatcgagcggttgagaaacgccatcagacaaaggcggtatcgcttgtccaacggcgggagaaagacctgctctttcacgctcccactcgaaaccaagaccacactgaagcgtctcgctaaacgcagcaaaaccactgagacggcgctgattgagcgcttgattgaaggcgcagcccaagtagcctccgtacagaaagaggcgatgcgtcgcgaagctcaagtgaccaaggtcatacacaactcgcgcaagcttgaacaagagctggacaaggttcgtattgatgagaccaggaaacagttgcgtcgctgcatgcagcagctagcgcgatgggaaacttttttgaaggaagaactgccagagctatcccccgaagacgaagcgacagcgactgcactggcagatagccgaatgcgtgaaacccaagaggccatcaatgcctttgtagcaaggcatgagatgctgagcccaagatcgggctga

SEQ ID NO: 347461 - DNA, 966 bp, Pseudomonas aeruginosa
atggaccgactagggattttcgtcgacgccgggtacctctttgcccaaggctcccttgccatcagtggcaatgtccaaaagcgcctgaatttgtcgatcaacgagcaagcagtcatcacgcagcttactcagacggctgacgaactttccggcggcatcccccttctacgtatctattggtacgacgcgatcggaagcaaagggcctaccctagagcaaaagcgtcttgcgaacagcaataacgtgaaggttcgaatgggcacccttaatggctctggtgagcaaaagggcgtcgattccatgatcgtcatcgacatgatcgaactcgctcgcaaccatgcaatcaccgatgctgttttagtatctggtgatgaggatgtacgagttggcgtacagtttgctcagtcttacggcgtacgagttcacctgatcggcatcgccgcggccactggaaagaacaatcagtcgcccagcctcgttcaagaggcagacacacaggtgaactggaaccaagacgtaatccagtcgttcctaactatcaggcaacctgtaacaggaagagaacctgctgctagccagtcggacacaccagctgccccctcagccgagcaaagtgcccagcctgctgcccaggctacttctgcggaatcgcctccggagcaagcacaggtcgaggaagcaaacgcagcacctcaatctgacgcaccaactgaagaacacggcgctgaaccggcggctgaagaccccaacgcaatcctggccgctgtggcggatagactcacaaacgagttgatagttggcgacctcaacaagctgaaagaggtcttccagtccagcaactctctgcctccagaattcgatggaaaactactttggcgcggaaaaactgctctaagccgggctttgcagcctgccgagaaaggcgttattcggcgtgcattccgcgatgcagtaaaagccaagtag

SEQ ID NO: 347462 - DNA, 276 bp, Pseudomonas aeruginosa
atgatcaaacagcgcgtcataaccattctgtcgtggtccgatatccgacttcccaaactcgaggagctaaccggtatcagtcgctacacctggagcaacctgaagaacccttccaagaacagagaaatcaaggaagaggagattctcgcgattgcaaaggttttcccgcagttccgttggtggttgctgactggcgaagtgatgccagaggtggggcaaaccagccctgactacgaggacgcgaatcgaagtttggccaatcaaggcgcggggtga

SEQ ID NO: 347463 - DNA, 999 bp, Pseudomonas aeruginosa
atggacgaggaaatcgacgatcgcaacgaacgtcgaggtcaaaaagacaacgatacagttccaataaaattcaatgaagttggacagcgtaagagtattagtcgagtgtctattctaaaagaaatagagagcacctatggagcctttgaaacccttagggaaagtgcaccagcagataagctcggggttttctcaagaagccagcatgacaagttggcaaaaatatttgacaaaggtaattatctatcgcgaattgagtggataattcgccactatttggcctcaaaaaaaatgacgctagctgtattgtactttacacaatcagaggagttagaggggcgcggaatgaagaatctttcattttatgcctgctactattccttattcagcgtcctatctgcaaacatgctattggctgcggactttaagctagagaaggttagggaaatatcacacaccgccgtctccaaagaaatactcaactatttcgtaaggtccggagtgtacaaaaaggacgttgtagatttgctggaggagcttagattttgtagagaactatatagctaccacctccctatatctggcgacgtcttgagtggaagctccgctctgaacgtggagtctctccaaagccgtcttagcgaagttcttcctgtatgcctgcaagtgctcgaaatgcagtcatatctttcatactatgcgtggaaaaaaatagtaaagggcagactcgagcttcggggtgaatatgcacgggaaattgatgagctgtttgactcggtagttcaccgaaaaagcgactctggattttcacatctagatagaggggattacggtcttctcgggtattttctaaaatccggagagccgctacctatcacttggctaatcaacgacaaggtattagaggaagttgaatgtgcatggggggacgagcctgaggatgggtatcagataagctcagtatcaagttatatgtctagagttaccggcgcattctga

SEQ ID NO: 347464 - DNA, 795 bp, Pseudomonas aeruginosa
atgaggtgtattttctgcaagctagactcacaaaactcaaagagcgttgaacacataatccccgaaagcctctggaataccaaacaaattttgcctcccggaattgtttgcgacaagtgcaacaactatttctcccgaaaggtggaaaggcaattcctgggatctcccgagattgaagaacttagatttcaccaagctataccaagcaaaaaaggcagaatcccttcaatcagcggcgcgatactaggctccagccatccggttaagattcaacgcatgctaaataaagacgaatcagtaatgtcaattgagctgagcccagagctatttgagctagccgatagtggaacacccttaaaactatattttcctataggctctggaatcccaaagtcagaattgacgtccaggtttcttgcaaaagtagcgctagaggccatggcccagagattattggactcggagggcgggattgactatatcgttgaggaaaaagagtttgacccaatcagagatcatgcacgatatggaaaaataaaaaactggcctcacttctcaaggcgcatatacgatgccaatgagggtgaacacatacatggatcagaagggcaaaaagttcatgaatacgacttcctacacacacgccacggagagttttactttgtccttgctctatatggcgtcgagctgactattaacttaggaggaccctgcatagaagggtatcaggcttggcttgatgaaaactgcaatgcaagcccactctactggggaaagaatgcaatagatacttag

SEQ ID NO: 347465 - DNA, 723 bp, Pseudomonas aeruginosa
gtgggggtggatgattttaattccaagggctttttgtctgaagatctagaactttttcgctcgcatgttagagagaagtacgattctttattttcaagcgccgagaatctatcctctcaagcttatttcaggataatgaatgatgattttgttttagaaaggggggcggatattgcaatatttgcgttcattcagcggagtgttagaagtcttcaggctgctatattgctatgccagaaaggtttggttcttgaggctcaagtgttactaaggatagcccttgaatgcttgttcttctcgggtgcgctactcaaaagtccggatatttttgagcggctttctgcacaaggggataatgaagagtcaaagtatgctcggataaatctggaagacttagatggaaaaatttttgatccagagcatgttgctgccttgcaggatatagaattacgtggccaagagcgaagtgagttaagtaatataactgtggttagggcagcagagataagtggtatgaaatatcattataacgtcgcatatcgtggtctatctacaatagcggctcatgcaaattttcgttcatttgattcgacgctctcagtttcggaaaaaggagggttgattatgtgtggccctactgaagagagaatggagtttactttaggtttgatttgtgagtttgtatctattgctatgtgtcaactggatgagctaacaaactga

SEQ ID NO: 347466 - DNA, 1971 bp, Pseudomonas aeruginosa
gtgagcgagctttatataggaaaacatctcgatcctaatgggatgccaggagagttgtatcgccacaagctgagtgacttgattactcacacctttatttgtggagggtcaggctccggcaagacggtaatgggtaaagccatcatcgaggaagcagccctcaagggggttccctcgattatcgtggatctcaagggcgatttgtcttccttggcgcttgctttcggagaactgacagccccgaccgttgcgccatgggtcgaggttgaagataaatctacgcttggtcgcgccgccctggctgaagccaacgccttccggaaacggttatgggattgggggcttgccgaaaccaacgtgcgggagttttccaaccaggtagccgttgaaattttcactccccgcagcgagctcggtcgccgggtatccattccgctcatttcttccccaccaccggacatcaataagctttttgacgaggacccggatacagcttcagtcatggtgaccagcattgcggaagcgctagtgcggcgggtgattccctcgggacagcgggaccgagaaacggattttgttatcgctcttatcgagcacgcctggcggacgggcgttgatctgactggcgaggcaggtcttgggcaattggtctccatgattctggaaccgcccttcgccaccattggtgtgctggggatcgatgaccatatccccgataaccggcgtcaaaagcttgcacaggcggtaaacggacagcttgtcggcgcggccgccaattgggtccggggcgaagagatgagcatcgataagctggtgggagctaaccgtgtcgacggcaaaacccagatcagcgttatcagcctcgctcacattaccgactttgaggatcagagcttcgttgttgcccaaattgcctttgctatcaatgcctggatgcgtaagcaaggtaccgctcccggtggaaacaggccgcgcctgttattcttcctggatgagatcggcggtggcggtggaaagaccgctttctatcccgcttacccttatacaagtacctgcaaacccgcgctgaatatcctggtcaagcaagggcgcgcatttggtgtaggctgcattctggcaacgcaaaaccccggcgatattgactacaagggcctttcgaactgtgccacctggatcgtcggcaagctgcagaccaaaagagatcgggataaggttcgtgagggtttgaccgacgcggaattttcaccttccgacttggcgaagaagctcgcacggcctaagactggcgagttcatgctcctgaataaggagggtgatgtccattttatccaggaacgctggctgctgacctatcactgcacgatgagcccggagcaacttcgccgctataaagccaagggattagctctatatgaaggctcactgagtacaggcattgccttggaggatttcgcagaggctatcgagtccgacgagcaggaagaaatccaatcactttggaacgatgccaaggatgctatcgggcaagcctgcagtctgctcgaaaagattctcgatcacggcatcgattccgagaaagcacgactttggatatccgtcctgcgtgacccggatgggttcaatcgtcgccttcaggaagcccaaaggcagcttatcgaatatgctgaggcggctccctttcagaagggtaaaagccaagagtccagcgggctaatggcgttgctttcggaaaagagaagtacaagtgaagttccctctatcaacgatacacgaacggcggcgagtcctatttctgtattgccatcgggcgatagcgcgcttgttggggatgatggcagtgtgacttacaaaggccgaaaatttcagctttaccggagatatgcagggaaatcggtagcgtttattgaggtggatggcgaactaaagttttctatcgaaggtaaggttctcttgaagagctttatactttag

SEQ ID NO: 347467 - DNA, 1818 bp, Pseudomonas aeruginosa
atggcaactttagataatttcaaagactttttgatatcagatctgggctttaaagctcaccagatcaatgatggtgacggttctggtatttccacaacggttgacggactggacgagaaggccgcgtttctggtgtcgaccagcgtcggcaattgctatgccgccttcaagcatgaaggctcggcaacgctgagtgaatccgaggccaaccggtacaaagccctcagcattcttatgcccaatggtccggcagcctattgcgtcatcgatgtggcaggccatctacgcatctatcttgtcgaaaagggaaatgagatccacgacgagatgaaacattgggatgatgttcgtgatgccgaagacatggtgcgggaatttaaaccggatgtagtcaaagggctgaagcaatgggcacaaaaaacactccatacggaaaatagtctctcccgctttgtgcagctcatgaagggctgctggcaggacatttgggatatcgagaacaagcgcaacgactggattttcgacgagttcacgcgcttcctgtttatcaagctcaatgaagacgcaaaacccagcggaagctttacaactgccaagctgaaatcgtattgcgagcaaaacaaacatatgggcgacaaggctgcccagaacttcatcaacaacctgttcgatgacttgaagggacaccatcccgaagtctttactgacgagaatgagcgagtgctcagtaaggcggccaccgttgagcggattattgcccgtcttgaagggatcaacctgaaagacacccagggcgatgtgcttggccgtgccttcgaaatcatgctgtccgataccttcaagggtaaagacctgggtcagttctttacgccgcgagaaattgtcgctttcatgcttgatttagctagagacaatcctgaagacgcagctctgaatatcgtgaagggtgagcgctttcttgatggctgtgccgggtcgggcggtttcttgattgccacctatgaagatgtctacaaacatgctttgtcgaataaactccgaggagaagagcgggaaaaactgctccaacgccttgggcaagaaactttctttgccagtgaaattgaagagaaggcggcgcgtcttggaaagctgaacatgatcgttcacgccgtcaacgcgcagaacgctcagtggcttcaccaaaattatctctataacgaggaatatggtggcttgaagccatcaattgaatatgaggtcgattttggctctggcaagcaaaagagatatattggtccaggcagtattgaccttatcctcaccaatcctccattcggcaagtccgtcaaaaccgagagcatcctgctggattatcaattcggacatgaggtcaaggtatttaagtccaagggtcgtccaccggaaaaacgaccgaaaaatagccaggacagcgaggtcctcttcattgaacactatcttcgggtgttgaagccgggcggcaaactgctcatcgttctcccagacggtgtgttgtcgaacgccaccgcgaagcccattcgggattacatgcgagagcacgcgatcatcaaggctgtgatttctctgcccagcgaaacctttgcatcgaccggaacctccattccgaccaatgtggtctatctgcagaagaagcgcccgggagatgttcagggcgatatcttcatggcgagggctgactacgtcggccgccgtgccaacggcgacccgctcaaggagaacgatctcccgttcattcttgaaaaattccgtgaatggcaagcaggaacgcttgaactcccggaggaggataacgagtga

SEQ ID NO: 347468 - DNA, 2475 bp, Pseudomonas aeruginosa
atgaccgccatggaacaagccctggctggcatgtggcgcagccgtgaaaagcagaagttgccctatctgctggtcaatgacgttcgtggctattttgccgaagcgcccgccgagctgctggtcgatggccaagcgattcccgtgcatgtctgcgccaatgagtttggattgcgccgccataccgaacccgagcgtcggcaaccgaatccgcccgctcgtatcatcatttcgcgtcagcagcttcagccggatcatttgccggacttgcaggcccgctccagcgtgtcgccccgcacggttacaggttgtgacatcgccaaggcgcttggcgtgcagaatccccgggccttgcttgaccggcttcccatccccgcattctggaacttggccccgtacctgccgcagctcggcgcttacagtctggagcgcgtggtgctcgcctcgctgctgaacgatcccagcgtgttgtctgcaggctgggagccggatcggattctcgacaagctctggtacgagaatgcgctggcccgggtacgcgaggtgctgagctcggtcgatgcggatgaacgccgggcgctggagcaggagtttctggacgtggttcgcacctggctcgatgggcctcgtttcgccttggttgaagccgccgtgctggaaagcgacccgccgccggtgctgccgatctgcctgctcgcctccattctggacggctggaagatgcttacgccggaacgaatgcgtaccttcctcgatggcagcgaactgggcgacctatttgttgacgtactcaaggacgggcaaagcctgcatggtcttgccgactggggccgccgcatcaccctcaaagacgacgcgccctgcaaacaggcgctgcactacctgcagcacgaggtctttccgaagcaccccagtgccctcaccgagtcccttgcgacagtggtcaagggggtgggcggcaaaggctcggagcgcctgctgaatcagcttatccaggtgctggaagccgatggtggcatccttgcccagggtctggcagtcaccctgcacgcgttgctcgatgtggtggtcaacggcgagcgggccgacacgcttccgcttgaaaaggctccctgcaaactgaccgatgcgctggaaacaccggatgccccggaatgggaagagctcctggaagccctgcgccgacatcaggcccgcgaacagtacgaggaccacgtgtcgctattggaagcgatggtcacgattcatcggcttacggacaaggccgaggcggcggtgaagaatctcgccagcctggattggaaggcctggctggcgctggtggattcggtgtatctgccgctctccaccatggcgctggaggcggaacggcggtccagccagttgccggaaaaggtcaatgtctttcgtatcacccagcgggcgaaaaaggcctgcgattccattcgcatcgcttgggcagatttctatgtgcagccgagccgtggactgccgaagtggctgaacgagcgcaagttcgcggcaggaacctgcaggccgtggctgaacagcgatgtcatggaatctgcggttaagccattgctgcaggattcggagatcaagcaggtttatctgctggtctttgacgggatgagcgtggccaactggacgttgctgcgtgaccgctttctgatgatgccggggcgcgagctgtttcgcccttaccagtcgctggggcctgaattccgcgcctgcacttatctgcccagcattactgaatattgtcgacaagccatttttgccggtgccgcaccgtttgaatttcgctcgtggcccaatggccgcagcgagcccgatttggctgaaaacgcccttgttaatatggggttgaatccagcttcttggtgggataagaacaagggatatgtttgttacaacgaaaaagatgcaaatccagaaaatttaaacaaaaaggttagacagctcattgagtcaccactcagatttaagtcaatagtcttcaacttgcaagatcgtctgcttcaaaagggcatgtccagcttgcaagaaattatgttgacctatgtcaaagaggtcgcattgcctcatctgcgccgtatagccgctcaagaaaaggtagcagtagtcattacagcagatcatggttttacctggtacaacaaacagtatgtgatcgacgacctgaaacccaaaaatccagggaaagaagtcattattcacaaccgctgccttgaatatacgacctctaatatttctcgcaatggacctggcgccgtgaaacgagtgcctacatctgacgttggactgcccagcaatatcgcttccattgaactgcccttcgatcatgacagctatgggtggcctgggccggggcgtatggcaaccaacaatccatacgacgttcagggaaatgaccatggtgggctaacaccagaagaaaccgtcgtacctgtcgcggtgtatatttcaaaaggctaa

SEQ ID NO: 347469 - DNA, 1464 bp, Pseudomonas aeruginosa
atgaaggtacttttcaataggccacttatctttatagacactccagaggttgacgaagtttctgtagagtttaggcgtgttcacaagatgctccaagacacaatggaggtcactcatagtgaattttcaagcctccaagatctaatagaggacgactcgtctatcacctatgggatcgtcaaggcgggtgagactgacccagacggtgtccccattgtaaaggtcgaaaacattagaaaagacaggaccattgatgtcgaaggcctttcgagggtttcaccttccatttccaatgcttattcacgaaccatactgcaacccagagatattcttatatcaattaaaggcacaatcgggcggatagccgaagtgccagatgagcttgactcaagcaatattactagagactcggcattgatacgcctgaaggacaagaatacaaatgatttcatcatgctgtatttggagtctgaactggcgcagcttcaaatgactcttcacagcagaggcgctgcagtaaagggaattaatctatctgatcttcgggaggtgaaggttcctgttattgaaagaatcgatcaaaagcagattattgaaagatataacgagttacgaattttttctcagaaggtggaggcaaaggcaatatcggttgaatcccaaaggcaacaaatgctggattctatcgttgagcttattgctcaagaaattggcctgccaagttttcctgcaccttggttcggcaagatgtacatccaatctgcagaggcaggagttgatcgaatcgatgttttaggggcgaatactgattttgagaagatgtgcgaagcgtcagggaagtttggtcaacttggagacgtttgcgaaattgatggcaccaaccagcaaataccgattggattgcagcgctatatatcgatcgaggaacttccaggtaatttttggggaaatatcgaaatacctgaagttgaagtcgaagagcaaacaggcaggacacatttcctaccaggcgatatagcttgggcgcatttgaagccctcaatactacaagggaaggcttttgttatcaacgaggaatgctgggggtctcatcatttcttgaggctttcaacatcggatgttgatgaaaatatgaggactattatctgggcatacttaaaaacaggtcctatcaaaagacatttagcaaataaatgcactggaaaaagcgaaagccaaaaagacgttaatgatcgggcgttggcacaactaccgttcccagtattaaatcaagatcaggcccgtcggatcgccgaagggatacgcgaaaaaattaggcaatcccatgagcttgaaagaattgaaggtgactaccggaatagagcttcatatttgttaagcaaggctaaggcaaacatctccaaccttttagatgaccgctggttcaataggttagttgatgaagcaaaggaggcgctgcaatga

SEQ ID NO: 347470 - DNA, 4176 bp, Pseudomonas aeruginosa
atgccactcatgaaggatatgtttgatttcacgcctgtcagtagctgggtggaaaacttcaacgagtcgactcacgattcggccagtcggacgcggattttcgaaagcttcgtcatgctgccagaggttgaggagtcggcccgaattatcctggatcgaattcaccgtaaccaaggtcgcggctttttcatcaccggtttatacggttccggtaagaccatcttcatggcatggctatccgccattctgaccgaaccgacgctgcgcaaacagttcctcgataccaagcccgagtggggcatggatgcgctcgcaccacgaaaattcctcacgatcaactttaccgccattgaagtgcctgacgagaccctcgagcaggctttttggaactcggttactgaccatttgcgccacctctcgccgccagtaacagcgaccctgtccaataccgacgcctatctgaatacctttttcaatagcaccgccagcggcacgcgcagcgatgtcgagagttggattcacgacaaccggagtgtctccgtcgatcagcttcgctcctatgacaaggaatatcagaagaccatcattgagcaggctgttgccgccctgaacattcaactcgttcaggaccgcaccacggtcacggaaaaggtcaagaagctggtcgagatcgccaaagaacgcggctacgaaggcgtcctggtctttattgacgagttgtatcttcacctgatccagagcgacgaacacttcaaccggggtactgcattccttggacaactggccgaagcaggactggccggggatcaaccgttctggatttttggcgcggtccaggaggaaattcaggccatcgctcgccaagccgggcgtaattacgatacggagttgatgggcaagctctctgggcaatccggccgcttccagtccatcaacattccggtcacgcaatttcatcgcatctacaatcaccggctgtttcgtgaaaattccaaatgcgttcacaagctcgccgatgccttcaaggctgaagttcagcctcacttccggggagcctttactgacttcctgaaacggtacttccgcgaacgcgaacccatcaccgacgaggcaaaacactttgccgacatttatccgatgcatcccttcgggctgtactgcctcaccgcgatcaccaaccggggcggcagatcccgtggcgcactgggatttgtccaggaattcattgaaaggcgtctgcaggataccagcgactggaaacgtatcgcggtgctcgacgacgtgttcgactacgaggatctgcgtaacaagatcatccaggacgatccggagatggccaagtattacgggatgttcgagcgattctgcggcaccgccaggggcgaggtcctgtcccgcgtgccttataagcgctggtcggacgcagatcaggctgccgccaaggtagcgagcgaacgcttgatcaaagcattgatcgtcctctccatggtcaaggaagaactcaccgtctccaagctgaatgacgcgctcttgctgcgctggcccggcaaggaaagtgaccccgctggaagcgaccaggaaacggcccgaatcctggaaaagattgcccaaacatttccgccccttcgtcagaaaggcagcggggataatctgagttttttcctctccgttgaaggagacggcggcgaacgcgaagagctgttggttgaagtcgagcgggtcaagaatggcttcgcgccggatattcagcttgagagcgcctaccgctcccatcttgaactgttcctccgcttctcgggcagtccgctgggcggcactgtaccgccgcagcatggtttctcgacccaagtggatgtggattggcagcgaacccgccgctccctggactatcgacttgagcccattacggcgctcaccaacgaccaagcggtcatcggatttgttaaggacgtgcccgccgccaaggcgttgcacctggctttgctctacccatcagcctcaccgctcgatgtcgagatggatgcagttcgtcatggcaacggacggaccctcgtatggctaccggccacattgccagcccaagatatcgatgagctcaaacgtagcatggctttggtcaagctctttggcgactaccagtcccaggttaacgcgggcggtgcttcgcaatccgtccgtcgcaagctggagctgctgggcgaatggattgaccttcccgccggaaccaaatcagcccagcccgcccgcaaggccacggagattctgctcgagtcctttgtgaacggcgaacttctccagtggaacaccaaggaccaagcctgggaaatcctctgtgagcccgcagaactgctctccctctaccagagcattccgcagagtgaacgctctctggaacggctcctggaaaaggtcgccactaaggctttagccaaggttttccacttccatccggatttccgggaggcctattcctttagcgcggacttgagcaatcagatgcgcaaacgcatcctcgaagccatctggaaaggtcgcgtgaccgacggggatggggctgccaaggccgatcttgaaaagcaccttgcgccgcttggtttgctcaacaccggtgtgcccggagaagtgtcggttacattggccgccagcagcgtggaagccttcaaaaaagcgaaggagcggattcgtgacaatatccgcaaggcaaacccgcctgccaccagcatcgcggaaacccgcaaacggctgaaaactacggatctgggattgaccgacacctgggtggacattctgattacgctgctcatcagcaccggggagatcagcggctttaccattcacggcaagacggtctcccaggatgatcgcaccattggcagcccggctgactggctccaggaactggatgaactgcgtcctgggacgcgtccagatgaaaccctgtggcacgacctgaccgagtcgcttcacgcccttagcctctggaaagaaggcaccggttacagcccggcagccgccgagcgcctccttgacctattgaaagagacggaaacccgtgcccggcacgagttccgccaggccgaacaggctttgcaaacctggcccggagcctcggttcccgaccccatttccgaatgggccgacatctttgcgctgcccgaggatggcagggaaagccgggttgcctgttatgcctcggtgcgaggagccctgcgcgacctgctggggcttgccgaggacgacgatatcgaggcggccaatcgttacacttgtgtcgaggagtttgcctaccgcgtgcgggaagcccgcgattttctggatcgcatttccgagctggcgagtcttaccggcaaactgcgcgaactcaaagcactgggcgtcccgcccaccattgaaaagccatgccaggagctactcgacagcatcgagacttacgtcaaatccgctggcgcgtccggtgaaatgagccggattaccgccgaatggaaggatctgcacgagctctatctcaaccagtacctgagtgaacacgcgggcctgcacaaagatctgaaagccctccgtgatgccgtgctcggcagcccaagctatcaggtgctgaaagacctctcacgggtggaagggcttagcgcccatttcagcccggcctttatcgaagcccaactgaccgacctgttgacccaggtcggcgtgcagcaggtttgcaaacagagcctggatgacgtgaagagcgacctgtcccacggctgggtgtgttccgcctgtggttataaaccctgcaagcgtctggaactcaagccggaccatttcctggggttggttgagcgcggcatcaaggaatacctggaccatgtgcggggctgcgaagccgagctccgggattacatcagtgacacgcccgccgcaaatcctttgctggggttgctcagcgatcccgtagagcaaagcgctctcgatgcgctgcaagaagcccccatgcgccaacacctggcggaggcccttgccgaggcggaagccgtgaaggtgaatgtcgacgaattgctggatcagctcaagccgcgcctgcttggtttcttcaagggcgggcggcgtgagttcgaggagtatgtgcagggcgcactaggtgagctgctgaaaacgaacaattcggaagaagaacagccttggaaggtggaatga

SEQ ID NO: 347471 - DNA, 705 bp, Pseudomonas aeruginosa
atgttgctcgacgccgcattggatagcaatgacgcgcaagctgtgcgtggctcctgtatccagcgttggcctcagaagtccgagtccaacaaggaaaaactgtggcaacacatgaaatatcgcttcctggaaatcaagaacaacgcgatcaaaagcacttcgttcctgaagatgtttcgaaagattcgcagcaatgatgaagcggttcaggatctggtgtttttccagctatgcataacaaccccgattctttttgaaaccctttcacttttggttacagacagcttcctgaataccggcgaggccgttttctctcgctaccacctcgaccagctccttgagcgaaaatacgagcgcatgcctcagtcgactcgagatcgagtacggtcgatcctcgttaaggcaggacgcctgaagctttcgaagtccaattactcggtgaccacctactgcccaatcgaggccgttttgggctacgcgctctatcacgacgcatctaaaaacggttggcgggcaccatcgacagccacggtcatcaacgaagggaccatagctcccatcttcatgtgcaaccgcgccttgctgattgccgggatcaacaaactcgcaaccaagggacattgtgaatatcaccggcacggaagtacggatcaagttcaactgattcatcaatcgctggaggagtatgtcgatgcctggagataa

SEQ ID NO: 347472 - DNA, 447 bp, Pseudomonas aeruginosa
atgaaccgacctaatcgtccggccaacacccccaccgatccctcctggcataggcatggtgtccaccaacttttggtgggcaccatttcaagtcccgtgccgagatctcccttgccaaaccagcgccgcgcctactccaaatccgtcaaggcccaagtcgtcgaggagcgcgcccagcctggtgcctcgattgccgacgcgaccttgagccacgacttcaacacctatctcgcgcacaagtggattcgccgccagcaggcgcagttgcccgctatacgctcctgttttattccacttcctctcgccccgagcctgccggccaccccgagtgcggccgatatggccatccagatcgccattccctatcgggccggcaagctgccggtgctgtggccgggcaacgaccctgaaggctgcgcccgcttcctgtgcgagttgctgaagtga

SEQ ID NO: 347473 - DNA, 333 bp, Pseudomonas aeruginosa
atgcttaacctcggcttcccgtgcattctcgaacacccaaactgcggcgtcctggacgacatcgaaatctttcagaaccatctgcgtgtcgccttcgaccacttctttgatcgtcagattcagcttgggcggccctttgaaactgagcctgctcccggtagcgtcgatctcgttcgcaaaacaccgactcagagcatcgaaggcatgcattgcccaaaccatgtgcaagggatcagcgccatccaggccatgtccttctgcgagcaaccaatggcgcacatcctctggcacagtccggacattagccgactccttcaccagaagtcggggtga

SEQ ID NO: 347474 - DNA, 519 bp, Pseudomonas aeruginosa
atggcaacccccgcctatatgtccatcaccggcaccaagcagggcctgatcaccgccggcgccttcaccgaggattcggtcggcaacacctaccaggaaggccacgaggaccaggtgatggtccagggcttcaaccacgaagtgatcatcccgcgcgacccgcagtccggccagccgaccggccagcgcgtgcacaagccggtggtcatcaccaaggtcttcgacaaggcctcgccgctgctgctggccgccctgacctccggcgagcgcctgaccaaggtggagatccagtggtaccgcacctccgccgccggcacccaggagcactactacaccaccgtcctggaagacgcgatcatcgtcgacatcaaggactacatgcacaactgccaggacccgggcaacgcccacttcacccacctggaagacgtgcacttcacctaccgcaagatcacctggacccacgaagtctccggcacctccggctccgacgactggcgctccccggtcgccggctga

SEQ ID NO: 347475 - DNA, 828 bp, Pseudomonas aeruginosa
atgcaactcgcatcccgattcgcttcccgttccccctcgctgcgcagcgactacccgctgtccgatgaccagattcaccgcgtagcgccgtccatcttcgcggacgcgccgcatgaaagccgttcgcagcggtacgcctacatccccaccgctgccgtgctgaccgagcttcgcaaagaggggtttcaacccttcatggtgacgcaaacccgcgtgcgcgacgaaggcaagcgcgagcacaccaagcacatgattcgcctgcgccacgccagccagatcaacggcgcggaggccaatgaaatcgtgctgctgaactcgcacgatggcacgagcagctatcagatgctggccgggatgttccggttcgtgtgcagcaatggccttgtgtgcggcgacaccgtggccgatgtgcgcgtgccccacaagggcgacgtttccgggcacgtcatcgaaggcgcttacgaagttttgcgcggcttcgaccgggtgaaggattcccgcgatgccatgcgcgcaatcacgctggacgaaggcgaggccgaagtgttcgcccgcgctgcgctgtcgctcaagtacgacgatcccgacaagcccgcgcccatcaccgaatcgcaaatcctgatgccgcgccggttcgacgaccgccgcccggacttgtggagcgtgttcaaccgcacgcaagaaaacctgaccaaaggcggattgcatggccgcagcgccaacggacgccgccagcaaacccgcccggtgcagggcattgattccgatgtgcgcctgaaccgcgccctctggatgctggccgatggcctgcgccagttgaaagcctga

SEQ ID NO: 347476 - DNA, 603 bp, Pseudomonas aeruginosa
gtgcagggccagcggcagcgggcgttgcggatcgatccgcaggccgtggccggcgacccacaccggctgggtgccgccgatctcgcgggaatgcccgtcgtacggggtttcgtcttgcgcttgcaccagcagggcgaggtccagctggccgcgccgcaggcgtccggccagcctgccgctggcgtcggtgagcacctccagctccagcgccggcagttccgcgccgaggcgcggcaggaggcggccgagcagcttgccggcgtattcctcggaaatgccgaagcgcacccgcagcggctcttcccgtctgcgcaacccggcgagcacgcggtcgtgggtctccagcagctcggcggtctggcgctggaaccgctgccccagcggggtcagccgcaccgactggttgtcgcgctcgaacagccggccgccggccagttcctccaggcgccggacgtgggtgctcaccgccgaggggctgcggttgaggtggctggccgcggcgaggaaacggccgaagcgcaggatggcatggaaggtacgcagcagctcgatatccaggttggcgctcatggttccgatttcctgcatgactggtgcagatag

SEQ ID NO: 347477 - DNA, 1152 bp, Pseudomonas aeruginosa
atgatcggaaaaatattccctaaaagctctggatcatttaagaaaagaattcagtatattttcggctactctaagcatgaccatgccattagcaaaataaaaaccatcggcggcaactacttctctgccgatccgcttcctgctttgctttctggcaacaagataaagatcgacgccctagtagctgaattcgacgagatcgagaaactacgtaagctttctatcgactcagaaaaaaagatcaaacctgtctttcatgcggttctttcgctgcgtcccggagagcatttgagtgatatagagtggaataatattgcccatcagtacatgcaatgccttggatttacctatgccaataaatacgtagcagtgctgcacgaagatactaaccatcagcaccttcatattgttggcaaccgcatcaagttcgaagaagggtttcgcatggtcagtgatagcaacgagcgatcaatcagcgttgacgccgtgtcagacatcgaagatctgtacgcccttgataaatgccctaagccaaaggagacctggggtaccgccatcactcatgccgagatgaagtcagccattgcggaaaatgacttgccattcaagcacaagatgatcgcgaagatcgccagctgcattgaaaagaccaacgagaccaatggcgacatgttcaccttcgctagcctgttgcgccgccaaaaggttttcatccacttaaccctggacgaaaccggtcagcctaaaggcatcacatttgagaatgatggaagaatgatcagcggcagacagctcaaaagatcacgtttgacgtggcaaaagttaattacacaagagaatattcactatgaccccgaaaccatttcagatcttgaggcagaaattcaaaaaagagatgaaggcgaatatgaagtcgttacaacctacagcaggagacactacttcttcttcgtcacaaaaacaagaaagtaccctatcactttcaaatcaaaagacgaagacctaactgctgtaattacattgattttatctctcttgctagcacttttcggaattcaattttcggtagtaattgcggagccaggtgactatttcatcgactatgaaattggtaagccactaaaaattccagaccacggatacgagccataa

SEQ ID NO: 347478 - DNA, 156 bp, Pseudomonas aeruginosa
atgtaccagatgaccttacctctaattacatgctcctttctgagaaacagtctgggtatcaacatgatctgcttgataccgtctttaactgcctggcattcattctttttccgcaagagctgggtgataaagaaagactggcaatgcaggagatga

SEQ ID NO: 347479 - DNA, 147 bp, Pseudomonas aeruginosa
atgaataacaattgccagctcagcgaagaagaaatcctggatctacgccgtgaaatgcgggaagatttggaaaatattttgtttgagttcaaaaagaaggaggctcacgggctccttgttgccgagatcggcgcaccgaaaacgtga

SEQ ID NO: 347480 - DNA, 216 bp, Pseudomonas aeruginosa
atgaagcagctgacctccaccgaccacgagtacgccggcaagcgcaatcagacccgcaaggagctatttctgatcgagatggggagggtgctgggcatcgatcaatcttgggtcgaagctctggaggtagaccgggaagagctctatcatgccatgactgtagtgctcgccacctttcacgatcagtggtgttcctgcgctgccgctagccactga

SEQ ID NO: 347481 - DNA, 2895 bp, Pseudomonas aeruginosa
atgagtcagtacctgttgagcttcgctagggaaaatcttaatgataagccagacgcttacctggctttgctttggtgcatctaccaagtcaatggctccaagggccgatattctgagcatatcaaaacgcatctgaatgcagcgtccgagcgcttgctttccaccgattatcaaagactcgctcgccggataaagaccgtccttgatgcaaagcctgaattagactgggttgcaccttcgggtcttacacccttagccagtttgcaggccaaaaacttccgaggatttggtgacctcgggggcgacgacaaagggacgctgctgcgatttagtaagagcaaaaatatcttctacgccccgaatggcggcgggaagacgtccctgtgcgaggcgctggagtacggtacaacgggacatatcaaagaggcagaacgtcgcaagacaaagattcgggaatacatcagacgaggctcggccaaggagagcttaactctgaggggggcgaacaaggcgaaagtcgtacaaagcataacttggtcaagctgcttcgttgaccgcaaccgattacaggaattctcattgctgggctccaaggataccggtagtgcagaaagcgatgtccttgccaccctgttcggactcgaagagctccaggaagtcatctcgcgcttcgtcagaccggaaagcttcaatttgactagctacctgcgatccgacaatgcggtggctatggctacattggtgcagcgacgggacgtacttatcgagaagcgtagagcgctcttcgaggcaatcaatgacctcaattcaagagtttgtcagatgcttggcttggcatccgggcaccaccacgcagttaaggccagatttgtgcgcttggaagtgctcagggaactgaaagtaaaagcagcggaaaggctcaagaacttagagagtcccgtcccgttcaccttgaggcggttggctcgggtggcatccatctcaacgcgcttactggagcgcaaagccaaaatcgaatcggcactccttaaagatgcctcagcactgaactacagggcggtatttgaggccatacaggcgatagagcgcgatggtactgagggcgtagatgcttgccccgcatgcacaacgccgttgcgcagcgttaccgagaacccattcgaaaaggctcgacgagagctccaggccctcaataatctaaccaagttgcaggctgctaatcgacagaatcagggtcgagtcatccaactggccaacaggattactgccggcgtactcggcgtggattcaaataccaggcagggcgtaccatgcatggtctctctcgaagggctacgagcagcgactacagcctttcaaaacgccatcacgaggacggatgctgcggtgctagtgttggaggctttcaatgagctgatggtaggcaatgacgaacagctacgacggtatgtcagtgcgtgcgaccgtaagctcgctgaagtatcccgagctgatgtcgctgtagccgaacttgattccgaggttaacgccatcaagctaaccgaggagtcacttcgagtactcttcgatgaaaaaaaagcagcgcaaagagagttggagccgacaggtgctcaaatggcagatcttgcctgtcaacgcgctgagcttgctaccagtaatgcggacaatgtgcatttcaactcattcatccatgcacttcaggtcgaatacggaaacctctatcacgatctgattagctacaagctatcccttgagaaagcccgtctctcaggcatcgagtcgaaagctgccgagtactacaaagcgatcaataaccacgatgacgagcacgagcgtattgatgcactttgctttgaaaagatcagcgaccgctaccggataaaaatctccaatagcgacgggacgtcgattgatgctttctcggtactgagtgaaggccatttgcgagccctgggcctctcgcttcttttggctgttgccgagaaaaacaaatttccgctgatagttttcgacgatgtggtcaacgctatcgatagcgaccacaggtcgaacatcatcgaccttattttttcagacccttacttgtgccgcacccagatgatcgtgacgacacacgaccgtcttttttgggagcgcttctgcatcatcgctgaacggcaccggctggcagatcaacacacaagtaatgtgatgagttacacgaataagggcatagttctggtagatcaccccggggggtttcaggaaaaggtctaccgggcgctggcggtgttcgatataaggcaagctctggtgtactgccgtatttggtttgaatcgatggtggtggagtactgcgtagaaagcggtttatctgtaacggccaaatttggaaaagcacagctcaagcagaacatgtacctacagctcagcctcgaagaaacgttcagacttgtcgaacagcgcctctcctacgaccttactcacttcagcttgattaaaagcgatttggtgaattggcgcggacaaaatcaggagcatcatgcgtttgaagagggcagtcttaacttcgtccattcaaaaaccagcagagaagtcatcaagatctatgacgcgctccggcttctccagtgccagcttttccctcatgcaaagaaagcttctggtgagaagcttctcatcgacataaatcagcgcatagagcgtggaaaccggaaaatagcggggctcggcggtgcccctactgaagtacaacagcaacatgcccgattactacaggagctgaaagatcttgcggcagaggccactcaggagctgctatacatcgaacaatgcattgctacaaatcagccggaggattctgcattaaatgcgaatgtggagccggccatcgccgggcaaagcgagcctgagtag

SEQ ID NO: 347482 - DNA, 222 bp, Pseudomonas aeruginosa
atgggcaccaagcaagtgactatcgaggattgggacggcgatggtgctatccgcattcccgatgaagcacttcaagagctcggcatcgatgtcggcgacacgctctatgtgatcgaggaatacgttggcactacccgttgccttgtgctcagcaagacaccacggatcccagatcgtaccgatgatctggtcgcccagtgggatcgcaacagagacgaataa

SEQ ID NO: 347483 - DNA, 738 bp, Pseudomonas aeruginosa
atggccatatctcgcaaacaagtccttgaactagccaaaatcctgaattcaacgaccaaagcccttggacaaagcagcaagctagctgcacatcaagaaaaactcagtcatttgctgggctaccctcattggaatgctgcaagtgctgaccttccaggcacaatcccagaggaaactgcggtagcaatcgccttgctggagatttctgggcagtcgccaatgacctttctcgcgcatgggcgtgctgcgccatggaatttgccattggtggttcgtgattaccttgtcgcccaatcattgaaccctgacgggtttggggttaccagctacactaggcctgaccctgtgggggagccgaagcctcgattcctaaccactcgcgtgatcagcactgtcgatgagtacaccgagcacagagagctgctagatcccaacgacatcagttactgccaccagaaccacacacctatcgtggtgaccttcgcagatcagacaggaaaattttctttcaaactgaccatctggctagtcactttctacgccctaaggaaactccgaacaagtcagcgccaatcaggctgtagcttgctccatgggcttccaagccgacacagccggctaattcatccagaagtccgggttttccccggatttctgcgttttacaggcgtacctctcctgaatcggccagcaaatgtcggcgcgccatccacagattcgacagagcaaacagcgtga

SEQ ID NO: 347484 - DNA, 1989 bp, Pseudomonas aeruginosa
  misc_feature (1969)..(1978): n is a, c, g, or t
atgaaccgctccgcactcaaaaaatacgcccctcaggcccgtctcgattttatcgaggccgtcaccctacgtgctcgtcgtctcgggcttgatccgacattgccggtcagtgtcgaacaaacgggcgacgttttgctgattggggggcagccttttccggccagcgttgccaagcagcgcgccgagctggctcgccgcattcagcagcaaggctttgctactgtggttgaagccttggcctatacctggtttaaccgctttgtggctattcgctttatggagctaaagggctacctgagtcacggctaccgggtgctcagccattcggagggacagcagcctgagatccttgaacaggctcatcacctcgatctgccaggcttggatagggaagaagttatccgcctgaaaaccgcaggtaatcaggatgaagcgctctaccgcgagcttctgcttgcccagtgtcacgagctgcaccgcaatatgcctttcctattcgaggcgttggacgatgcgaccgagctgctgctcccggacaacctcctgcgtaccgactcgctcattgctcacctggttagcgatatcgaagaggccgactggcaagaggtcgaggtcatcggctggctctaccagttctatatcagcgacaaaaaggacgaagtgatcggtaaggtggtcaagagcgaggacattcccgctgccacccagctgtttacccccaactggatcgttcagtacttggtgcagaacagcctggggcgcctctggctgatggccaaccctggctccagcctcaaagaaaaaatgccgtactacatcgagcccgccgagcaaacgccggaagtacaagcccagctcgatgccttgatcatggtacggatggatgaggatggcggcacgctcaatccggaatcgctgaccgtgctcgatcctgcgtgcggctctgggcatatcctggtagaggcctacaacctgctccgtgccatctatgaggagcggggctatcgcctgcgcgagatccctcggctgatcctgcaaaagaacctttatggtctggatatcgacgaccgtgcggctcagctggctggtttcgccttgttgatgaaggcgcgcgaggatgatcgccggctattcgatgaggaaggaaacccgccacatctcaatgtgatggccattcagcaaagcgctggtttgccggatgaggaaatggctcgggtcattctcaatgccgctatccagatcgagggtggtgatgcattccactcggggcagctatttggtggtgggcagttggaaactcagcatagttcgggtctgactgtgctcgacctgcggcagttgattaagttgtttgagcatggaaaaacctttggttcgctgctggatgttccagaggttctcaggataaaactaggcagaattattcatctgcttgatatcgttcggtgcaagggagacgacttatcacgcagctatgccaatcaggtaattgaacagtttgcttggcccgctagtatcttggcgttgagctacgatgcagttattgcgaatcctccctacatgggggggaagggtatgaataatgaactgaaagaatttgctaaaagagaatttccccagagcaagtctgatttgttttcggttttcattgagcgggcatttctttggtgcaaggtttctggcctaaatagcatggttactatgcagacatggatgtttttatctgcatatgaaagaatgcgctgttcgataattgataagcacagtttgttaagcttgatgcaccttccatatgaagggcgtgggcctacagctatgggcataaattttggtgtttcagtccagatatttatgaattccaaggtctctagcgttaatggggattttgattgttttaggtattttgagctcggggaggatggtgtgcctccgaggtttccaagtgaaaatgagaggaatgttcatgccnnnnnnnnnntgattttttga

SEQ ID NO: 347485 - DNA, 630 bp, Pseudomonas aeruginosa
gtgggcatggacgagccgattaaggcagtcgagtggcagcgagtgctgaacgaggtgaaagcaacctacacctcccacctggtgctctacagctaccagaagtacccggcgcacgagtatgagggcttcaagaagaccttctctgcgttagcagagaaggtggatctatctgcggcgctgctgtggaaatgggggcactggggcaaggacaacttcccctcaaagcagaggctcttgatcagcgagatcgagagcctttggccgtctttccgacgctgggcgttgtctgctggtgctcagttcacccctgaggccacttttcagtggtgggataagcgcttgggtcggctgcgctatatcaccatcgcctacctgacccacctgatccatccgctacaggtgccgatcatcgatcagcacaacttccgcgcgatgaatcatttacggcaaaccccgtctgctaagaaaaagccatccaactggtgcgatatcgtccagctcaagctcttcctcaaggaggcgagtgaacggtatcaacgccctgatagtgaattcgataaatacctcatgatgtatggccgtgcgctgaagtcgcgcaaggtcaggtcgccccgtaaggaacaggcatga

SEQ ID NO: 347486 - DNA, 1737 bp, Pseudomonas aeruginosa
atgtacaagccaggcggtacgatcaagcagcttttggacaaggttgcatctcaggaatacatcttgcctgcgatccagcgtgagttcgtttggtggccagagcagatctgccgcttgttcgacagcctgttgcagggctatccctttggcaccttcctgttctggcgtatcgcaccggagaagcgccaggagtaccagttctacgactttgtccgtgattaccatgagcgcgacaactatcactgcgcgctattgaataccctccccgagcgagatctcgttgcggtgctcgacggccagcagcgcatgacggctctgaacattggtctgcgcggctcctatgcctggaagctgccaggcaaatggtggtcaagcaatgatgcctttccgatccgtcatctctacctggatctgctgggtgagccggatgcggaaacaggctcagagtaccgctttgagtttcttactgagaccacgacggagttaacaggagatggccagctgtggcttcgcgtcagtcgtatcctgatcgagagtgaggatgatttgctcgatagcctggacgatcttgatctcagcctcgaccagcgcaagcaagcgaagagggtgctgcgccatctctaccgcacggttcaccttaaagaaatcatcagctactacgaagagaccgaacaggatcttgagcgtgtgctgaatatcttcattcgcatgaacagtggtggtacgccgctttcgtactcggatctcctgctctccattgctgtggcgcagtggtcgaagctcgatgcccgacaggagattcatcagctcgttgaccagatgaacaaagagggcgaccagttcaacttcagtaaagacctggtgctcaaggccggcttgatgctgtcggacatcggcagcgttgggttcaaggtggaaaacttcaacaaggccaacatgacgctgctggaagagaactggtcgcgcatacgtgaggccttgctgctatccgttcgcttgctggccagcttcggcttcaacagccagaacctgcgcgccgacagcgccctgttgcccatcgcgtactatctgttcgtgagccagcctggtgaaggctacttgtctcgcactgagtacgcgcaagaccgcgagaatgtgcgcaagtggttgatccgcagtctgctcaaggcttcgggaatttggggaagtgggttggacaccctgctaactgccctgcgtgatcagattcgtacccatgcccagaccggcttcccggtagctcaaatcgaaagcgttatgtcctcgcgcggtaaaacgctgtctttcacggaggaggagctggatgagttggtcgaactgccctatggcgacaagcgtacctttgctttgctctcgctaatcttccctggcttcgacctgtccaagcactttcatgtagaccatatctacccgcaggcccgttttaccaagcctcagctgcgtaaaacgggtatcccagaggatcaggtggcggaagtggccgataaggccaaccgtctggccaatctccagttgcttgaaggcagcatcaacaatcaaaagcgccagaagatgccgcatgactggtacgcccagttcaagcctgatgctctcgcacgtcagcagtacctggctggcctggagatcaccgaccttccggagtcgctggctgacttcccagtgttctacgagcagcgtcgcaaggcgctcagggcccgaatcgtttcagcccttcagtag

SEQ ID NO: 347487 - DNA, 3672 bp, Pseudomonas aeruginosa
atgtccaccgtgcaaatcaagagtctgtttacccgctccatccaccgctccatcaacggcgtgatcaaggctgaccaggatgatgctgagtccgtctggcaggagctggatgagtacgtcatcacccgcgagttggatcaacacctgcgcagcttttttgaaagctatctggcggccctggacaacccccaggaggcgtccgggcgagtaggggtgtggatctctggtttcttcgggtcgggtaaatcgcactttctgaagattctctcttacctgctggagaacaagcgggtcagcaagaatggcgaaacgcgtcaggccatcgatttcttcgagcgcaaaattgccgacccgatgctggctgccgacatcaagcgcgccatcgccgctgacactgacgtgctgctgttcaatatcgacagtaaggccgacagcaccgatggccgtgatgccatccttcgcgtttttctgaaggtctttaacgagcgcctgggcttctgcggggatcacccacacatcgcccacatggagcgtcacctggatgatctgggcaagtttactgagttcaaacaggcattcgctgaagcgtcgggctccacctgggaagacgagcgcgacgcctaccacttccaggttgatgcactggcaactgctctttcgaaaaccctggggcaggagatcaaggacgccgatgcttgggtagagcggtttgaaagtgacttcagcctcaatgtcgaaagcttcgcccggtgggtgaaggaatacctggataaacgcggcaaggatcagcgcatcgtgttcctggtggacgaagtcggccagttcattggccaggacacccacctgatgctgagcctgcaaaccatcaccgaaaacctcggcacgatctgtggtggccgcgcctgggttctggtcacctcgcaggaagacatcgatgccgttttgggtgaagtgcgcgcctccaaggccaacgacttctccaagattcagggtcgcttcaaaacgcgtctgtcgctgtccagtggtaacgttgacgaagttattcagcgtcgtttgctcgacaaagaacctgagcccaaagatgccctgcgcaagatctaccgcgaaaaggccgacatcctgcgcaaccagctcagcttcaccaataccgggcgcacctataaagcgttcaccgacgaagacaacttcgccgccgtttacccctttgtgccgtaccagttccaactcgtgcagcgcatttttgaaagtatccgcaaggccggtgccaccggcacgcacttggcccgtggtgagcgctcattgctggatgccttccagtctgccgccaaggccgtcagtgaaaacaacgtcggtgtcctggtaccgctttaccgcttctatccctccatcgaaggcttccttgagggcgtggtcaaatcgaccatcgataacgccgccagcaacccaagcctgcaagagttcgaccccttggtgctgaagaccctgttcctcatccgctacgttgatgagatcaagggcaatgtcgataacctcatcaccctgtttatcgatgagatcgacgccgaccgccaaggcctgcgcaagcagatcgaagacagcctccagcgcctggagaaggaaaccctggtcagccgaaacggtgatgacttcttcttcctaaccaacgaagagcgcgacatcagccgtgagatcaaggatgtcgacctcaccagcgccgatgaggcacgtgagctgggtcagctgctgtttgatgaagcgctacgcggtcagcgcaagttccgtttccctgacaatggcaaagactttggtctgaaccgccagtgcgatctgcatcccctgggcaaccgtgttgatggcgatctgctgatctcggttatcagcccgttggtggatgaccgagacacctggagcgagcagcgctgcattcttgaatccagccagggggagggcagtgtgctcctgcgcctggaagacgaacgcgacttggcccgtgagctgcgcctgtacctgcaaaccgacaaatacatcacccgcaaaaacgacggcacgctgccgcataacaccaagcgcatccttcaggatcgtgccgaggaaaaccgccagcgccggcagcgtctgagtaccaccgtggatcgtctgctgcgtgaggccgaggtctatgtggcaggcaacaaactggagaccaaggcttccagcgcaccgatgttggccgaagaggcgctcgactacctggtgcgtaataccttcagcaagctgggctatatccagcacctgagcagcgatccgcagaaagaaattcaggccatgctggccacgccgcaaaccccaggtttaggtctggaaagtactggtgaagctaatccgcgtgcgctcaaggaggttagccagcacattgaactccttgcctcgcagtcacgccgcatcgttctgcacgaccttgcggagacccattacggtcgccggccctatggttggccagaatgggaaaccatattgctgatcgtacggctgatgctgaaaggcgaggtcagccttatcggcaatggtggcccgctggctccgcatcaagtctggaatgaaatctccacgccggcccgctggcgcaccactgaaatccagaaacgccaacaagtcggctctggagagctgcaaaaggcccgtcagctgtttaaagaggtgttccagaagatcgcccaggatggcgaggacaacctttacagccttctgcaaagcagtctggatagttgggagagcgagttcaaacagtggcgcgcattggcccaaactgggcagtacccggggttggacgacatcgaccagggcctcaagctgattggcaaactcaaggcagcgccggacagctttgatgccatccagttgttcctcaaagagcgtagtgcgctgctagacctctctgacagccacggtgacctggataacttctacagcagccagaaaaccgcctgggacaagctaggtgcggcgcagcgtgacttccagcccaaccggcccaagctggagaaggatgaaaaggccgctcgtgctctggctcgcatcgacgaaatcctcagcgccaaggctccgttcaatctgattcgtgagggtgaggggctgatccaaacgatcacccagattaacgacggcttcctcaaggaggcccacgagcgcgcggatgcctggttggacaagcaattggccaaggtcaatgcggaactggatgacctgcaagccagcacggatcagcgcaacaagagcctgctcgccctgcaaaacctccggcagaaaattactaaacagcgcagcctggcccacatcagccaaatgcaggatgaagcccgcgacctggccgatgcggccatcgatcatctgcacctgttagctgaacaagctgccgccaaagctaaggcagcagccagtgcaccggcaccaaagcccgtggtctcgggcagtggtaacccgggcgtgccagtagccgagcctcctgtggttaatacgcctgcggctgttgtcgcgccggtcgtaccggtcaaaaagcgcaaggtagtggatgctcaactgctcgcaggctctggttacatcgagacccaagctgatatcgacaacttcctggccaagctgcgtaaagagcttgagcaggcaatcgctgacaatcaacgcgttgaaattcgctaa

SEQ ID NO: 347488 - DNA, 579 bp, Pseudomonas aeruginosa
atgcccgtgaacgacctcgacgaacgcctcaataaaatcctggagaagatcacctctgatgacttccttggtggtcaaggtctgggcaacgaggtgccattctatgcctttgactatccacctcaggatgagctgagggtgcgcgagcacgtcttatttctcgaaggcgctatcagcaaacgccgccctgggctgaaggtcgcgttcatcaacctgtttgagctgctgctggacatgctcaacaaacgaaacctgttggataagtccatcgacctgcaagcgcagaagggcgatgaggctctgcaaaaagccctaaaggcaccactggatgcaggtaaggtcgccaaagagctggttgatcgctacccgcccagtgagtttggcctcctggtcatcaatggtgtcggaagtgcctatccgctgattcgtacccacaacctcctgaacaacctccagcctttcatggggcagactccgctggtggtgttttatccaggcctctatgacggccaatcgctcaagctgttcggtcagctgggtgagaaaccttactaccgtgctttccgactggtgagctga

SEQ ID NO: 347489 - DNA, 861 bp, Pseudomonas aeruginosa
atgagcttgtcggcttggcgattgaatacgctgcgcagaccacgataccagggcttagcccgcgaaaattgctcactcttcgacccgaaaccggccaggccagcaatgggagggagggttgggcgagggctgacgcaagacgccgatttggctgttggaagcaggcgccagatgctgtcgtggccagcgcatttgtggctggcgctcagtccagcctgcactcaaaataaccacttttatgtggttgatgagtgcgagtcctttatgagcagtgtttacctggccaatttcaccaaatgctcattaatcgtgcccgagacccggatcattgctggcttgctgttgcagagcgtggagcctcgggagtgggaaaggcaagtctatgagctgaatgtgctgcaaaagcgcacagccaagacggctgctacctatgccaatttggcgagagctcgcttgcaaacgatggatgtcgagctctggaagctggtgcatgaaggcagcatgccggttgctactcatgcggttttggccgcaactgtaaagttttcgcccttgttcggtgattttctgcggacggtcgtgcggcaccaattccgccgtttttcgacccacctggagctcaggcattgggatgcctatatcgaagactgccagcgtgctcagccggatatgcctggcttgaccgactctacgcggggtaagttaaggcaaaatgccatacggatgttggcggaagctggcttcatcgaagatacccgcagcctacgcttacgcagccaggccatcgagccagctgttcttaattatcttcgtcaacaaaatgagcagtacgtgctcgattgccttcaggtatgcccgtga

SEQ ID NO: 347490 - DNA, 873 bp, Pseudomonas aeruginosa
atgaaaaggtcgcagacagtcgcacaggttcgctgggatttggcccttcgctatcgccttatagaaaccgtcgcctggtgggagggtcgcctaacgactaatcatctgatgcagagctttggcatcagcaggcagcaggcctcaaaggacatcaacacgtacatcgctgagcatgcgcctagaaaccttacatatgacaagcatctgaagggctacgtaccggcaaagggctttaaatcgctcttcattgatgacagtgcaagcgcctacctgcacctgctcaatcagaactatgaaagggccccgcatatcgaaggccttgccctggcatatgcacataccgaggttcttcaggtgccggatcgctccattcgcccagagattttgagaccgctactcaaggcctgccgggatgggcttcgtctggaatgcgagtatgtgtccctggcaaacccagagcctgaaacacgtctgatcgtcccacacacgctgatctttactggcatgcgctggcacgtaagggcgtactgcgaaaagaacagtgattatcgggattttgtgttgagccgcttcagaggtgatccggacgtacttgatcactcagaaatggcgcgggagatggacggtgactggcaagctgaagtcagcatcatcatagaacctgacccacgcctgaagcctgcccagcgcgccgtgatcgaagcggactacggcatgcaaaatggtcagctaatcgttgagagtcgcggcgcgcttgttcagtatgtgttgcagcgctatcagctcgatccgcacaagatccagtctcgtgccagcgcgcagcaaatcgttgtggctaatctggatgacctgaagccctggctttatgaatga

SEQ ID NO: 347491 - DNA, 366 bp, Pseudomonas aeruginosa
atgtcccgtcttgctgaattccgcgcactcgaagctcagatcgccgaagaaatggcccgccttgagagcatgaaagaagataaaaagctccaagtggagattgattttgagcgcaaattgatcagtttgatggccgcgtacgacaagaatctgcgcgatatcatcatgattcttgaccctcatgtcggtcgttccagcgcgaaaagcgacgagggcaagggcaatcgcaaagctcgtgcagtcaagatctacgagcaccccgacacgaaagagcgcatcgagaccaagggtggcaaccacaagaccctgaaggtatggaaggaggagcacggcagcgagatggtcgagagctggcgcatccagtag

SEQ ID NO: 347492 - DNA, 363 bp, Pseudomonas aeruginosa
gtgactatcgattacagatacgacgaagttcaggccattctgaaggccgcaagctccgttcttggcgctaacgtgctctccggcatcatcgcgcacatcactagcgagcctgactttgtagatgccgacctggatctatatcacttctttacctgcccggcagatgagtcaaatcagggcaaattccgcactctaaaaagactggacagcaagaacatcaggttttttatgagccatgacgattccattcttctcataaaaacgctcactgacaggctttctgaagcatacatgcaagacaggtctcaagagaatctgcggcagtactacgtccaaagtctatccaacaagctttccatctga

SEQ ID NO: 347493 - DNA, 297 bp, Pseudomonas aeruginosa
atgaaaagctatgtgagtgaaaactggagcaaaacaattgagtcatgcgacttcactatgtacgtctttcagcgtgtatacggccataaaaaagggaaatttcctgactattttgcagtcgttttagatgcctatctgctggaatttgggatggttgagcatgactttaactctcaagcgcagctggagattgacgagatgattgaggctttgagcgcaaagtatcttgaagatccgagcaaagagcatctggctggagttatgcgcattaagctcgaaagagaacttggcatttag

SEQ ID NO: 347494 - DNA, 294 bp, Pseudomonas aeruginosa
atgcatcatattcgagttcttagcgacggcaagcacaatggcatttatgacttagatgctgagtcgaacttccctctttttaagaagttgtttttcgtcggtctgccgtcgcgaaagcttgtcaaagagatcattgcttgcgagcacttcataaacgaaggcggcgatctgcacgcgtgcgagtcatacgccgatgttatcaaaggcctgactgatatctatctacaagatacaagcaaagagcatctgcgcaagtacctatatcagcgactgcgagacgaactggagatctga

SEQ ID NO: 347495 - DNA, 333 bp, Pseudomonas aeruginosa
atgcgcgagaattttcagcagctcatgagacgccgtgaggccattgtttacgcacgcaggcacctggtattgagcgcagcacgcagagagacgggctcgtcaaacctggagctgctgaaccagctggcaccatttcacggcgctagaaacgactatgaagccaagcaatttgctctcaaatcacccgagctcgaagcaattctcacgctgaaagtctgcgagatttactggcaaaacccagcaagaacatggctcaaagacttcgaaagcatgctgattgacctgcctcttgagctgattctaaaccagaaccaggaaccccagaatgcctga

SEQ ID NO: 347496 - DNA, 204 bp, Pseudomonas aeruginosa
atgcctgactacgcccagctctacttcgaatatgagttggagtttggcagcaaaagagcccaaagcttgctgtttgtgtcagaagatctgtcgctagaagatgttattcgagatgaaatggccgctgaatatctacgaaatccagagaagaagcacttggcaaagtatctgcgagaacagctagagggggatttggggctatga

SEQ ID NO: 347497 - DNA, 264 bp, Pseudomonas aeruginosa
atgaaactgcttcggcttcttgaagacaacgagttctacgcctttctctttcactacaatcttggccgggcccagcaatacaaatttccagaccatttttatgaaattgctgctggccttgaacgcgaattcggcgaaataaaagagaagattggcgtgaataatgcgctaaaaaagctgtgcgacgagtacgaaagaaacccggaaaagacccatttgcatgtgtttatgcgaatgaaacttgaaagagatcttgagctatga

SEQ ID NO: 347498 - DNA, 324 bp, Pseudomonas aeruginosa
atgagtctagttccaacggatcttttcagctttgagcgcaaacgccagagccatgaaatccgctacaaaatcgactacatgtgcgagctgcttggagactatcttgagactctaatcagcgcagaaattcacttgctgactgtcaaagtgacgcacgacgatatcaagatcagctttcaagtgcctgacgaagaaccgtattactcatttatcagcttcggcaatgcgctaatgtatatgcgagcagtcatcaaacgcagcaggcgcatcgatctgcgagagaaatacacagaaaatttgctagctgcggagcttggcttatga

SEQ ID NO: 347499 - DNA, 291 bp, Pseudomonas aeruginosa
  misc_feature (153)..(153): n is a, c, g, or t
atgaccgttcaagaccttatcgacgccctgcttttgctaccaaaagactctgaaatcctagttgatggctatgaaaatggcgttgattccgtgcatgaattgcagcaaatccaggtcgtgcaggtgaagaacccagaagactttaatggccantatcagtttgaaactgacttaaatgatcgtggatggcatctcacgacagagcaaaagcaggacattacagagacgattcagcacggaaagcgtattaatgccgtgctaattcgcggcaagagaggctacttgagatga

SEQ ID NO: 347500 - DNA, 282 bp, Pseudomonas aeruginosa
atgaccaggctactgaactctgatgaagcgaagttcctgctatttacaattgagcacaggcacaactccaaaaaaaagaagaaatattttgcggattacggggagattaatatccgtgcttacttcgattttattaaggaattcgggtaccacaacactctcgataagcagtctttcgctgagtttcgcgatgtattagctgatatctatgtaaaaaacccagaacgccaagaatacgccatctatttgcgctcaaaacttgaagacgatctcaatatctag

SEQ ID NO: 347501 - DNA, 156 bp, Pseudomonas aeruginosa
atgctagtcagcgccaagattatcttgatcacgattacggcaattctggccgccgtggcgtgcagcattataagtagctatgcattttcagcacagaagcgcatcgataagcagggagttttgggctcatggttcgacaagccggttcacctctag

SEQ ID NO: 347502 - DNA, 216 bp, Pseudomonas aeruginosa
atggcaactgcgctctccgtactgtcgaagatcctgtgggttctactggcccttttcgtcggcgtatacgtgctcaacttcatctttgttggtgaggccctagcaacctgggatttctacacatggctagcacacggcatcgtagtttcgatctgggcattgctggcctttgctctgggttttggtgccaaaaagctgcgctccagggctgcctaa

SEQ ID NO: 347503 - DNA, 375 bp, Pseudomonas aeruginosa
atgcgcggcagtgactatgtagagctgtgcgctcaggccgtgcaggcgatcaaagcaggcaactccccgcgcattgacggatgcatgctgtacaccgaggggctgcgcacgggctatggaaaggcgactaccgaggtcgtcatgcaaggagccctctatcacgtgtcaccagctggtgatgactgggagggcgcgctaaattccccgttctacgacaagctcaaagccacaatgacccgctgcgacctggccgagtctactccagccatggctcagaagctttctgcgtacgtgcaggctaaaggaaagggcgcagacgtaatggcctcgatcttctacaacttcttaaaagacaactactcgggttgcaaataa

SEQ ID NO: 347504 - DNA, 375 bp, Pseudomonas aeruginosa
atgactcaagacgcaaaagaaaagaccattaaagaaaacatggcgaagataagggcacagggctatccgctcattcgtgacgtaaaagcagagaacgccgtcgagataatgagggagatcctggagcgcaaaagaagcatggacaaagccattaacgtcatcgattacatgcgcgaattgccagattcaatgaaaatcgaggcagtttgctggcatgctttgcgccaggattggtatgcactgcgccatattccgcaccatttgcagacaaaagagatgcagatctacgcgctaaagcagagtcccgatgcgttgttttgcattaaaggagaactatgggacgaactgattgagataataaatgagggagaatag

SEQ ID NO: 347505 - DNA, 369 bp, Pseudomonas aeruginosa
  misc_feature (188)..(197): n is a, c, g, or t
atgtttaactccactaacaattccatcttcaacactgctcgcaaaacccttggtgaagacatcctgaatgccctgattatcaaaacctccgaagccttggctgacgtcaagattgaaggccgtggcaatgcccgcgagcagctgggtttgagttcaaaaaatgtaggccgcgtaatgaagctggcccnnnnnnnnnngtttaagaaggtttcgacgggtgttggttgcaacaactacaagatcatgttcccaatcggttttgtagagatgctgaagcaggagattcttagcacggcaatggagtcttacaccaagaatccaaaccgggaagttgcggagctgttcttagataagagcttcctggcgtga

SEQ ID NO: 347506 - DNA, 2298 bp, Pseudomonas aeruginosa
atgttcgctatcaacactgaaatcaaaggctacacaacaatacagtcagatgacgttttagcaaaagctaaagaactccgcgctgattactcttctgcgaaaagaatcatcggcattaaagactgcgttaccgacgctattgatgccgcatacaaaacagcgtcaggaattgccgacatcaacggcacaatcatcgctgactctatctacaaaatgagcaagctcgacgtagcaatactgatcgctcgtaacgacagctctgaacgcgcaatgcacaaagctgcttatgagctagcacgtgatgctttcttgactggcgacatcagcggtaaatcaaaaatgctggcaaaagcctctggtcgctccgctgctgaatgccaatacctcatcgagcgaaagctcgagcgcatgaattctgagctgtatcgcagaacacaacgagtctcttctgtctatgaagatgtatacaccgtagcccctgaaagcccggcagatatcttcgaggacatcaaaaacggtgggaaatttctgctgaacctgccgaccgggtacggcaaaacgtcagaagtaatcgaacctcttgttcgtgacgcaatttacttcaatagaaaagtactggtaattagtcaccgccgctcgatcaacgcaaacatctgtaacggcatccccggcctggtctcttacgacgaatgcacttcgccagaaatcatcagaaatgctatgggcatcaagatcgttgttaactcactcagcgcagcgaagttcaaggatttcatcgagagcgctgacacagtgatcatcgacgaagctagccaggtaatttcccatgtcctcggcggcgaagttaaagcccgcgaagctgtctggaacgccctggattttgttgtcaaaaacgcgcccaccgtcgttatggccgacgccgatatcaatgcacgctgcgttgaaatgatcggctgggatcacacgctgtatagcattaagcgcgatcacagcgacatcagcgttaagacaggggatctcgatcatgtgcgtggccttgtaatcgaagctgccgctggcggcgaaaacgtgctggtctcgtgtgacggcgccaaggctgccaaggcccttgctgccgcgatcaaaaagcgcactggtgtggaagccttggtgatcacttctgagagcgcaaagtgggaagcccaagccgccttcattgctgacccaaattcgacggctcaccaggtcgtcatctacagcccagtcattacttccgcgctctcgatcacttccggtcacttcaatcgccacttcggcctcttcactggccaggtggttccttctgatgccattcagatgctccgccgcgaccgcacagccaagcagttcatcgtaggcatgaaagcccctgaatacagcaagcaagagcagctggaagcgtttgaagtgcgctctgatgccccagcgactcgtgccgctatcgaagctgcaaatctggatgaagtcaccaaggcggcgattattgaagcccttgatattgacatcaaaccatccgcgttcgagaagacccgtcgtgagcacatgagtgacgaggcttggctgcgcgaccacatccagaacagtttgccagcaacgctgatcgcacagggcttcaaagtcgaagtattggcgcacaacgacgagctgtcgctactcggcttcgtagctgatagccaaggtcgcaaggcggtaaacagaaacgcagctaagaagctaatggcaagcaagaaagcaggagccgacctggttgcacatgtggccgacgctggatctgctaacgagcaggaatacttcgaagtcctccgctcgcgagctgaagaggttattggccgcaccattgataaagctagtgccaggctctggaaagagggcgaaggcgagggtgccattaaccgcttccgcaagctcatgaagccctccgctgacacccccgaaggcaaggtgtacggcatgatcaaagacgccgtagagcgtatgctgaaagacgtaaaaatcaagcttaacgacgaaggcaatgtacccgtagagacgctggaaagactgtggaagtctgagcaaagcacgcagctcttcgacaagctaaacgccatgcgcctggaagtgatccgccagggcctgagcatcggcaaagccagcaccccggtagcgaagcaagccgcgatcactaagatcatgagccagctcggtttgaagacaaagaaagtcaatggtggcaaatcgggctactactacgtgattaaaagcgacagttttgagcaaatgatgaagcatgtggggtaa

SEQ ID NO: 347507 - DNA, 1275 bp, Pseudomonas aeruginosa
atgaagatccaatatgcaacccaatactcagcaagaacgaataccgtagctaataaagaagcggccagtttcaaagacttcttcgaaaacgagctggcagacatgcgcgtcagcgaaatcaaagatggcaaaacgttcatcccatcaagcttccgcgctctagaaagaacagctgaaaacgtcaaggcaatcagcattgcagtcttcgacatcgatcagaaaccagaagacgacatcatcggcctcgaagaaatagaggacgtatgccttgatctcggctacgagcacgctgtctgcacaagtttctcaaacacagctgattgcccacgcttccgcctgctaatcccgttcaatcagccagcttaccccgaggaatacccatttctaatgtcggccctggtagaggattttgacgacttcctagatggtcgtttctcaaaagtcctagaccgctgctggaagaacgaagtgtcgcgctgctacttcactttcactgtgcaccctgaacgcctgaatggcagcatcagcttctacaaccccggccaccccgccgacgtgcttgacctcaagatgcgccagtcaacatacggccaggacttcgactacgcccagccatcaaagccccgcaaaacaggaggcaccgcagctggggccaagggccgctcttacgaactcaaccgcctgcttggcgcaatgttccgtggctccacagaagagcagattgccaagcgcctgcttgagcacgaccaaacaacaccaggcttcggatacttcgctgaccatgaatacagcagaaacagacccagagcaggcgaaaaccaagcccaggcatcactccgctcttgccgtgcattcgttaaatctcacatcagctggctgcgtcgcaagacccaaacagacttcaaaatcgttaactgtcgtggcgaaaaccggggcgcagtgcctcagcatgatgcagttatccaggtctttaaggctgaacacacgacaaaaaacgggaaagaatccgcaaaattgagctgcaaaatcgtgtctggagaccatgccggggcgatcttctggcatacacttttcggagcaggctacagcgacagcgcgatcaaagtaagtaaagagatggccgggcgtgcttcaattgcaacgaagcaagaaattaatagcatccaagatatgatcaaactgagcggaaaaatcgtgaaggcccgcatcaaaagaaggccaggaactaacggattcccagaccagaacgaaatcggaaatatctacatcgagtaa

SEQ ID NO: 347508 - DNA, 339 bp, Pseudomonas aeruginosa
atggtgcttgcagaaaaatatgcgggagacagaaaagcaggaaagatctttaactacaacagcaagtctgtatcttcatcatttacgagggtctgcaaaaaatgcggcatcgaagacctgcattttcacgacttgcggcactctgccatcggaattttgtttgagctcggcctgcaaattcatcaagtcgcagtgatttcaggtcatagcgactggaaaatgcttaagcgctacactcatattgatgcggaagatgtgcatgccgcccttgaaaagcgcgaagcaaggcggcgaaatcgtcaggcgctgatggaatatctcaacatttcatcaaattga

SEQ ID NO: 347509 - DNA, 516 bp, Pseudomonas aeruginosa
atgaaatttctggatagagcgaccgacgaagccgggtatccggcaatgggatttgaggtgttctaccagcaaggcatttcctgctttgtgtggggactgccaaaggccctggtgcgtcaagcattcaagcgcgtttgtgccgatcaacagggaaagggcaatgcggtcgctatgtggcaagtgcgtgcgttcgtatacggcctatcagggcgctgtgaaggcggacaacgtgaacgcaaagcaccggcagggtacgagtggccaacaccgcctgatgcgtcctgggagctgatcgtgtgcatctatccaggcggctcattcgacctcgacctgttgcacccggtcagttgccgattctggtcagaggacaatggtttttttgatgtaccgaccgaagatcgctcgttgatgaatcgtgattggtttgagtcgatgggcttcgatgtgatgaccatgcaaccggcgttgcaggtacagattgccgaacccaaaacgcctcacctgaagctggtgtga

SEQ ID NO: 347510 - DNA, 228 bp, Pseudomonas aeruginosa
atgcaaacaacttacgttgggcaagacaaattcattcagcgcggcggccggattttcaggttcaccgatgatagcgctgaggcggcgacgaacgctgaatgggcagatggtgtgcttgctcgcgagaacgtgcgctatcccaacggccgcatgtcccatgaggtcgcgggcgaggtgctggagaaggccgaggacaccctgctcgactttctctgcgtgacggcctga

SEQ ID NO: 347511 - DNA, 579 bp, Pseudomonas aeruginosa
atgttgctctggctcactcatacaaccggcatccgcgttaccgaactggccttgcttgaggttggcgacgtgctctacccgagtggcgcgcttcgcccggaggtctatctgcggggtgagattacaaagggctgccgaccgagaaacatctacctgacgcatcctaagtgcatcgctgcccttgagcgctggatagctgttcgcctcgctcgcggctgggggctgggcgatccgctggagtaccggggcctacgccccgactcgcggctggtcatgactcacaaggggcaggctttcgagctggctttcaagcgccgggagctggagaacggcccggaggtttaccgggcctgtgatgctctacagcagaccataagcaggctctaccggcaggccgggatcaagcaaggcagctcgcatagcggtcggcgctcactggccgccagggtactcgcggcaaccggcgacgtggagacggtgcaaacgatcctgggccaccagcaccttgaccatagcaaaccgtatctgagcattgaccaagagacgattcgacgcgcgtttgagattgctttgtcgtga

SEQ ID NO: 347512 - DNA, 555 bp, Pseudomonas aeruginosa
atgtctgcgaacaacctctctataaccctccgcctcatgaccgagcacgacctaccgatgcttcacgactggctcaaccggccgcacatagttgagtggtggggtggcaaggagaagcgaccgactctcgatgatgtactggagcactatcaacccggagcgatggcagaagattccgtaataccgtacatcgcgatgctgggcgaggagccgatcggctatgcccagtcgtatgtcgcgctcggaagcggtgatggatggtgggaagatgaaactgatctaggagtgcgaggaatagatcagtctctggccaatccgacgcagttgaacaaaggtctagggacaaagcttgtccgcgcgctcgtcgaactattgttctcggaccccgccgtgacgaaaattcagaccgatccgagcccgaacaaccatcgagccatacgctgttatgagaaggcaggattcgtgcaggagaaggtcatcaccacgcctgacggaccggcgatttacatggttcaaacacgacaagccttcgagggccgacgcggtgttgcctaa

SEQ ID NO: 347513 - DNA, 816 bp, Pseudomonas aeruginosa; identical to SEQ ID NO: 153547

SEQ ID NO: 347514 - DNA, 810 bp, Pseudomonas aeruginosa
atgctcagcacacttccacaagctcatgcaactttcttgaaccgcatccgcgatgcggtcgcttccgatgttcgcttccgcgctcttctgatcggcggctcttacgttcacggaggactcgatgagcactccgatttggatttcgacatcgttgttgaggacaactgctacgcagatgtcttgtctacacgcaaggattttgccgaggcactgcccggcttcctcaacgcgttcaccggcgaacatgtaggagaaccgcgccttctgatctgcctatatggtccgccactgctacacatcgatttgaagttttctcttgcttccgatctcgaccagcaaatcgagcggcgggcggttctgtttgctcgtgatccggcagagatcgagaagcgcattgaggcggcagcggtggcatggccaaaccgtccctccgagtggttcgaagcacgtgcctggatctggctacactatgcggccaccaagctcgcccgtggcgagctttacgaagcgatcggcatgctcggtttcttccgtgagcaagtgttaggacctttgctctaccgtcgcgctggaaaggaccagcgcggagtgaggcgattggaaacccttcgactggatgaagagcgcagactagccaccaccattgcgctgcacgatgcgttgtctgtcagggatgccatcaaagcatctgcctccatctatctcgacctccgagccgacgatccgtcgttggaaccgacaacgcatatgccaggtcttctgtacgacttaatagaacgtgcggtaccaggcacgcctaaccgtcagtga

SEQ ID NO: 347515 - DNA, 1680 bp, Pseudomonas aeruginosa
  misc_feature (293)..(293): n is a, c, g, or t
atggcgacggacaccccacggattccagaacaaggcgtggccactctgcctgatgaggcttgggagcgtgcgcgccgtcgtgcggagatcatcagtccgttggcgcagtcggagacggtcgggcacgaagcggccgatatggcggctcaggcgctgggcttgtctcggcgccaggtatacgttctgatccggcgtgcccggcaaggcagcggcctcgtgacggatctggtgcccggccagtccggtggaggtaaaggtaaggggcgcttgccggaaccggtcgagcgcgtcanccacgagctactgcaaaagcggttcctgaccaagcagaagcgcagcctagcggcctttcaccgcgaagtcactcaggtgtgcaaggctcaaaaactgcgagtgccggcgcgcaataccgtggccttacggatcgctagccttgacccgcgcaaggtcatccgccggcgggaaggccaggatgccgctcgtgacctacaaggtgtgggcggcgagcctcctgccgtgaccgcgccgctggagcaggtgcagatagaccatacggtcatcgacctgatcgtggtcgatgaccgcgaccggcaacctattggccgcccgtacctgaccctcgccatcgacgtgttcacccgctgcgtgctcggcatggtcgtcacgctggaagcgccgtctgccgtttcggttggcctgtgcctcgtgcatgtcgcctgcgacaagcgcccttggctggaaggactgaacgtggaaatggattggcagatgagcggcaagcccttgctgctctacctagacaacgcggccgagttcaagagcgaggccctgcgccggggttgcgagcagcatggcatccggctggactatcgcccgctgggacagccgcactatggcggcatcgtggaacggatcatcggcacggcgatgcagatgattcacgacgaactgccgggaacgaccttctccaaccctgaccagcgcggcgactacgattccgaaaacaaggccgccctgacgctgcgcgagctagagcgctggctcacattggcggtcggcacctaccacggttcggtgcacaacggcctgctccaaccgccggccgcgcgctgggccgaggccgtggcgcgtgtcggcgtaccggccgtcgtcacacgcgctacttcgttcctggtcgattttctgccgatcctccggcgcacgctgacccgcaccggctttgtcatcgaccacatccactactacgccgatgcgctcaagccgtggattgcgcggcgtgaacgctggccgtcctttctgatccggcgcgatccgcgcgacatcagccgtatctgggtcctggaaccggagggacagcattacctggaaattccctaccgtaccttgtcgcatccggctgtcaccctctgggaacaacggcaggcgctggcgaaactgcggcagcaagggcgcgaacaggtggatgagtcggcgctgttccgcatgatcggccagatgcgtgagattgtgaccagcgcgcagaaggccacacgcaaggcgcggcgtgacgcggatcgccgccagcacctcaagacatcagctcggccggacaagcccgttccgccggatacggatattgccgacccgcaggcagacaacttgccacccgccaaaccgttcgaccagattgaggagtggtag

SEQ ID NO: 347516 - DNA, 501 bp, Pseudomonas aeruginosa; identical to SEQ ID NO: 83644

SEQ ID NO: 347517 - DNA, 840 bp, Pseudomonas aeruginosa
atggtgacggtgttcggcattctgaatctcaccgaggactccttcttcgatgagagccggcggctagaccccgccggcgctgtcaccgcggcgatcgaaatgctgcgagtcggatcagacgtcgtggatgtcggaccggccgccagccatccggacgcgaggcctgtatcgccggccgatgagatcagacgtattgcgccgctcttagacgccctgtccgatcagatgcaccgtgtttcaatcgacagcttccaaccggaaacccagcgctatgcgctcaagcgcggcgtgggctacctgaacgatatccaaggatttcctgaccctgcgctctatcccgatattgctgaggcggactgcaggctggtggttatgcactcagcgcagcgggatggcatcgccacccgcaccggtcaccttcgacccgaagatgcgctcgacgagattgtgcggttcttcgaggcgcgggtttccgccttgcgacggagcggggtcgctgccgaccggctcatcctcgatccggggatgggatttttcttgagccccgcaccggaaacatcgctgcacgtgctgtcgaaccttcaaaagctgaagtcggcgttggggcttccgctattggtctcggtgtcgcggaaatccttcttgggcgccaccgttggccttcctgtaaaggatctgggtccagcgagccttgcggcggaacttcacgcgatcggcaatggcgctgactacgtccgcacccacgcgcctggagatctgcgaagcgcaatcaccttctcggaaaccctcgcgaaatttcgcagtcgcgacgccagagaccgagggttagatcatgcctag

SEQ ID NO: 347518 - DNA, 828 bp, Pseudomonas aeruginosa; identical to SEQ ID NO: 28366

SEQ ID NO: 347519 - DNA, 792 bp, Pseudomonas aeruginosa; identical to SEQ ID NO: 342680

SEQ ID NO: 347520 - DNA, 555 bp, Pseudomonas aeruginosa; identical to SEQ ID NO: 347512

SEQ ID NO: 347521 - DNA, 1014 bp, Pseudomonas aeruginosa
  misc_feature (562)..(562): n is a, c, g, or t
atgaaaaccgccactgcgccgttaccaccgctgcgttcggtcaaggttctggaccagttgcgtgagcgcatacgctacttgcattacagtttacgaaccgaacaggcttatgtccactgggttcgtgccttcatccgtttccacggtgtgcgtcacccggcaaccttgggcagcagcgaagtcgaggcatttctgtcctggctggcgaacgagcgcaaggtttcggtctccacgcatcgtcaggcattggcggccttgctgttcttctacggcaaggtgctgtgcacggatctgccctggcttcaggagatcggaagacctcggccgtcgcggcgcttgccggtggtgctgaccccggatgaagtggttcgcatcctcggttttctggaaggcgagcatcgtttgttcgcccagcttctgtatggaacgggcatgcggatcagtgagggtttgcaactgcgggtcaaggatctggatttcgatcacggcacgatcatcgtgcgggagggcaagggctccaaggatcgggccttgatgttacccgagagcttggcacccagcntgcgcgagcagctgtcgcgtgcacgggcatggtggctgaaggaccaggccgagggccgcagcggcgttgcgcttcccgacgcccttgagcggaagtatccgcgcgccgggcattcctggccgtggttctgggtttttgcgcagcacacgcattcgaccgatccacggagcggtgtcgtgcgtcgccatcacatgtatgaccagacctttcagcgcgccttcaaacgtgccgtagaacaagcaggcatcacgaagcccgccacaccgcacaccctccgccactcgttcgcgacggccttgctccgcagcggttacgacattcgaaccgtgcaggatctgctcggccattccgacgtctctacgacgatgatttacacgcatgtgctgaaagttggcggtgccggagtgcgctcaccgcttgatgcgctgccgcccctcactagtgagaggtag

SEQ ID NO: 347522 - DNA, 600 bp, Pseudomonas aeruginosa
ttggtacaacttccggagccattggacccgacgaccgcagatcaaaaggtggcttcggacttctgcgataagctcggaaaaccccgcaccatcgctgagctaaccaaagagcgcctgcgtcgggctgccgccaaggtcaaagccgacaacccgatgtctgctggcgatactggcttccgcgtgttcaagctcgacacgtcgaatattcgtgcctggaacccgaaaccggatgatctggaagcctcgctgttcgaccatcaggaccacctgctcgaaggccgcagcgaggctgatgtgctctatgagctgctgctcaagctcggccttgacctgatcgtacccatcgaaaagcgaagcatcgaaaggcttgatgtgcatgccgtgggcggcggcgtgctgctggcttgcctggccgaaaagatcacccgtgagcaggtggagccactggcccaaggcatcatcacctggcacaaggaactggcacccgccggcgataccacttgcgtgttccgcgacagcgcctttgccgacgacgtggccaaaaccaacctcgccgccattctggagcagcacggcatccagaacgtgcgcagcttataa

SEQ ID NO: 347523 - DNA, 396 bp, Pseudomonas aeruginosa
atggccgttgcgatgccgctgcggtttcccttgctggatcaggcatcgctcaccatcgccgatctacaggactacccgatctttcgctggagggctgaggcgtgttcttcgctggatcatcggctgctctcgcgcctgcctgccgaccagaaaaatcttcagtacgtcacgtctttcgagatgatggcgctatgggtttccgccggctacggtgtcggggtatccgcgcaatcgcgcatcaagcgcgcccacggatggggaatcagcatgcgaccgctggacgacggcccctacgagatcgtgacgcacctgcatagaccccagggacaagcgaactctgtttccgagcgattcgagcgaagggcactgcagatcgcaaaatcggtcacttcctga

SEQ ID NO: 347524 - DNA, 270 bp, Pseudomonas aeruginosa
atggacaacttcgacctgggctgggaacagcttgcgcttgaggctggcaacgacgagttgtcgctgtgcctgtggttggccggtatagaccggtgggttggcacggttgagagaatcgagcagttcgtcgccgaactcgccgacgaaatcctgaaggctcagggtgagagggttggattccgcttcgagcagttcgccctgtacggacgctgcatcgttggcggtggtgtcgagatcgagggacatggtgatgctccaaagaaagaatga

SEQ ID NO: 347525 - DNA, 1227 bp, Pseudomonas aeruginosa
atgagcaccaagaaacacgacgtacccgaagaactgctgtctggcctgctggccaactacaagaaacccgaagacctcatcggcgagaacggcctgctcaaacagttgaccaagctgctggtggagcgagccctggacgccgaactgaccgagcatctgggccacgaacgcaacgaagcggtagccaacaccactggcaacacccgcaatggcaagagcaagaagaccctcaagggcgatttcggcgagttgcccatcgaggtgccacgtgaccgccatggcagcttcgagccccaactcatccccaagcaccagacccgctgggccggcttcgacgacaaaatcatctcgctgtacgcccgcggcatgacggtgcgcgagatacaggcccacctagaggagatgtacggcaccgaggtctcgcccagcctgatttcctcggtgaccgacgccgtggccgatgaggtcaagacctggcaagcccgcccgctcgatgcaatctaccctatcgtctatctggactgcatccatgtgaaggtgcgcgagggcgctgtgcgggtcaaggcggtgtacctggccatcggcatcaccatgacgggcgagaaggaggtgctgggcctgtggctggcgcagaccgagggggccaaattctggctgcaggtcgtgaccgagctgcgcaaccggggcgtgcatgacatcttcatcgcctgcgtcgatggcctcaagggcttccctgaagccattgaggccgtgtttcccaggacagtggttcagttgtgcatcgtgcacatggtgcgccacagcctgaactacgtctcgtggaagcgtcgcaaagaagtggccgcagacctgagacgcatctacacggcaaccaccgccgaggaggccgagctgatgctcggtgaattcgaggcccgctgggatgccgagtacctacccatcggccagtcctggcgcaggagctggagccggctgattccgttctttgactacccacccgaaatccgcaaggtcatctacaccaccaacgccatcgagtcggtcaacatgagcctgaggaagctaaccaagaaccggggctcgttccccagtgacgaagcgctgacaaaactgttctatctggccctgcgcaacatcagtcagaagtggaccatgcccatccgggattggaaggctgcgctgacccgctttaccattcagttcggagaccgcatctccgtcaattga

SEQ ID NO: 347526 - DNA, 1140 bp, Pseudomonas aeruginosa
atgggcaactacatcaagcctttgtccgcgggcgtcgcactgatcgcctcggacagcacctggatcgaaggcaaggcgatccagcaactgcaaaccaccgccgaactggacggcatgtgccgcgtcgtcggtctcccggacctgcatcccggccgcggctatccggtcggcgcggcgttcttctccgtcggtcgcttctatccggcgctggtcggcaacgacatcggctgtggcatggccctgtgggaaaccggcctggcccccggcaagctgtcggcggacaaactggaaaagcgcctgggcaatctcgacctgccgctggacgagacctggagcgactgcatcgaagccctggatctaccggcccgcgagcactggcgcgcgctcggcacgatcggtggcggcaaccacttcgccgagctacagcaggtcgagaccgtgttcgaccaggccgccctgcacgccctcggcctcgatgccggccgcctgcaactgctggtgcacagtggctcgcgcggtctcggccaggcgatcctgcaagagcaggtcagcctgcatggccacgccggcctgctcgacggcagcctggaagcttccgcctacctggcgcgccacgccgatgcgctgcgcttcgccgagggtaaccgccagctcatcgcccggcgcattctcgaacgcttgcgctgcgacggcctggaactgctcgacatcaaccacaacctggtggcgccggcacaggtcgatggcgtcgacggctggctgcaccgcaagggcgccaccccggccgaccagggcgtgctggtgatccccggctcgcgcggcgactacagctacctggtggagcctgtgccgagcgcgcagagcctgttctccctggcccacggcgccggtcgcaaatggcagcgcggcgagtgtcgggagcgtctggcggcgcgcttcagcgtcgaccagttgggccgtacgcgccttggcagcagggtgatctgtggcgaccgccaactgatctacgaggaagcgccggaagcctacaagggtatcgactcggtggtcggcgcgctgctcgaagccggcctgctgcgcctggtcgcccgcctgaagccggtgctgacctacaagacccgtggggagtgctgccgatga

SEQ ID NO: 347527 - DNA, 195 bp, Pseudomonas aeruginosa
atgatgagaggctccgatattccaccaccaccagggtatcgccctaccccgctcgccaccctcggccagcaattggtccgcctgggccaggcgatgcagaaccccaacaccaagctcggcgagttgaccgaactggtccaggcctgcggcgtcgacctgcggatctgcgacacgaacaaggagaatcgggcatga

SEQ ID NO: 347528 - DNA, 642 bp, Pseudomonas aeruginosa
atgaatgccgcgcagtctccccgccgcccgatcaccgccgtggtgttgcaaagcctgatgtggctctggctgatcagtcttagcgttttcgtcgctctcggctaccaggcggtgaacgagcaggccgaccagaagcggcttgattcccgcctgcaacgtctcgaagcgcaggcggcgagcctggccgaggccattggggccatccagcagcgtccagccgtcgcaacggcggctgacctcaaagacacccgcgaactcctggaagcgcgcgctgctcaggtcgagaaaacgctgagtggctatgccgctgccgaagaccttcaggcgctgcgcaccgaggtcgagcaaatcaagacgcgccagaccgttgcgcgcgccgcagtacccgctcagccgcgctcaccgagcaggcccaccgccaaaccagaaccgccgccactgccatttcgcatcgtcggtgccgagcttcgcgctggtcaacgcagcctgtccgttgcgccgagcgccgggtactacacgcccaaccagcttgaggtgctgctgcccggcgattcgctcggcccatggcgctttcaggcggtcgagggcaactccgccgtgtttcaggccggcgaccagacccgtcgcgtggcgatcccttga

SEQ ID NO: 347529 - DNA, 1293 bp, Pseudomonas aeruginosa; identical to SEQ ID NO: 324726

SEQ ID NO: 347530 - DNA, 360 bp, Pseudomonas aeruginosa; identical to SEQ ID NO: 324725

SEQ ID NO: 347531 - DNA, 1266 bp, Pseudomonas aeruginosa; identical to SEQ ID NO: 324724

SEQ ID NO: 347532 - DNA, 258 bp, Pseudomonas aeruginosa
atggataaggtggcccaccagtcgctccgctgggacctggagcaagacctttcccacctcgtcgaggacgagcacctggtgcgccaggtcctggacctggtcatgcgccgagtcgtccaggaacaggccgccgaggccgttcgccggcagcgcatcaaccgagacttcaagacgttccggcgcggccggagcgtgacgccgcccgcatgggcatttcgtgaaccgggcacaagcccacaagttgaacccctgaggtaa

SEQ ID NO: 347533 - DNA, 345 bp, Pseudomonas aeruginosa; identical to SEQ ID NO: 324732

SEQ ID NO: 347534 - DNA, 372 bp, Pseudomonas aeruginosa; identical to SEQ ID NO: 324747

SEQ ID NO: 347535 - DNA, 375 bp, Pseudomonas aeruginosa; identical to SEQ ID NO: 324754

SEQ ID NO: 347536 - DNA, 339 bp, Pseudomonas aeruginosa; identical to SEQ ID NO: 332086

SEQ ID NO: 347537 - DNA, 1359 bp, Pseudomonas aeruginosa
atgctttctaggattcttgatacgaagctaaggttcggtggaccagatactaaattcttctttattgcattctggaagagttatggtgctgtgacgcctaagcctcgttcgctgaagcaattggctgaagacctggggcttccggtgcaagctgtttcaaaagctgttgctcaactggttgagatggaggcattgcgagtcgtcacccagcctgaggggagggggcggccgaggtgtacctacgagatgagcaaagctatccagtcggatctgcgggaaatcgaggaaaggacgctgaaccaccccggtctggtcgagcatgttttgggtggcgaacgcatcagggcaatctggtctggctggaagggcgatgcgccgactgcgttggagcccggcacacgctcgcgggacgagaagcgagttgctccagtgcgggcggggaaactcagcttggcgaatcgtttgctgctcatgaccttgctaagtcacgccgatccgtccggggttgtcagggggctgagtagcaaggagctctgcttgctgacggggatgaatgacgccgctctcaagcagcgcttgcgaaggcttacggagctggggtttatccggaggcacatagctgggatcgcgagcccgattttcgccgagaagctcaaaggcgtctatttgcttaacctgaaccaccttcagctttcgcccgtttgcgatgtggtttctgtcgtgctgcatgagaaggtcgccgacccggaagtcgactgtaagtttgtgactgctgtcagattcgatcgtgactccttcctaaaagggaaggaataccaggcgcctcggagtgtgctgcgtctttttaggcgagctcccgatcatgcgtttgatcagcttgagctttttatttgtgactgcgtgtcgggctttctgtcgcgccactgggttgaggctgattctgctgcatggagaaaggtgcgcggtgtggactcgacggtgaaggagcaagtggcggctttttttcgactgccgatgctcgatcccaaggacaaagcgagtctggaccatgacgagattttcgacttcctccaacaccaagtttttgagctggccgacgaggttgtccagcgtttttcgcagctgtccgccatcgattttgccggggttagctacatcttggtgccggcgcatgtgtcgattggccaccgttgcatcgctctcttgactcaaagagcttcgggtcaaggactggccaatcattggatcaccaaggggcacggcgagccgatggtggcaagcgttgcgagggaggtggacattccgctgaatctgcgtgagcagtcagggttgctcacgccagcacgagcaactgagtaa

SEQ ID NO: 347538 - DNA, 189 bp, Pseudomonas aeruginosa
atgaccatcaagttctgggtactcatcgacatagatgaatttcggaattgcgccaacagcccagtcacgagcctgctgctgggcagccttatcgcccacgatgctctgagccagttcctcaagctcggagagcacctcctcctgcttgtcagtcaaatcagcatcagcaccagccaacgcagtccgtaa

SEQ ID NO: 347539 - DNA, 480 bp, Pseudomonas aeruginosa
atggttgcgttgctgacttcggaagccctcaacgttttggttcttctcgacaccgaacgtgactctaaggtgaccaaggacgagctcctcaaggcgaagcttatccgtgaccagaacgtcgtattcgtatcggaagcgttctcgccccagccgaacgaagcagatatcgaggacttgctcgatccggcggtctacgaggctcttgtgcgagagagctatagcaaagagctgaacgggaaggagttgaagttaaatgccaatatcccgcggatcgccaagcgcattgaagcgggcctagcagatcttgaaatccctttccataagactcgaccaacacgactgtttctcaagaaaatgacgacggaaccggaaaatgtgctgccagagcaaagccttgagcaattcgaggcgctgtttgccttgatcaacgggcgattggaaaagcacgttgctcgggatccaaagcccttcgagagttaa

SEQ ID NO: 347540 - DNA, 693 bp, Pseudomonas aeruginosa
gtgggtggtgagaatcgactcgggatggaactgcaagcccagctgtcgattgcgcggatcggccatcgccatgatctcgccatcggcatcggccaggcagtcgaaaccttccggcaggcgactgaccaccagcgagtggtagcgcgcgacgcgcaggtcagcgatgccgtcgaacagcgggtgacgctgatcgaaacgcagggacgtgctcttgccgtgcagcggcttcctcgcctcgcccaccgcgccaccggcggccagcgccagcgcctggtggccgaggcagacgccgagcaccggcaagcgcccgcgggcccaggcgagcaattccagcatgcagccggcgtcttccggccgaccgggccccggcgacagcaccagcagttcgcaaccgtcggccagcaatgccgcctggatcgtcggcaacggcgtatcgttgcgcatcacccggacctccgcgccgagcaggcagaactgctcgaccaggttgtaggtgaaggaatcgaagttatccaacagcgtgatgcgcatcgcgctctcccctttcgcgttcggcagcggccacggcggtcagcaccgccagcgccttgttgcgggtttcctcggcctccagccgtggatccgaatccagcaccacgccggcgcctgcccggacccgggcgataccttcgcggacctcggcggagcggatga

SEQ ID NO: 347541 - DNA, 171 bp, Pseudomonas aeruginosa
atgaagccgccggccgccaggttcgccagcaatcccgaccaggccatgccgatggccaggccgaccgccgcgatcagcgccgccaggctggtggtctggatgccgaagaaaccgaggatgcccaccaccagcagcacgttcagggtcaccgtgatgaacgaacccacgtag

SEQ ID NO: 347542 - DNA, 1665 bp, Pseudomonas aeruginosa
atgctacagaacaaccccgaactcaaaagtaagatcgaccagctctggaataaattttggagcggcggcatcagcaacccgctcaccgccatcgagcagatcacttacctgctgttcatgaagcgactggatgagctggaccagaagcgccaggccgatgccgagtggaccagcgagaactacatctccaagttcactggcacgtggattcctcccgaggaacgcaactggccagcatcggaacagcgccccatcgaaaaacgcacgctgcgctggagcgaattcaagcgcatgcaggcggaagaaatgctacagcacgtgcaaggcaaagtatttccctttctcaaagacctgaatggtgccgagtctaacttcacccaccacatgaagaacgccgtgttcatcatccctaagccagccctgttggtggaggcggtgaagaccatcgacgagatcttcgaggtgatggagcgagactcgcgcgagaatggtcaggcatttcaggatatccagggcgatgtctacgagttccttctctcggaaatcgctaccgcaggcaagaacggccagttccgcaccccgcgccacatcatcaagctgatggccgatctggtgcaaccgcaactggggcacaaaattgctgacccggcctgcggttcaggcggctttctgctcggcgcgtaccagtacatcgtcactgaactggcgaaaaaagcgggcgcccaagacctcaagcctgatgaagacggcttcacccgcacctcggtggccgccgcactcaccgaaaaggcgcaagccattttggccagctcactgtggggctacgacatcgaccagaccatggtgcgcctgggccttatgaacctgatgatgcacggcatcgacgagccgcacatcgactataaggacaccctcagcaagagctataccgaggaagccgaatacgacatcgtgttggccaacccgcccttcaccggcagcatcgacaagggcgacctcaacgagcgcctgcaactggccaccaccaaaaccgagctgctgtttgtggagaacatctaccgcctgctcaagaagggcggcaccgcctgcgtgatcgtgccgcagggtgtgctgttcggctccggtggggctttcaagatgctgcgccagatgctggtggagcgttgcgacctcaaagctgtgatcaccctgcctagcggcgtgttcaaaccctatgctggggtcagtaccgccattctgctgttcaccaaggtctgggggcctaaagacaaagtcagccagcctgccaccgcacacgtttggttttatgagatggccgctgatggctactcgttggatgacaggcgcacaaagcaggaaggctttggcgatttgcaagacatcatcaccaggtaccacgctagaagcgccacgacagacaccgaccgcaccgctaaatacttcatggtgccgcgcagcgagatcgcagacgagaagaacaactacgacctctcactctcccgctacaagaaggatgttttcaatgaagtccattacgacgcgccgagcctgattttggatcgactgattcagactgaggttggcgacgtggatgaagctgatctggccaaggtacaaagtggcatcgtgcgcgagttgttggagttgaaaggggcgttgggatga

SEQ ID NO: 347543 - DNA, 1572 bp, Pseudomonas aeruginosa
atgaagtggcacactttttccgatgtcgttactgacgccaccgccaaattcacgaaaatcaaagcttcagactaccaggggcaaggccaatacaaaataattgaccaaggtaaagagcctgttgccggttacatagatgacgtcggtctcgttaatgggcgattacttcctataataatctttggcgaccacacgcgtgccttgaagtatgtagatgagccgattgcgcttggtgcagatggtgctaaggcgctatatgtgaatcctggtttggcaagcgctcgctatgtttattattacctgcgctccgttcaaattaaagaagctggttatagtaggcatttcaagtttctcaaggaaattgaaataccaattccttttaagggcgacaagccaaactttgacgaccaaattcgcattgcgcatctgcttggcaaagtagacgggttgatcgcccagcgcaagcaaaacctacatgagctcgatgatctagtcaaaagcgtgtttctggatatgttcggcgacccagtgcgtaatgaaaaggggtgggataccttgccgttccacaaagtaggaaaatttttcagcggcggtacaccgagtaagagcagagacgacttctggaatggtgactttccttgggtcagtcccaaggatatgaaagcgacaaaaattgacgatgcaatcgatcatatttctgaggtggtatttgatcagacatccctaaaacggatcactcctaatcacctactgatagtcgttcggggaatgatactttctcattctttcccggttgcaattaattctgttgatattgctatcaatcaagacatgaaggcgatcaaagtaatcaagggttttgacgttgtttatttgttgcattgccttgcttcccttaagcgtcaaatcctaaagttggtctctactgctggtcacggaactcgaaaattcgacaccatagccatgcagaagttgttcattccgaaaccaccggaagatctacaaaaccaatttgtcaccatcgtcaacaaaatcgaagccctcaaatcccgttaccagcaaagtcttaccgatctcgaagcactttacggtgcactgagtcagcaggccttcaagggcgagctggatttgtcgcgagtacctatgcccgcgctggcccaatttatcgccccggtgtccattggagatcaagccgccgtacccgaacctgttttgcaggctgagcatgagatcatcttgtctgctagtgacaagctgccggctgcacttgaaagcgccgaagcacgcaaggcgttgatcgaggagtggctacaagactattacggacagcttcgtggtacgccattttcagtgcaggacttcatggctgcggcgcgagccaggttagcggagctgtaccctgacaccgacttggagctgggcgcctacgactacgaacacatcaaagcctgggtgtttgagcagattcgtttaagacggctaaaacaaacccgtgaaatcatcttcattaataacaaacgacagtttggtaataggctgctattgcgggcaagaaggatgcctgatttatga

SEQ ID NO: 347544 - DNA, 1833 bp, Pseudomonas aeruginosa
atgaaactgctgcgcctcaagattaccgattcggaaggttttcgcagtctgccctgcggttttgaacattacttccgcaccgattggggcttgcaggacgaactggcccagcccgaaggttttgcccccttcgtgtgcgccggcctcaatggcagtggtaagtccaacctactcgaagcgctggcggcgatcttcttccagttggaggtgcagcgagtacgtcgtaattttctgcccgaagtctttcagtacgatcccgacgacaatccggaagggatacaagagcatgaaggctatcccaatgcctatgagctggaatacctgatcaagctagcggataaatatcggtctcccgagagtccggagttcgcccatgtagtcgtgatcaaggagtcggataagtcgccttggctgcgctgggagaacaacgaagcgtttcctgttgaggactttgctttcagccggctgaccgatgaagaacgcgacatgttgctgccgcagtatgtgctgggctattcctccggcgagaacgagatcctcagcttgccgttcttcaagatgcgcttcatccagttcgatgagtactggaatgccttggcccgacagctctcttatcccggtcgtcccgaaacgcgactggcctatctggacagcggtttcagtcaagccatcctgctgtgcaacctgctgttccaagaagaagacaagctcagggccttttgcgtggatgtgggtatcgaggcgctacaggagttccgcattgttctgcgccgcagtattccggtcacgcatcagcaacttgctgcattcacttcgggtgactatgttctgcctaccgaagcggaggcggagcgtttcgcagatacgaaagtggtatttcttgatccgggaaccggtgactaccggctcaatctacttcagggactggaggccagtgaacgtaatgaacgcactgccattgttgagaagctcaaacgttgcgccacgatgcattttcacgatgaggcttccgataccttgatcctagactaccggatcaatgaagcaaccaagcaagcattccgcgccaatttcgatgacccggcaggcccagcactcgctttgttccaggccttacaggttctgctgacgctcaacttgtatagcgtaagcgacaccgtaaagactgatctctatcgctccaccagccactacgttagtgaaacggtgccgacgctggcctccgaccaacgcatcatgcgcttcaagaatttctacttcaccaagcagggcgtaaagaagccgatgctgctcaaagagctgtcggatggtgaataccagatgctgcacagcctcgggctatgcctgctgtttcgcaagactaatagcttgttcctgcttgacgagccggaaacgcactttaaccctcactggcgtgccagcttcatcactcgcctgcgcgagtgtcttggcgatgaagagggtgtggggccggaaatgctgatcaccacccacactccttttttgatctccgacagcaagccggacaaagtactagtgtttgctaaggacaaagctagcggcgtggtcagcatccgccacccggactacaacacgctgggtgcttccatcaataagatcacgatgaacaccttcgacaaacgcgaaaccatcggcggccatgcacaggcattgctggacgccttgcgagctcgttttgaacagggcgttgacgacaaggaggctttgatcacggagatccaccagcagctcggtgactcggtagagaaactgttgctgatcaaagccgtccttggcatcgatctgcaggggaatggggaggctcagggctaa

SEQ ID NO: 347545 - DNA, 1083 bp, Pseudomonas aeruginosa
atgctgtttccttacacatacgtgccacacgagatggaaaggatgcagacatttatcgacttcatctttcacgatgtgtggtgcaaggcgccaattggcctagtcttccatccggacttgttcgaggacaatcctgatctcaaagaggtaatggtcgagttcggattttctgcacaagcagcagcaagagggaaggtgttttacaaagacgtgaaggcaatctacgagcttttcgcatctctctcgccacaggaaatcgatcagttcaagcagtggtaccaaggtaacaacgatctagaaaaggtgtgcgccaatgatccggttgcccatcttgtccgttacgcagacatacccgttgcccacaaaggccttgccgaacaactagccatttttttcaagggtttgtactcgcagtctctgctggaccttgcagcactacgtgccaagatcggtgacattgacgatcattaccagactttcgtgcagactaacaaagccggcaaatgcccattctgcggaatcaacgatctgctgggcgaataccacagcaagcgcgaggcctacgatcactacctgcccaaggctctatacccgttcaactcgataaactttcgtaatctcgtgccggcctgccaccactgtaatagcagctacaagaccagcaaggaccctgcttacacaccaaaagaccccgccagggcagttcagcgccgcgccgttttctacccttataaaacggtgccccacaccatcgagttacaagtcgtcttgcatcagacagacatagacaagctgtctccagcggacatcacgctacaatttggcccagccgccatcaccgaggagctcgggacatggaaggatgtatactgcatcgaggagcgttacaaaaacaaactctgtggagagaatgacggcaagtactggcttacgcaggtgctggacgaatggaaagaggatggtcgagatcctactgaatttatgacgacattagcgcgccagacccagaagcggccgtatgctgattgcaacttcctcagaaagccttttctcgacgcttgcaagaaaatcggggtgctttga

SEQ ID NO: 347546 - DNA, 372 bp, Pseudomonas aeruginosa
gtgaccgacaagaaagagcagatcgcccgtttcatccagcgcgaatttccccagacccgggtcgtggtcgaagccgtcggcgagtgtagcgccacggtctccgggccgaccctgatggccatcgccgatgtcgcgctgtacgtggcggtactgggcgagatcggcatcgtcccgctggcggtgaccaccagcctgaccatcaacttcctgcggcgtcccgcggcggaccgccgggtggtcgccgagtgccgcctgatgaaggtcggcaagaccctggcgatgggcgaggtctcgctgttctccgaaggcgacgcggaaccggtcgcccatgtggtcggcacttactcgatcccgccggcgcaccgccgctga

SEQ ID NO: 347547 - DNA, 1551 bp, Pseudomonas aeruginosa
atgtctagctcggaaagaccaggtgttttcgacatatcggatgcagagggtgtgaatgactccgagcgattgctgatgaggctatgccgcaagtcgttcttgagcctgtgggcccacgccaacttgcacactgaccaggacatgcacaatgggaagggcagcgcgaaggagtttgccgatgtaatggtcgtatttggagatgacatcgtcattttttccgataagcacatcacctatcagtccgaaactgataccacggttgcttggaagcgctggtataaacgtgccgttataagttctgcgaagcagttgtatggtgccaaaagctggctggagcgtttcccacatagggtgtttttggattcaaaatgcactcgacctctgcccgtgcagattcccgacatttcaaagatacgttttcaccttgtcgcagtgacacgggggagtgctgaggcctgcgcgaagcacttctcaggcagcgtcggctcgcacatgatccagaccggcttggatcacaatgcctatgcggaacttccgtttaccactggcccgctagatcctagtaaagaatttgtccacgtctttgatgaaatctccctcgaagtgctgatgcacgagatgagcaccatcaaggacttcgtcgaatacctaggtgcgcgtaaggccttcttgctcaatccgaatacgacgataacgagtgcaggggaagagcaactgattgcatcttacttaatgcatactgatgaaaatgagcatgcattccaccctagtactgaaagcgtccctcatcacatcagcttcgatgaaacactttatcctgaactgctatcacgcccagagtacagggagatgcacgcccagaatgagataagtggattttgggatgcgttgatcgaaaaatttatcaccgtaggggatccaacgatctctgacctgggcgcgaatcaagagaatcatgaaactgagctcgccctgcgactgatggcaagtgaaaccaggttcatgagacgtgagctgtcacgccacttctttgagatgatggaactagcaaaggccgggcagtacgtacgccgggctcgcaccctgactacacagcaagctccagatctcctatatattttcttggcatgccccaagtttgcagagcagtcctatgtggactacaggcaataccgaagtaggcttttgctttcatatgcacagtgcgcaaaacttaagttcactggagctaagaccatcatcgcactcggctttgatcatccattgaaagactatcaagggggctccgaagatgtatgtgtatatattcgcgatgaatacaccgaggaggagcgggctgaggtggaaaggctgagatcggagcttggaatctacgcggattccagcaccccgacggagagcaggagctatcagtttccggcgttggaggatcgtcaacctggtgccgccgtcgttgtccggcaaactgcaaataagcgaaagcaactgatagtcaagaagtcaaaaaataaaaaacagaagcaagcaagaagagctaatcgaaaaaaataa

SEQ ID NO: 347548 - DNA, 894 bp, Pseudomonas aeruginosa
atgtctgatgcggagaaccagcaagtcgctgagaatacgccagaaagcgagacggtccgggggcaatgcgctttgtgcgacgacaaagacgtggtgctgaaggaatcgcatagcattccaaaatttgtgtatcaatggctgaaggatacggcgaaaactccctatataaggagcagtcttgatgttaacgttcgccatcaagacggccccaaagagcatctactgtgcgggccgtgtgaacagaagttatcggttctagaaaaagaactcgctgagaatttctttcgaaagatagccaattatcgtcagcagaggtcggtgattaccgtaaccgaatcaatgcgagtagcagtgctgtcgattttttggcgcgcccttctcaccaccaaaaaacttgacaatgaacgcacaattgaagatgacattaagctcgatgcgtttcttgcgaaagccaaggctgatattatcgccgaaaaatgccacgaaaaaatatatcttaccccatttttcggcacccctccttattatgagctgcccaaagaagccagctataatctggaacggtctattggcgctcaagacatgcgcttctttgacaatccgcacagattctttgtcaccttcaaactaccgtttatgtattttcacatcttcagtgacgggtggcccactgaagaaatatccctttcaactgagtttcttgcaggggatttaaatatcgcgcagataaaaagcattccaaacactttgcgaaattatattaaccatttgcacaaggaattccaacagagcctgtcgaaaatgactaaggcaaacctggagcaaatcaggcgcgacgcagaaaagaacgaaaatataacaggctctgacaagtccatgaagcgatcaagttaa

SEQ ID NO: 347549 - DNA, 1821 bp, Pseudomonas aeruginosa
atgaaaattgatgaggcgcttagtgctcttggtgtgaatcgggttatctggattgatgatcattttaacgatacgcctagtcagctttctgatctcctttgcaacaacatagagattacgaggcagtgcgagtttggcgaattcgaagaggttattgaacagttcgagtttaatgaggaaggggtcagggatcaaattacccagatcttaacggatcttcccagggagcgtcgttttagcatcaaggaagagtattttgcccaggaaaagagaaagctcgacatgccgaccgacgaaatcggaggcgccgagtttgactttttgtgccggctaatgaatgtgaaagacgatgatcgttggacctttgatgattatgagtctcagctgcccaagatctgctctgcagatgactcttctgtgagttatataattgatcttcgtgacggtgctgcacatccaactcgaggtctggacgttctggttgcactaaataagctcagctcaaaaggtactgctttcattttaactcatgaggcatctatagataaagaagaaaccctagagtgtgagttgagggacgctctatgtaagagtcattctgctcttagcatccctgtctgcgtgatagctaagcaacgcctctattcggaatcaggagaagaggaagagctgcataattcacttaggatcgcgattaaacgagcgggtcttaagaaaagcatgcatgaagtgcttgcatatgtttcgtcaaatgttcggtcaatgtttgatgaggccgcaagcacattgttggatattccgcctgagcagctagaggcgtttgtcgtcgagcgcggtcgtaaagagggtgtctctgagctgcatgtcgttgaacgggcagtttctgttacattggctcagaaaatacgtgacgtctttgccaagtccgactctgtgcagaagagtactcgtcggttgagagcactacgcactgttccattgaacgcgcctgtttctcagatccataagagcttgcatgagttcaggaatctcgaggtgtgggagcatgacaccttaattaacggggcttatacaccaattgcttgtggtgatgtgtttgagctggatgagttagaattcccgggcgaaatctctaggaaattccttttgctagcccagccttgtgatatttccattagagacaatggaaaacgtgatcttgagatggcttttttggtgccgcttaaggaaaaagaggctgcgattagagagaaagagaaactcaaggagacgccgctgcaatttaggattgatggggttcaatatgtgtgtgatttgcgagcagcagtatcggcccgtctgtcaatcttagatctttcttcttctagagctgatgggcgtgtacgtctcgataagcttcaggaggaaacagaaaatcttctccctggtcttcaaatcgcgttagaaaagggtcgcagacctatcgctaaactgctggatcagtactcaagcggaaagttgaagctttcaggcggcggtgatgaacttattcatccttcaatgcagctgactatgctctacaatggccctataaagaagattcattctggaaaatacaaaaaagcatctacggtctgcctagatggcatagagcatgatttgccggataggatcacttgggggttgaggcgttgtgggcgaatccgtatgccttatgcagcatccctattgaaggactatatgacagtcatgagtcgagaagcatttgacttagactttacatggttagagccggcaagctgtgttctgggtgaggactctgccggtgtgcctggttgttaa

SEQ ID NO: 347550 - DNA, 2613 bp, Pseudomonas aeruginosa
gtggaaaagcccttagaagacgcggctcttagagttagcgcgcatgtgttggtccagctcggaagcgagttggtgacggatgtagaacaagcaattctagagtgcgtcaagaacgcctatgatgctgactcgccggggtgtcgaattgatattgatacctttgagcaaggagtgcttcgagaggttggggcgttcagcaaattggtgatgttccgatctccatcagaaaatgtccaagtcaatttgtttgaccttgaaggtcggccaatagagtttgatgaatttggcaccccaaggactgattttgatgacgatacgttggtggagcgtaggctggaatatgttggaaggatcaccattgaggatagtggagatggtttgagtcctgagcaattgcgagattcttggcttgttattagtaactcttctaagcgtagcaattccgtagggcctaagaaaaaaacgaagaaaaataggacgccactcggcgataaaggccttggtcggttaggctcaatgaaactgggcgacgtgctaattgctcgctcggcgatagctaaagatgcgccggtagcgattgctcagtttcgctggactgattgtgagactgcttctactgttgaccaaattccggtatatacgcagcaatcagataacaccgagtcttttaagggtacgcgcgtctcaatttatgggctgcgagatatgcatgagtggagaaggaaggagagggtcacggagatcactcgaagtctcactcggttaatatctccttttgaagctacttctacttttcctgttactgtcacactcgacgggcaagagcaggcgctgaactctgttaccaacgaagcgttagctcgtgctattgcggaatttaggtttgagtggaagtatgatgagtctctagagtgtaatgtgcttgtcactactgcgcgcataaagagtcgtcttttcacaagtgctaggaatgaaaggcagagagagaattataatattggtttcagagatgatggaggtaaaggcttccttgattcgctgagcgaagtagcacgcctctctcgctacaagaaaaatgctaatccatccggcggtttttttgtcgagtttacccagcactttgactggaatcagatgctgcgtgattatggtggtgaggctatagatccaggcacatttagcggtgccttctatttctttcaccttgacggcttaaacggagttgaggaagaggcagtatctggtaacgccgtagatcgccagttaatcaaggatatggcaggaatctcaatattgagagatggatttcgggttcgttctcaaggagattggttagggatttccgcagggatgacctctggcagtacatatggcatgcgtgttaataacaccattggctatttttctctaactggtgaggaaaattttcggctagtcgaaaaatctgaccgggagggatttgttgaggatgcagctttccgtggttttatgcagatagcagaaacctgcagggacttcgctaacgatactttagaagatattcgccgtgcatttgataagtattgcaagaagcgactcgaagagcttggagatcagccgctatcggccactagctccttgcggatggttgaaaaatccgttcagtccactcaagctgccaaagaagctgctgtccaggctgtatcttccttattaaaagatatagaaagcattgagcgagacgtaagtgagggtggttcggatgacgaggctgctaaaaaggcagtcaaactcgcgaagagtgccgtttctgccattagctctgttcagcaaaagctcgagtctaggccgattacttcggcagtggttcatcatttacgtcgagagattgatgaaaataaggagcaaatggctgcattatatgaaagtgctgccgttggtctaagtgcacgtggtttggcgcatgagttgcggacccacctcacggaaattaggcagcgggctggggctttacaaaaatctgtgaaaagcggcatttttgatgaggctatattgatgcctcattttcgagccatccgatcgtcatgctccggtattgctaatgcggctgccttaatagatccaatgcttccgagaggtagggctataaaagaaacgctaagccttgagggatttattgaggagtatgtttcaactcgccagatggcttttgaacgcgaaggtattaatgtcgttattaattgctctggcagagatgtgaaagttagggtgagtcgctcgcgcctcttgcaagtgctagataatataattcgtaatagtgtctattggctcaagcgtggtcagactacgggtgaagttgatagagaaaagaaaattgtcatagatttggatggctctggtttcgtcgtttcggatactggtcctggtgtagacgtagcgtacgaagagtctcttttcgaaatgtttgttacggcaaagccgcatagagatgctggccagggactggggctatttattgtaactcagctattgcaaatggatggctgtgaagtaagtctggctacggatcgcaatgtggatggtcgtcgctataagttcaaagtcgatctccgctcagttgttgtgaagggataa

SEQ ID NO: 347551 - DNA, 1449 bp, Pseudomonas aeruginosa
gtgcgtttcaaccgcttacctctcaatggaaaagcctggtgtttggctcctcacacggataccattcaccaggctcctcgaattgccgagtcgagccatcaggaatggcttgtacctatggcacctcaaacagtgaatctgcgcaaaatctcattggctgatcggctaacagagctctcatcgccgccgccctcgcaatggctcgaaactggtctgaatgcaaggccaaaccttcacgggctccttagatacccagcaatgatggtcccccggatgcagggggacattattgatacgatactagcgtctataaatggacggtgtgatgtgttggaccccttcgtagggtcgggaaccatgatgaccgaagctatgataagaggcctggatttcaccggtgtcgatataaatccattagcagttttagtatgtgaagctaagaaggaaatcgatcatggggctgacatagagaaggccgcatcgctggtgctcgacgcccttgctaaggatcggcaggactcaatagatgttgactatcagaatcgggagaagtggttcagcaatgaaagtgcagagtacttctccaaaattagaagggcgatattaaaagtcgacgaacagggcgcgagaaaagttctatgggcagtctttgctgagattgttaggctttgttcgaatagtcggcctagtacatataaactccatatcaggaagcctggcgatagggttggggttgagaaaatatcagcgctattccgctctcacctggatgaaactgtggagagggtgaagcagtaccggtctcttatttctgaccgcggtgagaatcagccgctagcaactataatatgcgatgacatccgtagggctgatctaaacagcaggagtgatcgtcaccaaatcttggttacttctccgccttacggggataatcaaacaactattccttatgggcagttttcctacttggcgcttcgctggatcccaagagaagatcttccgcgaggttttcacgagatgcttctagccaatactcactccttagactctgcgagtctgggggggtccgtagtcaattccgatgcaaagcaagatgctatgcgtgctatttccagcacctttgatcagtttgtatcagtggcgattggtagtgataaggaaaaaggcattcgtaaagtttcaagctttgtatatgatttttacgaggcgcttaaacatattcgtgaagagtgtaatgggcaggctcattgggctctgaccacaggaaacagaactgccgtaggattgactgttccttttgatgaaatatgtagagatatcatctcctcacttggaggacggtctttggtttcgttgaagcggtgtttgcccgttaagcgtatgccctcgcggaactccatgggagttatgataactactgaaacaactttagtagcagagttctcatag

SEQ ID NO: 347552 - DNA, 339 bp, Pseudomonas aeruginosa
atgctgatcaaacttcccgactttgacgacgatctggccgagcggctgaagagtcgtactggccagaacactggctccaaggctgtgctgcgtgctgctgaggagtatttgcctcttctgctgaagctggaacatcgcgaccggcagattgccgagcttgaagagcggttgcgagtggcaagtcaggtgatcgagggcgctcgctcggctgctgcgctgctgcttgaaaagaccgctcagggcgatctgctcgccgctctggcatcgagcaagccgcgcatgaccggtgaagagatgttgaacgaactgcgccgcagtgcgggcttgcgtcagcgttga

SEQ ID NO: 347553 - DNA, 339 bp, Pseudomonas aeruginosa; identical to SEQ ID NO: 343272

SEQ ID NO: 347554 - DNA, 1047 bp, Pseudomonas aeruginosa
gtgaccggcagcgccggcttcatcggcgccaatttcgtgctcgactggctggccctgcatgacgagccggtggtcagcctcgacaagctcacctacgccggcaaccggcagaacctcgccagcctcgacggcgacgcccggcacaccttcgtcgccggcgatatcggcgatagccagctggtagcccgcctgctcgccgagcaccagccgcgggcgatcctcaacttcgccgcggaatcccatgtggaccgctcgatccacggccccgaggacttcatccagaccaacatcgtcggcaccttccgcctgctggaagaagtgcgcgcctactggggcgcgctggagccggaagcgaaggcggcattccgcttcctccacgtctccaccgacgaagtctatggctcgctggcaccgagcgatccggccttcaccgagaacaaccgctacgagccgaacagtccctactcggcgtccaaggcggcctccgaccacctagtgcgggcctatcaccacacctatgggctgccggtgctgaccaccaactgctcgaacaactacggcccgtaccacttcccggaaaagctcatcccactggtgatccacaacgccctggccggcaagccgctgccgatctacggcgacggccagcagatccgcgactggctctacgtcaaggaccattgcagcgccatccgccgggtcctcgaagccgggcaactgggcgagacctacaatgtcggcggctggaacgaaaaggccaacctcgacgtggtcgagaccctctgcgccatcctcgaccaggagcagccgcgcgccgacggccgcagctatcgcgagcagatcaccttcgtcaaggatcgtccgggccacgatcgccgctacgccatcgatgccacgcgcctggagcgcgagctgggctggaagccggcggaaaccttcgagaccggcatccgcaagaccgtgcgctggtacctggacaaccaggactgggtggccaacgtaaccagcggtgcctaccgcgagtgggtgggtaagcagtacgcatga

SEQ ID NO: 347555 - DNA, 1953 bp, Pseudomonas aeruginosa
atggcacgcatcaccgccgccggcgaacgcttgattgcgcagaagctgggcgaaaagaagatactggaggtcagccgcttcgtgctcgccctggtccccgggctggatcccaccaggcctgtggaccgcgatgtggccctgccgcccgcgcagcagatcgtccacaccgcacccgttacccaggccggttacgtcaaccccaaccaggtggtttatagcctgatgatgggttcggacgtgggcgacttcgactggaactggatcggcctggagacggcggaaaaggtcctgctggcggtcgcctacgtgccggtccagcagaagcgccggaaccgcccgccgctgcagatcggcaacaacgtgacgcgcaactttctggtggcgttcgacggcgcccaggagctgaccgggataacgatcgatgccagcacctggcagcacgatttcaccgtacgactggccgggatcgacgaacgcgagcgcctggcgaaccgcgacatgttcggccgggccagcttcttttcgaccgggctgctgctggagaaggccagcaccaatcaccgcctgaaggctggcctggcctacgtcgaggggatccgcgttcacgcgccggcggacgtcaacatcgccgcaccggcgctgccgaacaccgcctggctcgacgtgcgcctgcagcgcaaccagtccgacgtcgtggcgtcatggtccatcgcctggggcgccaaccaggccgactacaccgacagcgccggcgtccgccactacctggtcccgctcgcaaatctcgacgccggcggcaacctggtggccgaccggcgcctgccgaagcccatcaccggaccgctggtggatcactgggccgcccaggtcggcgactatccgaagctgcgcgcccgggcaacgacgaaagccgacgtacaactggacaagatccccaatgcgatcagcgacgacccgaccctggatcgcggcgacgtgctggccacgacgaaggcgacccgagccgtccagctccgggccgcccaggatctggacgacttggccaagagcctggggactgctgccaaacgcaatgttggcactgcagccggtaacgtgatggaggtaggcgcgttcggactcggaaacgcggctgtcagcatctccgggaaggccgccagcgatattgcagtgaccggctggtatatgggcagtggcatcacagacgcccccaccaccacctggtggttcattgaacatatccgtcacaacgatctatacgcccggcagaactggtattcgttctatgagcacaagaccctaacgcgccatcgatccagcggggcctggtcccccttcgttgagctgtaccacaccggcaatctcaacccccaggccatcgtgccggccggggccgtgatggcgtttgccatgatcgggccgccggcgggctatctgaaagccaacggcgccgcgatcagccgaacgacctacgcggccttgttcgcggtcctcggcacttactacggcgccggcgacgggtccactacgttcaacctccccgactaccgcggcgaattcctgcgcggcctggacgacggccgaggggtagaccctggccgggtactgggcaccaaccaagccagccagaacctttcccacgtccacggcgcaagcaccgccgccgccggcaaccacactcacagcgtcagcggcaccgccgccgcagccggcgcccacagccacagcattccgtctgtgaacgccaccgcgctggtgagcgggccgcgcctctcgacgctgatcggtagcaacacagcacacgcgacagacgtcgccggcgcacacacccacagcgtcagcggcacagcggcggcggccggttcccacagccacgccgtaaccatcgcggcaaacggcggcagcgaggcccggccgcgcaacgtttccgtcctcatttgcatcaagtactga

SEQ ID NO: 347556 - DNA, 141 bp, Pseudomonas aeruginosa
atggccctggccgagcgctggctacctggcgccgcgcccacggcagacaacctgggcacggccaagtggctggaggacgagcactggcggcggatggagatcgccgtggcaaacggcatcgccaaggccctgaaaggctga

SEQ ID NO: 347557 - DNA, 258 bp, Pseudomonas aeruginosa
atgcgggtttattgtaatgagtgtggggcgaaggcgaggattgcgacgcgggagagtatttcagcagtgtttacgaagctctactgccagtgcctggacgcgaagggctgcggccatcggttcgtcatgcacctgacgttttcccacactctaataccggcagcggagcccctggaccggatcctgtttgaccggctccgggagatgccccgccaccagcaggtcgagctatttaatcagctcggggcgttgctctga

SEQ ID NO: 347558 - DNA, 204 bp, Pseudomonas aeruginosa
atgaatgtaaaattagccaatactaacgcactcgacactttgaacgacagccgcttcgtgatgaaatttgtgggcgcagctctgagcaatagcaattacagcgaagaagaacggatcggcgcgcagattgttctggaatggttggatagacgcatgtccactaccgtgttgtcattgacgaatcagagcaacgccccgagctga

SEQ ID NO: 347559 - DNA, 231 bp, Pseudomonas aeruginosa
atgagagctgaccgcgacggcaccctggccgagcagaagcgtttcgcgctgcgctggcaggacgtgaaccagcgcccggaatgcggcaactgccgttacctgcgcaccgagaaagccccggccgcgaactgcccgggcgccgccgtccaggcgatccaccattgcaccctgggcgggttccagacgaccagaaccgcgatctgcgagcagcacaagagggccgcgtcatga

SEQ ID NO: 347560 - DNA, 357 bp, Pseudomonas aeruginosa
atgacgaccatcaccgttcgcagctcgacgggaacctacgtcgcccgcgccaagggccacaagccgaccgccagttgcacgcactccccccgcatcgcggccgagcgcctggcggaaaaactgggcgtgcctcgggtcgctctggagctgcaggagcgccaggacaaccgctggatcttccaggccgtcgagctgaaacccggcccgccgagccactttgtccacctctgcccggactgcgaccgaacgcacctggtgcggatcgagcgggacgcgccgcatccctactgctgcagtcggcagactctgttcatcggccatcgcaacatcgacggaggatccgcgcatgagagctga

SEQ ID NO: 347561 - DNA, 255 bp, Pseudomonas aeruginosa
atgtctaactcccgtaccgctgaaaagttcgtggtgcgcctgccggacggcatgcgcgatcaaatcgcggagactgcgcgggacaaccatcgcagcatgaattccgagatcatcgcccgtttggaacagaccctgatcgacgacctggaccgtcagcaccaggaccggctggtggccctgcttaacgcccggatcgacgttctggaagaggcgctgcagttgatccaggccgaccaggtggaggcccagccatga

SEQ ID NO: 347562 - DNA, 255 bp, Pseudomonas aeruginosa
atgacgaaacacccaagcggtagcgccgtaaaggctaccacagcaccgcgccacctggtcgccctggccattgtcggcggcgccctgatcgcgttccaggtcaacaagaccgacgccacccgggccagcctgcagagcgtcaccgacatggcccggcgcctcggccagttgaacgaccaggacgcctcagtcgtcgcccagttgctagcagccgcggatcccgctacccagttcggagaacacccccatgtctaa

SEQ ID NO: 347563 - DNA, 357 bp, Pseudomonas aeruginosa
atgaacaaccagaacaacctacgcagcctgctgaaagcccacctggcccatgccctggtggaccgctacaccaccagggtcttgcgaaccctcgtcccggcggcgctgtgccacacagaaacgggcgccattgtcgggcgcttcctgctcggtctgcacgacggcgcgaaacaccctttcaacctgaacgagctgcgccgcctggcgccggaactgcacgaagactgcctgcagatcctcgccctggacgggaccgacatgctggacctgagaaagaaaatcgaggcgggaacggacggtgccgtcgtgtgggatctgctgaacaacatgtgggcgccgcaagcgccgaacgcctga

SEQ ID NO: 347564 - DNA, 1056 bp, Pseudomonas aeruginosa
gtgtcgatcaagaaactggagaccggggagtggttggtggactgccggccagaaggccgtgccggcccgcgcatccggcggcgggtgaagtcgaagaacgaagccatgcacctggaacgccgcatcatgggcgacggctccaggggcgagttcgagaagtcgccgaagctggacgaacgccggctgagccagttgatcaatctctggtacgcactgcacgggcagaccctaaaaaccggtgaacagcgcctggcgctgctgctggccatggccgagcgcatgggcgaccccaaggcgcacaagttcagcgcgaaccactttgccgtctaccgggccgagcgtgccgagggcaaacacaccagggcgaagccaggccgtggccgcagcaagggcgacgagaagcccaagccgatcagcgccaacatgctgaaccatgagctggcctacttgcgggcggtgttcaacgagctggagcgcctgggcgagtggaccggagacaacccgctggccaaggtgcgcgcgctgaagtttgacgaagccgaaatgacctacctgtcgggcgagcagatcgccgaattgctccaagccttggccgccgaggagtccgccgccgctttgatcgccgaggtgtgcctggccactggggcccgctggggtgaagccgagggcttgcagccgcgccaggtgcgcaactgcctgattcactacagcaagacaaaatccagcaagaaccgcacggtgccgatcagcgcagatctgcagaagcgcctcgaggccgcgcttccgttccgtccgggctacaacatcttccgcaaggtggtggagctgatcggcctggagctaccagatggccaactgacccacgtcttgcgccacaccttcgccagccactacatgatgaacggcggcgacatcctgaccctgcagcgcgtcttgggtcacgccaccttggccatgacgcagaagtacgctcacttcagtccgggccacctggctgacgttgtgaacctgaatccgctggccaaacgtgcctttttggaggatgccgatgtttga

SEQ ID NO: 347565 - DNA, 522 bp, Pseudomonas aeruginosa
atgtttgatggaacagactggacgacagtgcttgtcggtttgattggcgcggcggctggtgcggggccgacgctatacctccacctgagcggtgttagacgagagagacgggcggtgaaggcggcgattcttgcagagatcagggccctggtggaactgatcgagcgtcggggttatctgtctgacgcgcgtaaggagcgccagacgctaagcctgcgccttgctagggccacgccgttcacccagcaggaagtggcagaagtcttcttccaggtgctagttccgcctgactacaatttgatttaccgcgagaacgccacccgcttagggtgccttgagccgggcgaggcggctcaggtggtgaagttctatcagttgattcagagcgttattgccgacgtaacaccaggtggccttctgtacgaaggcacccgggaagtggggcagattgatcaaaccctgacgatcttcgaagaggccatgcaggtaggaaaagccctttccttggccggagaagcctag

SEQ ID NO: 347566 - DNA, 2259 bp, Pseudomonas aeruginosa
atgttcgcgcccagcaatcaacgggaccgcatcgcgcaagttgccggccacccttcgccaaaccactcgcgtataacggccagcaccacaccgagccccctgtcatcagcgatccagtcggcctgtcacgcgctgctggcgggaagtgtgttgttctcgagcctcggacacgccgaaacagccccctcctccccccggaccgaggaggccctggccctgcccgccgagaccgtcaccggcggccgcccccaggacgacacgcccctgccctatgccggcggccaggtcgccgagggagcgaggctcggagcgcttggcaaccagagcgtaatggacacgccgttcaatgtgaccagttacaccagcgaactgatcgacaatcggcaggcccgtacgatcgccgatgtgctgacgaacgatccatcggttcgtttcaccacttccagcgggcatgcctacgagaacttccggattcgtggcttcgacgtcaaccagaacgacatggccctgaatggcatgtacggcctgctgccggtcgggcatacgccggtggaaatgttcgaacgggtggaactgctcaagggacccagcgcgctcttttccggcatgtcgcccagcggcgcggtgggcgggacgatcaacctggtgcctaagcgggcgacggacgatccgctgagccgcgtaaccctcggtttccagtccgatagccagctcggcaccaagttcgacctgggccgccgcttcggcgaggacaacgctttcggcgcgcgcatcaatggctcattcagcaacggcgacaccgacctcgatggccaatccaagaagcgcgagttcctctcggccgcgttcgactatcgcggcgacgcgctcaaggcctcgctcgatacctactacagcaaggagcgcttcaagggcggcacgcccgcgatgttctggctgagcagcagcgacattccctcggcgccggaccccgacaagaaccagttcccggcggcctggggcatccaggaaagccaggccatggtcggacgcatggagtacgccttcaacgagcacgtgacgggcttcgccagtgtcggtgtacgcaaccacgacgccaggggcttcatcaacggcactcacgtgcgcaacatcgatgccaacggcaacagcgccaggtcggtcacctcggcccaacgtgcgtacgaggatacgctgtcctcggaagccggcctgcgcttcaacttctcgaccggcagcgtaggacacgaaatggtgttgcagggctcccgcctggagatcgagtccggctccgccagcgcgctctcgacattcagcaccaacatctaccatccgacctatcacgatctgccggatgtccccggccatgcgccgaaaacggcggaaaacacgctctccagcgtggcgctgatcgataccctgtcattcctggacgatgccttgcgggtgacgatgggcgcccggcaacagcgggtggaaaccaccaacttcagccccacatccggcaacaagaccggctcgtacgacaagacgaagacgacgcccgccctcggtgtggtggtgaaaccctgggggccggacatctcgctgtacgccaactacgtcgagggcctgagcaagggcgacagcgtgtccaggccgacctatgcctacgactacaccttcgcgccgtacaagaccgaacagatggaagtcggggtgaagtggaacgccggcaccttcaccaacaccgtcggcctgttccagatcaagaagccgatgctggtcatggtcaacggcaacgagccttccgacggcggcgagaaacgcgtccgcggcatggagtggaacaccttcggcgaactgaccagccggctgcgcctgctgggaggcgccgcctacacgcagggcgtgcagaccaagacggcgaacggcgtctacgacggcaagaccgcggtcgccgcgccgcgctggcaagcgaacctcggcgtcgagtgggacccgacctgggtgcccgacctgacgctcagcggccgggtcaccagcaactccagccaatacctggactccgccaatacgcaaagactgccgggctggagtgtgttcgacgtcggcgcgcgctacgtcaccgccatcgaagaacgtgaggtcaccctgcgcctgaatgtcgataacctcttcgatcgccattactattcgggcgccttcagcgataccaccccgatcgccacccttggcctgggccgcacggtcatggcgtcgctgaccgtggatctctga

SEQ ID NO: 347567 - DNA, 273 bp, Pseudomonas aeruginosa
atgcaactcttcacgcttgtcggcttgctggcctcgttcaccggctgctcatgcctctatctgtcctcgacgaaccaatcgtggctggcgagcgcctggccgcgcctcccggcgcgcgtcggcggcgcactgctgctcgcgctcgcctggctcgccctggcgcaggaagcccaggccgcgacggcgaccttcatgttgctggccatcctgatgctggccttcaccctcatgccttacctgggagcgttccgtcatgcacgccgcaagccctga

SEQ ID NO: 347568 - DNA, 315 bp, Pseudomonas aeruginosa
atgcacgccgcaagccctgagcccagacggaacaagcctggagcgattcgccgcgactggatctccaagaccctcgccggcctcgtactgggattgtccctggccatgaccgccagcgccctgtattcggccctgcacgccgacctgcggctaccggtccgcggccagttgatgatgtggatggtgccgccgatcgggctgggcacgttgtccacggtgtacttcttcgccagcggtctgcgcgcttggctctggctgggcctggcgaatgcccttgcctacggtgcgctgctggtgctgcggcagggcctgtga

SEQ ID NO: 347569 - DNA, 1641 bp, Pseudomonas aeruginosa
atgagagctgacttcatacgaatctacaaatccgtccatacctggaccgggataatcagcgggatggcattgttcatcgcgttctatgccggagccctgaccgtcttcaaggagcctctcgcacgctgggtctcgcccccgagcgaaacgaggccggtgccgctgagcgaaactcccggcctgatcctagaggcactcgccagggcccccgccatagccaagggtttcgtcatcaacctgcgcgacgccgaagacgtgccggcgcgcatgcaatggcaggtgcgcgcccagcaagcggatgaccatgacgacgcggcgacgcgccaatacgccgcatcgctggacagcaatggcgcggtgcgactcgacgaaatccatccgtcgccgctggcgaacttcatcgacgtgttgcacagggtcgtcggcctgcccacggactcggacccaaaccgctggatcatgggcatcgtcgccgcgctctacaccttggccctggtgtctggggtgatcgtgctgctgccgaccctggccaaggacttcttcgccctgcgcgtgggcaagaacctcaagcgcatgtggctcgatgctcacaacgtggtgggcatcctcagccttcctttccacctggtcatggcgctgagcgccgtggtgttcgcctatcacgatcagatctatgccttgcaggaccgactgttgcacggcggccagtggagccagagcttccgcggcgccgccggcacgcccgagacgaaggcggcgcgcgatccctccgacctgctgagtcccgtccagttgcttcgggccgcgcgcgaactcgcacccggactgcaacccagcatgctgcaataccagcagatcgacggtccgcgcgccgtcgtgcgcgtctggggcaaggacccggccgcggtgtcccctcgcgcgcttggcggcttcgctgccttcgatccctacacgggcaaattgctgaacacggactacctgccgggacgacaggacacaccgaatctgttcatcagcagtttcttcgccctgcatatggcctcgttcggcggaaccaccgtgctctggctgtacttcctgctgggcatggccggagcatggctgttctacagcggcaacctgctgtggatcgagacccgtcggcgcaaggccaacaaacaccaaggcggtacgccgcggcagcgactcgatacccgtctgatggccgctgccacggtgggaatctgcctgggatgcgtttgcggcatctcgttgaccatcgtcggtggcaagtggctgaacggctgggccgacgacctgacgcgctgccaccaggcgctctactactccgcgttcttcaccgccctcgcctggtcgttctggcgcggcgcggcgcgcgccgcggtccaactgctctggagcgccgccctactgacactgtgcataccgctcaccaccctgctgggatggctggttccggccaccagtttctgggcccacacatcgccagccaccctcggcgtggatgcggtagcccttgccggagccctgtgctttgcctggatggcccggaccacggcgcatcggacagcacaagggcgagacgatagcgtctggtcttcggcacagatatctgaaagagcccctaaccaacaggaatga

SEQ ID NO: 347570 - DNA, 2430 bp, Pseudomonas aeruginosa
atgaagtccctaccgctgttcaaagccgtcgactccctgtcgcttactcccgcaactgcccgcaggttgctccatctgttggtggggctcttcgtcctgtgcctattctgcgcctgcgtgctctatctctggtcgaaggtcaacagcggcgtttcatgccagcgtcgtctgatgaatgatgcggccagcgagatgcacctttatttcgggcagcgccagatgctgctcgagcgactgggatcgctggtggttcgtgatccggccctgccgaaacgggcgttggacccgcatcgtcaactgcctcgctatcagcggcaatgggtggccctgggggaagcaaggagcgcctggggtgtcatgctctcggggcgcgacctggccgacttggaccggttgagggctggccttttgtatgtccgcggcggcaaacgcccgttggtcagctatctgcatggacgcttcgaacgtcgctcgatgctgcctgacacggtattggatgcattggtactgaaaacacctggtgccgacgaagaggcgctttggctggccgcgccgcatgatcctttgcagcgggtctacctgtttctcgccgtgcgccgggacgacgaggcgatctggctgggactcgagttgcgcggcagcgacctgtctctcgcgctgacctcgcgtttcggcggagcacatgtgttgctggatgccgtgcgccgtgtggtccttggcggcgggggggcgagcgtcgatggactcgacgcctgcatcggtagcgaagacgcgttcggcttctgtggcaacggcctgctaccgcagttcctgatactgaccaaggctgtggggccttcgggctggcgcctgagctactaccttcccttggcgagtctgctgtctccctactggctgacgctcgtaggttgcctacttttctggggcggtgtggcgcttgtcgtgctggtgctagcttggtgtgtcgacaagcgcctgatcagaccggccagaatgcaattgcgcgatctgctgcaacacgatgagttcctccgtactacgcttgaggttgctcccgttgctctttgcctgttgcgttgctcggatgcgaccgtggtgttggagaatcgcttagccagacaatggcttggccaggggggcgggcgacacagcgaaagtatcagatggatcgaactggcccgtagagccttgatcgagtcgaactcgatggaggttcagagtgccaacgggtgcattttgcaactgaacttcgtgttcacccgctacaaaggcgaggaagtattgttttgcgcctgcagcgacatcagcgccaggaagcagaccgagcgggccttgagggaggccagggaggccctggcttgcactcgcgaatccaagcgtctgttcttgagtgcgatgaaccggggagtacaggcacctttgtccagaatgctggatttcctggcgtgtctttgcactgctggactggaccggcagcaacgcagcagcctggagtcaatgcagcgttcgctgctcaacctccagcatctgctgaacgacattcacagtgtttcgcaactcgaagacgggcgggtcgtcctcgaatcgcgagagttctcgccttccgcgttgttacgcgacattgccttggcccatgctccggctgcacacgggaagggtgttgatctctacgtctgttgcgctcccgacataccggagaaactctacggtgatgcgaccttgatgcgccaagtgctggataatttcctggataacgccgtgaagttcacggatgacggcttcattgccctgcgtgtccgggtgcgggaggtgggcggtggacggcaggtcgtctggcaggtcagcgataccggttgtggcattcctgcggaacaacaaccggaactgtttcagcctttcttccaagtcagcggcaaggacatggcagcctcggatggttccgggttgggactgaccatcagccactatctcgtccagcttctcggcgggacattggaagtcgtcagcgagagggggttgggcagcagtttcgcgatgtgcctgccgatgcaatgcccaatggataaacccggcgtcgcgctggctgctctctcgccggtgccggtgtttgtccgctgtcgccccggcgacctgcgcgatgccttggcgggctggctgcaacgccagggaatacagccccggtcgtggcaggccgggcgcagttccggtgcggtattgctggaatgcctgttgctcggggaccgccccctcgcggatcgggactggcgtggtccgcgggttatcgccggtgtccaatggtcggacggggcgaacatgggaggaaacgtccggcaggtcagcctatatgacctagatgctatcggacaggctgtcaggtcggctcaagagctggtcgtgcatggcgatcttcctatctgctatccatcctga

SEQ ID NO: 347571 - DNA, 543 bp, Pseudomonas aeruginosa
atgaaaaagccactcgctacggcgctgaccctgcttctcggcgccaccgccatttccgcgcacgccgccgatggcatggtcaagatcaccggttctgtcgtcggcaccacctgtaaggtgggcggcacgaaaaccgaaaccggcggccctgctggcaccctgaacacaatcaatgtggagctggaccccgtgtcggtatccgctctggacagcgtcggcaaatcagccagtagcaaacccttcaagatcagcctcaccgactgtacggcggaaaacgctcaggtgaagttcgaaacgtttggaaccgtcgacacccagacaggcttcctcaaaaacgccggcagcgccaagaacgtccaggtcgcgctgctgactggtgatgaccaggtgatcaatctcgccaacgaaggtggaagccaggtagtcaagctcaacgagggtaaggcggatatcgacctcagggcgagctacgtcgctgtcggcggagccgccgagcccggtagcgtggataccaccgcgatgttctcgatgaagtacgagtga

SEQ ID NO: 347572 - DNA, 549 bp, Pseudomonas aeruginosa
atgcttcgcctgatcaagatcggccccatattgcctgggacacagttgaagaaaaccgaggtcgcctatggcggatcaaaggtaggcagctatccagatctttttacccacatcagtatcggccccatcgatttcatagtcccgacctgccagacccgcgatgtagacgtgatgctcggggaagtctacatgggcaaattcagtggcgtcggcagcgaagccggagcaagagacttcgccatcaccctgggaaattgcccggcggggttcaacaagatcacctatcgactggaccccgtgaacgaggtgctcgatgcgaacaagggtctcatccaaatagacaagggtagcggcagcgcttccggaattgccatccgcatccagggccggggatcgacgctcaagttcggcactgaacaagaacttgccagctacaacgggagcaagggtagctacgatattcccctctccgccagctactaccagacaggccccattacaccgggaacggcaaacgcgtcgcttgagttcaagataagctaccagtga

SEQ ID NO: 347573 - DNA, 1209 bp, Pseudomonas aeruginosa
atggacaataaaaattctaccagctctatttcctcgcaattggaaagtggtgtatctcctgtccaggatggcggcaaaggtatttggttgttttcaataactgtagttgctgttttggttgcgttagctgtattttggtattattacgagttaaatgtggaaaggactgaagatgcacaggtgaatggaaatgttgtacaggtgacggcgcaaattgacggaacggtagttgcaatacatgctgatgacactgattatgttaaggcaggttcatcacttgtagtattaaatcctgttgatcaggaaattatttatgaaaaggctcgtgcagcacttgcgaaagctgcaagatctgtacgttcacaatacttgcaagtttctgaagctaaggcgaatcttgcacgagtacgaactgatgtcttaaaggctaaagctgacttagctaggcgcatgaaaatcgcatcgattggtgctttctctcgtgaggaaatcagccatgctgagaatgcacttaagaatgctcttgctgctcaggactcaactaaacaacttctttctcagcgtttggctcaggtagataatacagtgatacgttcacaccctgatgtagtcgctgctgcagccagcttgcgagaggcttacatctcgaagaaacgaactattattctcgcgcctgttgatgggacagtaactaaacgtagtgttcaggtcgggcaacatattggagccggggttgcactaatgtcagttgttccactaaatgacttgtgggtgacagccaactttaaagagtctcaactaaaagatattcgaattggacaaccggttaaactaaccgccgatatatatggggatgatgttgtgtatcacggagagattgttgggcttgatgccggtactggtagtgcgttctctctattccctgcacagaatgcaacgggaaactggattaaggttacacagcgggttccggtcaaagtatctttagacccaagtgaagtagcaagaagtcctttgcgtgtgggattatccatgcatgtggttgtagacactagcaatgctagtgggaaggttattagaacggatgttgctttggagtcttcctaccatacgcaagtgtttgataatgagttaaatgatgctaatgaggaggtggaagagataattcgcgccaatgaagggagtgtgatatctgcgtctaagttttga

SEQ ID NO: 347574 - DNA, 738 bp, Pseudomonas aeruginosa
atggtcgcacctattgcactttctgttcggcgtatagagcatggtgatggctttcatgcttatatgttgcgtagttcacaaggcttgctggatccctttcttggggtagaccatgcttggatgagtgcccctacttttgcacctcacactcatgctggcttttctgctgtatcatatctctttcttgactccgagacaggggtccataatagagactctatcggaacagacaatataattagaccgggtggggtacattggactactgctggtaaagggatagttcatgaggagattccttctgagtcgaataaaacagtacattccttacagatttttgttgacttagatgctcgtcagaaagatgtcgagccttatccgttgactcttgaacctgaaaaggttcctgtaattcgacttccgggatctgaagtgcgaatacctataggtagttttcacggtgttaagtctcctctagatccacctaccgatgtaacgttgcttgacataactttgggtgaaaatagctatctttccatcccagttgaagcaggaaaaatagcgtttgttattccggtctttggtgaggttgaaattggtggtgagttatatggtggttgtgacgttaaagttgctttcttgtcgaggagtatggagtcgtatactgtagagttgaagtcgaataatggacgtgcgggggttgtagtatttgttggtgaaccgattcatgctaagtaa

SEQ ID NO: 347575 - DNA, 210 bp, Pseudomonas aeruginosa
atgttagaggtgagttatatgaaagttttcgtaaggcagcacgaccaagaaagaatgagtcgggagttcaaaggtgtgggtgctgatctttgggaggtgtatcagggagatgtacttgttggagtctaccagagtgagagcgaagctataaaatataaggagtgtttggaaaagcaatcggaagaaagtcagggaaacaagtgtatatag

SEQ ID NO: 347576 - DNA, 1443 bp, Pseudomonas aeruginosa
atgtcgaaaaacaaactgaccaacgccgtcggcgcgcccgtcgtcgacaacaacaatacccagaccgccggcccgcgcggcccggctctgctgcaggatgtgtggctccttgagaaactcgcccacttcgaccgcgaggtgatccccgagcggcgcatgcacgccaagggctccggcgcctacggcaccttcaccgttacccatgacatcagccgctacacccgcgccgcgctgttctcgcagatcggcaagcagaccgagatcttcgtgcgcttctccaccgtggccggcgagcgcggcgcggcggatgccgagcgcgatatccgcggcttcgccatcaagttctacaccgagcaaggcaactgggacctagtgggcaacaacaccccggtgttcttcctgcgcgacccgctgaagttccccgacctcaaccatgcggtgaaacgcgacccgcgtaccggcatgcgcagcgcgcagaacaactgggacttctggaccaacctgccggaggcgctgcaccaggtcaccatcgtcatgagcgaccgcggcgtgcccgacggctaccgccacatgcacggcttcggcagccacacattcagcttcatcaatgccgagaaccagcggcactgggtgaaattcacctggaagacccaacaaggcatccgcaacctgtccgacgccgaagccgggcaggtggtggccggcgaccgcgagagcagccagcgcgacctgtacgagaacatcgagcagggcaatttcccgcgctggaccttctacgtccaggtcatgccggagcaagatgccggccgctacgccctcaatcctttcgacctgaccaaggtatggccgcacaaggactacccgcttatcgaggtcggcgtgctggagctcaaccgcaacccggaaaacgtgttcgccgaagtcgagcaagcggcattcaaccccgctcatgtagtgcccggcatcggcttctcgccggacaagatgctgcagggccggttgttctcctatggcgatgcgcagcgctaccggctcggcgtcaaccatacgcacattccggtcaacgcgccgcgctgcccgttccacagctaccaccgcgatggccagatgcgactggacggcaaccagggcgcacgcctggcctatgagcccaacagctacggcgagtggatcgagcaacctgagtacgccgagccgccgctgagcctcgagggggccgccgaccattggaaccacagggtcgacgaggattactactcgcagcccgccgcgctgttccgactgatgtcgccggcccagcaacaggcactgttcgacaacaccgcgcgggctatgcggggagccagccaggaagtcatcgagcggcatatcggcaactgcagcaaggccgatccggcctatggggccggtgtcgcagccgccatcgaacgcctcggtcagtaa

SEQ ID NO: 347577 - DNA, 924 bp, Pseudomonas aeruginosa
atgactatgcatctgaacacttttgcccaaaccgaaggcgtcgtaccgacacaagaattggtgccctcgcgctatgccctgcgactgggcgaaatcgaagttatggtggttagcgatggtgtattgccgctgcctaccgaaacgatgtctaccaacgccgacccggccgaacgcgctgcatggttcaaggaaatgtacctgggcccagatatgttcgactgggcgctaaatgtgctggtggtacgcagcggtgagcagaccattctggtcgatgccggactgggcaatcagtttccaggcttcccacgtgcgggacagtttcccaaacgcctgaaggatgcaggcattgagctcgcatcgatcaccgatattgtgatcacccatatgcatatggaccatattggcggtctgctcgtcgactcagtacgaaacagcctgagtcccaacgtgcgcattcatgtcacggccaccgaagtcaatttctggaaaatccccgactttaccctgactgaaatgccgcaaccggtgcctgacgttctgcgtcggactgccaacgagttcatggcccactatcaaaatcgtctgcacatcttcgaagacgagtacgaggtcgctccgggtgtgaccgcgaaactcaccggtggccacactcccggacattgcatcgtatacatcaactccggcggcgaacgtcttactttcgcgggcgacgctctgttccctgtggcctttgaccatccggaatggcacaacggcttcgagcatgatccagaagagtcagttcacgtcagagtgcgcctgctgcaggaggcggcggcgagcggcgagatattcgttgccactcacctgccattcccttcggttgggcgtgtggctgtggatggcaatgcgttccgctggatcgcggcgtactgggactattga

SEQ ID NO: 347578 - DNA, 1203 bp, Pseudomonas aeruginosa
atgaaacagcaacttctggttattggcgctggattcggtggactttggagcgctctgagcgccgcccgcctgctggacatacacggccgcaacgatgttgagatcaccctattggcgccgcaagccgaactgcgcattcgtccgcgcttctacgagcccgatgtgcgcagcatgttcgcaccgctgaatgagctttttgacgcggttggcgtacatttcgtcaaaggcaccgctgagcgcatcgacgagcatacccgcaaggtcggctaccgcgacgaagcaggccgctccggagaactgagctacgatcgcctggtgcttgccagtggcagccagctgtctcgtccaccggtgccaggcctgaaagagcatgccttcgatgttgaccagatcgaatcggcgacacgcttggaaaaccatctgttctcgctacgtaatcagccggctagccccgcacgtaataccgtcgtgatcgccggcggtggctttaccggtatagaaaccgccaccgagatgccagctcgcttgcgttcggtgttgggtgagaaccaagacgtgcgggtggttatcgtcgaccgcggcgaacgtatcggcgcagtgatgggcgacggcatccgcccatcgatcattgaggcgtccgatagcctgggtatcgagtggattactggcgccacagtttctgcggtggatgccaatggtgtaaccctcgtagacggtcgccacatcgagagtaatacggtgatttggactgtgggcttccgcgccagcccgctaaccgagcagctaaacgccgagcgagacggtcagggtcgcctgcacgtcgatggcaacctcaaggtccgtggcctagaaaacgtcttcgctgctggcgacgtggcctatgccgccaccgatgacatcggcaactttgcagcgatgtcctgccaacacgctatcagtctcggacgtcatgccggcaacaacgccgccgccgacctgctcggcgttacaccgacgcagtaccgccaacccaagtacgtcacctgcctcgacctcggcgcgtggggcgccgtgtataccgaaggctgggaccgtcagctgaagctggtgaaggccgaagccaaagagctcaagacgcagatcaacaccgtttggatctacccgcccgccgctgaccgcgctactgccctggccgccgctgacccgctgattccggtggcataa

SEQ ID NO: 347579 - DNA, 933 bp, Pseudomonas aeruginosa
atgaacagaaatgaccttcgacatacagacatcagcttgctggttgtctttgaaaccatgatgcgagagcgcaatgttactagggctggagagaaactatttctttgccagcccactatcagtagtgcgctgggccgtctacgcgcgatgttcaacgacccactgttcatccgcacggggcgcgtgatggaacccacctcacgggcagaagaaattcatgtgcgtctggggccagctctggaaggtatcgccctggctctgagttgcgcacgggagttcgatccacgcactagcgaggagactttccatgtcgggctttgcgacgaagttgaatacgctctgctgcctcggttgatacagcaactgcacgctgaggcacctaacattacgctggtggtccgccgagtgggcccgtggcaactaacaaagcttctcgttgctggcgatatctccttgggaatcggtcaggcgcaggaactgccggccagcgcccattgccgtagccttcgcccggtgcaacccatgctgctgcgtgccgattcggcctcgagcccggtgagcctcgatgaattctgtcggcgaccccatgtgaccgtttccgcgctgggcaaggtgaccgacgaggtcgaccgtgcgctggcccgtcatgaccggcagcgccgagtggtgctggcggtgccgcagttcagcgctttgccagcactgctagctgatagcgacatgcttgccatcgtgcccgactacgtagctcaggcgatggttagggaaggtctgcgtattgaatacgcaccgctgccgttgtcgagcccggacctgtccatggcatggcgtggcaccagtcataccgacccgcgcgaacgctggttacgctcttgcttcgctcgccacttggaacaacagccggagcgttcaggggcgctggcggttgcctga

SEQ ID NO: 347580 - DNA, 1014 bp, Pseudomonas aeruginosa
atgacaagcaccttcgcccctgtttatccctttcccgcgaccacaccgagaactgtcgtcttcgtcgcctacccgcagatgggcttgctcgacctcagtggtgcccagaccgtgttctgggtcgctagcaaggccctggcgcagcgcggcctgcccggttaccggctatcgacggcgagcttgcgcggcgggttggtgagtaccgttgagggattagcggttgataccagcgtcctaggtgaacttgacctcgccgccgtcgatactctgatcgtccccggcgccccggacatctgcgagaccctcgacaaccatggtgagctggcgacatggttaagcgattcggcgcccggcgtgcggcggatagcttctgtgtgcagcggcgccttcctgctggccaaagctggactgctcgacggctgccgcgccgcaacccactgggccatgtgcgacacgctgcagcagcgctttcccgccttggaagtggacgccgacgcgatcttcatccagcagggtgcagtttggacctcggcgggcgtcaccgccggcatcgacctggcactggcgctagtggaggccgattgcggccgcgagatcagcatgcaagcggcgcgtgaactggtggtatacctcaagcgcccaggcgggcaggcgcagtacagcacattgctgcagttgcagacccaagacagcccggccttcgacgagctgcatctgtggctgacggagaacctgagcgatccggaactgacagtggaacgcctagccgagcaggcgaagatgagcctgcgcaacttctcccgcgtgtacaaagatcgcaccggacgcacaccggccaaggccatcgaactgttccgtttggaggcggcgaagcgcctgttggaaaattcctcgcgcaacatcgagcagatcgcccgagtctgcggattcgccgacgaggagcgactgcgcagcaccttccagcgtcacctgtcgatctctccgcgcgactaccgcaaccgcttcacccgctga

SEQ ID NO: 347581 - DNA, 663 bp, Pseudomonas aeruginosa
atgagctcgtggtcgcattccaacccaccgcaaggttcgaaggaaccggtggtttatgtggtcgatgacgatgagtccatgcgcctcgccctcgatggtctgttgcgctctattggtctccaggtacagaccttcgattctacccaggcctttcttgtctgcgctcgtcgtgacgtccccggctgcttggtcctcgatgtgcgcttgcgaggggaaagcggcctggcgttccaggagcagatggagaagagcggtgttcgcatgcccatcgtgttcatgaccgggcacggcgatatcgcgatgactgtcaaggcgatgaaggccggcgccgtagatttcctcgctaagcctttccgtgaccaggacatgctcgatgcggttgccagcgccctagctcgcgatggtgcgcggttgcaggccgagcagtctggcgctgcgctgcgccaggcctttgaagcgctgactccgcgggagcgtgaagtgctgcgcttcgtcgtcgcggggttgatgaacaagcagatcgctgccgagcttaatctcagcgaagtaaccgtgaaggtgcaccgtggccaagtgatgaagaagctggccgcgcgctcggtgaccgatctggtgcgcatggccgaagcgctgggcgtcgagcctttgcagcggacgacctga

SEQ ID NO: 347582 - DNA, 5496 bp, Pseudomonas aeruginosa
atggccagcaaacagaagatcctgtgggatgatggtgagcgggttttttgccgtgcttgtcatggcagtggcggtgacatcagtgtgctgatggtgcgacctgctgccgaacatccattgcccgccacgctcgaacggttggctcatgagtacagcctgcgcgacgagctgcaaagtgcctgggctctgcgcccgcaggcgttacaccacgaaggcgggaaaacccgcctgttgctcgatgatcccggcggcgagccgttgtcatgtttgcttagccagcccttgggaaccgaaacctgcttgcgtctggccgtggagatcgcggtggcgctacgccacctgcatcagagcggcctggtgcataaggacctcaagcccaaccacatccaggtcaactgcgccgatggccaggcacgcctgacaggcttcggcctggcctcgcgattgccgcgagagcgccaggcgcccgagccgccggagaccatcgcaggcaccctggcctacatggcaccagaacagaccggacggatgaaccgctccatcgactcgcgtagtgatctctatgcctttggcgtggtcctctaccagatgctcaccggctcgctaccgttcaccgccagcgacccaatggaatgggtgcactgccacatcgcgcgtaagccgccctcgcccggcgagcgggtcgccgacataccgccgatgctctcgcagatcgtgctcaggttgctggccaagaccgccgaggagcgctaccagagcgctgcaggggtcgaacacgacctgcgccggtgtctggatgagtggcagcgggaaggacgcattgcgccattcaccctggatgagcagggcacgcctgaccgcttgctcgtagccgagaaactctatggccgcgagcgtgaggtcgaggtactggtcgaggccttcgcgcgcatcgtcgccagcagtactcccgagttggtgttggtgtcaggctattccgggatcggcaagtcctcagtagtcaacgaactgcacaaggtgctggtaccgccgcgcgggttgttcgcttccggaaagttcgaccagtacaagcgcgacattccctactcaacgctggtgcaagccttccaagggctggtgcgcacgttgctgggcaagagcggcacggtactggagggctggcgcagtgcactgctggaggcactggagcccaatgctcgactgattactgacctgattcccgagctacggctgatcatcggcgaacagccgccggtgcctgaactggagccacagcaggcgcagcatcgattcctgctggtgttccgccgcttcatcggtgtcttcgcccgagccgatcacccgctcgcgctgttcctcgatgacctgcaatggctggatgcggcaaccctcgacctgctggaagacttgctaaccaattcggagctgcgccacctgatgttggtgggcgcttaccgcgataacgaggtcgatgccagccatccgctgatgcgcaagctgcaatccatccgccaggctggcgtgcgcgtcgatgagatccgtcttgcgccgctggctcgcgcgcacatcgagcaactgatcgccgaggctctgcgttgcccaccgccgagcatcgtggcgctggcgcggctagtgcaagacaagaccgccggcaacccgttcttcgtcattcagttcctccaggcgctggccgaggaagagctgctgacctacgaccacgcagcccgccgctggcgttgggagccggagcgcatccacgccaagggctataccgacaacgtcgtcgacctcatggtcggaaagctcgcgcgcctgccgctggaaacccgccaggccctgcagcaattggcctgcttgggcaacatggcgcagatcgataccttggcgaccgtgctcgacctgccgccggcgaaggtccactcgattctctggtcggcagtgcgccaggaactggtggagcgcctggagagcacgtacgcgttcgcccatgaccgtatccacgaagcggcatactcgctgatcgccgaagccgcccgcgacgaggcgcacttgcgcatcggtcgcctgctggccgagcaaacgccggcggagcggcgcgaagaggctatcttcgagatcgtcggccaactcaatcgcggcgcccgactgatcgaggcccgcgccgagcgtgaacagctggccgagtacaacttgctggccgggcagcgcgccaaggcctccaacgcctacagttcggcgttggcctatctgggtgtcggggcggaactgctcgacggcgattgctgggaacgccgccacgagctgtgttttgccctggagctgaaccgcgccgagtgcgaattcctcactggccagttggtacaggccgacgagcgtctcaccgcgctgacgacacgcgccgccaccacggtggaacaggcggcggtggcctgcctgcagatggacgtgtgcctgctgcaggaccgcagcgacagggccgtggctgtgtgcctggcctacctgcaggcggtcggtatccactggtcggcgcacccggacgacgagcaggtgcgcaaggaataccagcaaatctggacgcagctgggcgagcgcagcatcgaacagctgatcgacctgccgccgatggaggatgccgcctccctggcgaccctcgatgccctcggcaagcttttcgccccggccctgcagagcgacgccaacttggccggcctgaccatctgcaaggccgtcagcctgagcctggagcgaggaaactgcgacgcctcctgcatgctctatgcgaatgtcgggcgcgtcgccggccgccgcttcggtgactacgaagccggctaccgcttcggtcgcctgggctgcgagctggtcgacctacgcggcctgaatcgccatgaagcgcgaacctacctgtgcttctcgatgttcgtggcgcgctggatgcgccccgtgcgcgagtgccgggaattgctgcaccgagctttcgtcgcggcccaccgcgtcggcgacctggcgtacgctgcctatgccggcaacggccatatcgccgatgtgctgttcctcggcgaaccgctggcgcaggtgcatgaggaggccggacagggcctggcctatgcgcagaaggtgcgcttcggcctggtggtggatttcatcagcacgcagttggcgctgatccgcacgctgcgcgggcagaccccgactttcggctgtttcgacgatgaactgttcgacgaggcgcgattcgaagcgcacctggacagcacaccgggcctggcgctggcagcggccaagtactggatacgcaagctgcaggcgcgcggcatggcgggcgatcacgccgcggccatgcactgcgtggcgcgggtgaaggcgctgctgtgggcggtggagtccttcacggaggaggccgagtatcacttccacgcagcgctgaccctggcagccaccttcgactccatcgatgccggcgagcagcccgaccgtctgcaagagctggtcggccatcacgggcagttgcaggaatgggcacggcagtgcgccgaatccttcgcttgtcgggtggcgctggtgggcgcggaaatcgcccgggtcgaagggcggctggtcgacgcggagctgctatacgaagaggccatccgccaggcgcaggacaatggcttcgtgcagatcgaggcgctggccaacgagctggcggggcacttctacggcgcacgcggcctgtccaagatcgcccgcgtctacctgcaggacgcgcgctacggctacctgcgctggggcgccgacggcaaggtgcgtcaacttgaggggcgccatcgctacctgcgcaacgaggagcccgcgcccggtccgaccgcgaccatcgccaccccggtgcagcatctggacctcgctaccgtgctcaaggtgtcccaggccgcttcgggggagatcgtcctggagaaactgatcgacatggtgatgcgcacggccatcgaacaggccggcgccgagcgcggtgtgctggtcctcgccgaagcaggcgagccgcgtattgcggcgcaggcgactgtcggcgatggagcgatgcggttgtgcaacgaaccgatcagtgcagccgcgctggccgaaacagtgctttaccaggtgctgcgcaccggcgagagcctgtgcctggaagacgccatggccgatccgggactcaccaccgattcctatgtccgccagcacggcgcacgttcgatactctgcatgccactgatgaaccaggccaagctcactggcgcgctgtacctggagaacaacctctcggccggcgtgttcagtccggcgcggatcgcggtgttgcggctgctggcctcacaggcagcgatctcgctggagaacgcgcgtctgtaccgcgatgccgccgagcgcgaggcgaagattcgccgactggtagacgccaacatcatcggcatcatcgtctggagtgcgggtggcaagatagccgaagccaacgacgccttcctgcgcatggtcggctacgagcgcgacgacctgctttccggccgcgtgcgctggcacgacataacgccaccggaatctctggcactcagccgggcgcatcttgccacggccatgcgtaccggacgcgcgcagcccttcgagaaggaatacatccgcaaggacggcagccgcgttccggtgatcgtcggtctagccgccttcgaggccagcctacaggagggcgtagcctttgtgctcgacctcaccgagcgcaagcaggccgaggaaagggtacgtgaaggcgagcgccgctatcgcgaggtacaggcggagctggcccatgccaaccgcgtggcgactatggggcaactggcggcgtccatcgcccacgaggtgaaccagccgattgccgctaccgtgaccaacgccaatgccgccttgcgctggctaggagcgcagccgccagagctcggcgaaatcagccaggtgctagggcgcatcatcaaagacgccaatcgagccgctgaagtgctggggcgcatccgtcagctgatccgcaagactccgccgcagaaacagctcgtggacatcaacgcggcgctgcgcgaaatgatcgaattcacccgcggcgaggccgccaaatcaggcgccgtagtgcgcgttgaactcaccgatggcctgccggaggtggagggcgaccgggtcgagctgcagcaggtaatgctcaacctgatcgtcaatgccctggaggccatgggcggtgtgcctgcaggtgagcgccatctgctagttcgtaccgagcgcgaggcggaggacgtgcgggtgagagtgagcgacagcgggccgggcttcgccgagggcaatgccgagctgctcttcgcaccgttctacaccaccaaggccaccggcatgggcatgggcctgtcgatctgccgttcgatcatcgacagccatggcggccgtctttgggccagcgccaaccagccccggggcgcggtggtgcagttcaccctgccggcgcatcccacgacaggcggctga

SEQ ID NO: 347583 - DNA, 423 bp, Pseudomonas aeruginosa
atgcaaatcggagagttggccctacgcgccggcgtcagtacacgtgcgattcgccattacgagtcacggcagttgatcgagtcgtcgcggctggacaatggctatcgcgactacgccttgtccatggtgcagcgcgtgctctgggttcgagagctgctcgagtgcggcttcagtacccggcagattcacggcctgctgcagtacctggaggaggaagaggacagcgaaggtttcctcgcctgcctgcagcagcacctggaaaagctggttgccttggatgcgctgcagacccaactggccaagcgacgcgagcgtctggcagagaagatcgaacgctatctgccgctgcaggaaggcctgctgcgtgttcccgatttgcgacctcccaaacgagctcatacacaagccacgttggagagataa

SEQ ID NO: 347584 - DNA, 750 bp, Pseudomonas aeruginosa
atgggaaagctgaacgacaaggtcgccctagtcacgggcggcaatagcggtatcggcctggccaccgcgcaacgattcgctctggaaggcgcggcggtggtcattacagggcgccgtcgggaagtagtggaggaagcggtcgggcacatcggtgaaaacgccgttggcatctgcgccgattccagccggctggaggatctggatgccttgtacaggcagattggcgaacgcttcggccgccttgacgtgctggtcgccaatgccggtgtcatccgtccggctccgggcgatcaggtcgatgagaaacagtttgacgaacagttcgatatcaacgtcaaaggcgtcttctacaccatccagaaagcgctgccgttgctgcgtgacggtggctccatcgtgctggtgtcgtccatcgctcgcctgaaggctctggaggctcacgtggtctacgcggcgaccaaagcagcagtgcgctcgttcgcccgcagttgggcggcggaactcaagggccgcaacatccgcgtcaactgcctaagccccggcccggtgctgacgccgatcatcggcaagatggggattggcgaggcgcagttcggcgcgttcgaaaagcagctggcggggctgattccgcttggccgcctcggccgcccggaagagttggcgaacgcggcgctgtttctcgcttcggacgacagcagcttcatcaccggtgtcgacctgtgcgtcgatggcgggctgtcgcagctctga

SEQ ID NO: 347585 - DNA, 708 bp, Pseudomonas aeruginosa
atgttgttcttcctcagcaagggctaccgcgtgattgcccatgaccgacgtggccacggtcgctcctcgcagacggcgcaaggcaacgacatggacacctacgccgctgacctggcggagctagcggagcacctggacctgaagaatgccgtgcatatcggccactccaccggggggggcgaggtcgcccgttacgtcgcacgccatggtgccggccgtgtcgccaaggcagttctgatcggcgccgtaccgcccatcatgctgcaaaccgagaagaaccccaatggcctgccactaaaggtattcgatgggttccgcgaagcacttgccgcgagccgttcgaacttctaccgcgacgtggcggcgggtcccttctacggattcaaccggccgggtgccaacgtgtccgaagcagtgatcgacaactggtggcgccagggaatgaatggtggcgccaaggcccattacgactgcattgcggccttctcggaaaccgacttcaccgaagacctgaagcaaatcgctgtgccgaccctggtgctacacggggaggacgaccagatcgtccccatcgacgactccgcgcggctctcgatcaagctgctgcgaaacggcaccttgaaaacctaccccggcttgccccacggtatgtgcaccacccacgccgagaccatcaacgcggacttgctggccttcatcaagggctaa

SEQ ID NO: 347586 - DNA, 840 bp, Pseudomonas aeruginosa
atgatgggacagctaccggaaggacagcagcgcctgttctactcgttcaacctggaagatcacgtcccactccaacacctcctgcgctgcatcgaccagtgcttggatctcagtgaactacgtgcttacctggcggatttctatagccccatcggacgcccctcgattgatccggaattgatggtgtgcatgctggtcgtcggctactgctatggcatccgttccgagcggcgattatgcgaagaggtgcacctgaacctagaatatctctggttctgccggctgggtctggaagacgaagtccccaatcactcgaccttctcgaagaatcgccacggctgcttccgtgacagcggcctgttccgctggctgttcaatgaggtgctgcggcgctgcatggcggccggtctggtcaagggcgaaggtttcgccgtcgacgcctgcatcatcaaggctgatgctagccgccaacgtggcttggcgggtgatgaggtcgattggagcgacccaacgctcagcagccgcgccgtacgggagtacctcgaagcccttgatgaagagcccctggctgaagctcttcccaagaaaatttcgctcactgatcctctgtctcgttgggcagcagcgtcaggtggcccggccgactttgcctactccacgaattacctgatcgacactgagcacggcgtgatcctggatgtagaagcgaccccggcgcaccgtaccgccgaagttgattcgaccaaaacgatggtggaacgcgtcgaagcgctgttcgaccgcacgccagagcgcctcatcggtgataccgcctatggtactgccccgatgctggcctag

SEQ ID NO: 347587 - DNA, 531 bp, Pseudomonas aeruginosa
atggtcgaagaaaaaaaaatcgacccgcatgtcccagtctgggacaagaccgagcgcaaggacgacagcctctccagtaacgacttccactggaatccggaggccaatgaataccagtgcccaagcggcaaaccgctacacagtgtgtggtgcaccttcacccagaaaagatcgagggtgaccaaggccaacaccatcatctaccgctctagccaagccgactgcgccatatgtccgctgaaagcgaagtgcagccccaacacaccgaatcggaagatcgttctcagcatccatgaggctgcccgcgacgtggcccgacgcatcgcccagacaccggagtacctcgtctcgcgctgcgaacgaaagaaggtggagatgcttttcgcccaccttaaacggatcatgaagctcgaccgtttacgactgcgtggcctgacgggggcgactgacgagttcaccttggccgcaaccgtgcaaaacctgcgacgcatggccaagctcttgcctcatgggccaccgaacatgggatag

SEQ ID NO: 347588 - DNA, 342 bp, Pseudomonas aeruginosa
atgaacgtcgtaccgatcactggccgcctccctgaagagcatccgaaagctacccatctgccgctctgcaccgtgctgacgccggagctggcccgttgcctggaagccgtcaacagcgccacccgcgccttgcgccaggtcggcattccgattgagcagacgtcggtgctcgatcgccgccttttcatccgcgaagaggattcgctgcggctgcaccgccgcttccgcaacgccatccgtggcattcgccagaccactcgcgggatggtcaccgtccatgtcgtcagcctgctcggtgttgatgtggcctggacgaccccggtgaaggagcaagaccaatga

SEQ ID NO: 347589 - DNA, 228 bp, Pseudomonas aeruginosa
atgagtaaagcccagcagatctatgacgaagtggctagcggcagcccgcgcagtgccgagttcctagccggggttcattacatcctgatgctcaagttggatggcgtttcccttcaacgccccacttatccatatccgagttcccagctcgatgcctggatgtgggggtgtgagcacggtcatgacctggtcgctcgtgaacgtgaacacgaggtagccacggcatga

SEQ ID NO: 347590 - DNA, 516 bp, Pseudomonas aeruginosa
atggcccgtaaggtgggaaagcccagggcggcccgtgattcatccgcttccgaccaagcactgggggcggatgatctggagatcctgcaccccgagcgaacggtggagatccatgggcgaacgctcacgatccgcgagtatgggttcgtcgaaggcttgaagctgcgcgccaccatgcaaccgttcctcgacgagctgcattccatggtggcccaggagaaaggggtgccagtagtggagcgcatcatcggtgccttggccactcaccactcgctggtagtgcaactgatcgcccaggcggcggatgtcgagcgggagtggatcgaagcactgcctgctcgccccggcaaggatctgatgtacctctggtgggtcgtcaacggccctttctttgtcggcgaggtgatggaccggatcgccaccgagcacgccgaggcaagccgtcgcgctgggccgacacctacgccagcctcatcgccggaggctacggcgacatcgccgacatcgggcgcatga

SEQ ID NO: 347591 - DNA, 153 bp, Pseudomonas aeruginosa
atgaccgagcggcagatcctgctgttgcatgaagcggagctgcgccgccgggttcaggatcgtgagcagggtttcatcgacatgaacctggcgttcgccgggggtaaggaagcaggccggcatctgaaagagctgcaggatctactgaaataa

SEQ ID NO: 347592 - DNA, 3717 bp, Pseudomonas aeruginosa
atgcacaaggatttacctgtgattaatcgtgccgatcttctgaaaaacctgcagtccctgttaccgcatattgagaaggacatcctcgcctacagcgagtccaatgcggagctcagtgagcatttgcagagcgaatatcgcgcggcggttgaggctgaacgcaccgccgagcacttcgtttcctggcgagcagcgcaaataacccaggccgcagtggcctgggttttgacctgtgtgttcgtgcgttttcttgaggacaatggcttactgactgagccggtgttggctgggccggtgaaggatacgcaagggcgaaatgccttacagcaggccaaagaacgcatggtggcttacttcaatgagaaccccacctttgaagagcgccactacctgctcgatctattcgcggagctggaaaaatatccggtgatcgcggagctcttggatcatcgccataaccccctctggcagattcccgtttcggctgatggtgccaaacgtctgattgacttcttccagaagatcgatgcaaacagcggtgaaatcctgcacgactttaccgaccaggaatgggatactcgcttccttggcgacctctaccaggacctttctgaatccgtgcgcaagcgttatgcgctgctacaaaccccggagttcgttgagagctttattctcgattacaccctggaaccggcgattcagactttcggtctgccggggctgcgcctgatcgatcctacatgcggttcagggcactttctgctgacgaccttcgagcggattttcaatcagtggttgaagcgcgagccaggaactaatacccgtgagctggcacagcgatcactggacgtagtgcatggcacggatatcaacccttatgccattgccatttgccggttccgcctgctaattgctgccatgaaggcttcaggcagcacaaagatcaaagaagcccctaagttcaagttcaatttggcatgtggcgactcactgttgcatggccgtagatttgagtggcaggggcagggcatccagggtggtttgctggatgaggaaaaaaagcacgtatacgaagttgaggatcctgaaaagcttaaaaatattcttgggcagcgttatcacgtagtggtcggtaatccaccctatattacagtgaaagacaaggctttgaatcaggcgtaccgggacaagtacccaacctgccatcgtcagtattcacttggcgtcccgttcactgagcgcttctttgatcttgcgctttacccagaaggtaatcaggccgctggctttatgggaatgattaccgcgaatagctttatgaaacgggagtttggtaaaaaactgattgaagactatttgccacgtaaagacttaactcatgtggttgatacttcgggcgcttatattccgggtcatggaaccccaaccgttattttgttcgcccgaaaccagttgccaaagtctaatgagctgcgtgccgtcttggggattcgcggggagccaggcactcccgaagatgccgctaaaggtaaggtttggtcatcaattcttgaatttttaccgagcactaacgctgagaatgaattcattagtgttcttcagcagtcgagagaggttttttcccgtcacccctggagtgtaggtggtggaggcgcgtctgatctgaaggggcgtcttgagtccattgcgcaaaaacagctttcaagtcttatatcagaaattggttttggcgcggttactcgtgaagatgaggcttacttggttgggcggcgctgtgccagtcgctggggagtgcccgatgcccagataaagccaatgatcgagggcgaggttattcgtgattgggcccttcgtgatccaagtttcggtatttggccttactctgaagaaactttaatggcgcagggtccccgcaaaacgataggtttcttatggccgatgaggaaaaatctctctgggcgggtagcttatgggttgagccaactcgaaagggggctggagtggtatgaatattccatgttttttcacaagagatataaaatccctctttcaataacctttgccttcgtttccactcacaatcactttgtattggatcgtggtgggaaggtttttaagcaatcagcaccggtaatgaagctgcccaagtctgctagcgaggcggaccatttctcactattgggcttgttgaatagttcaatcgcttgcttttggatgaagcaggtttttcacaataaaggtgattctactgactccaagggtgcgcgagtaacaggtgatcctgcttttgatacttacgagtttacagggacgggattaaagaattttcctgtcgcggctgatccagcgaaaacttctcaaaaaattgcgcaacagctggatgcattggcgcagcaactaagcagttttagtccagcaactgctttaggggctgcagactctgggctcgcagaaagactcgtaagcgcgcatcagcaagacgaattaattttttctcagatgatagcgttgcaggaagagctggactggcacacatatcagctttacggacttaccgatgagacactttgctttcagggtttgcctgttcaggtgaagccaggtgagcgtgcttttgaaatccaccttgcccgtaaaatagctgctggtgacgccgagtccacttggttttcgcgccatggtgttacaccggtgactgagctcccgaatcactggtcggcggactacagagcattagtcgagcgtcgtttgctggcaattgagcaggaccagtgggtcaaactggtagagcagcctgaatacaaacgtcgctggcaccgcgatagctgggaaaaccggctgcaggcagccttgaaagaatggttattggaccacctggagcagtcttgtcaggtaactgaattacaaacgactgcacaattggccgatcggttgcgcagcaataccaatattatccgcgttgcggagctctattgcggcggtaacattttggatttccagtcactgatatctgacctggtggacgatgacaacgtgccacaaatggcagcggcccgcttgaaaccagcagccatgcaaaagtttcgcgcatggcaagaaacatgggacaaacagcgcttggaagatgtcatcgacacccattatggcgtttatcagccactctcggatgatagcgctaaggatcccgagaagcaggccaagtacgacctggctaaggcacaagcaaaactggtgaaagcggagaaggtgggagatgttccgatgccgccgctgtacaagtccaccgactttcgcaggcccagttactggtcgttgcgcggcaaactggatgtccctaaagagcgtttcttctcgatccctggctgtgaaaaagatggtgatagcaccctagtcatcggctgggctggtttgactcatctacagcgcgcccaagccattgcggcttggtatctggatcgcaaagagggcgagggctgggaagctgagcgactgatgcccatgctggtggcgctggatgagttgatcccctggttgaagcaatggcacaacgaggtggatcccgagttcggcgagcgcatgggtgattactacgagggcttccttctcgaagaactgcgtaatttggaaattactcgggccgaccttttgagctggcagccggctgcagtggctggaaaacgtagcggtcgaaaaaagaaagtggctgagcagaactga

SEQ ID NO: 347593 - DNA, 1458 bp, Pseudomonas aeruginosa
atgttcaagctgaaaggcataaaaaaaactgataggaagcctttggagctgaccgagctaaggttacgcgattaccgctgttttgaagctattgatattgattttcacccacagctcactgttctagtggctgccaatggcgcaggaaaaacctccattctcgatgctatcgcggtggcttttggaccttacgttggcgcttttgatgaggctgtgggcaagcattttgagcccagcgacattcgtcagtttcaagttcggagaacggctacgaatgaaatggaatatgctcccaagggggttaggattgaagctactgcttttattcccgacagcctcatagaccagcttgatgacgatcattcgccgacggtctggcggcgaagtctctcaagcccgaccaaagccaaaaccaccattaaggaagctaaggagctagttaactatggcaagcgcatgcaggagtctgcgcgtacgcctggcagcgatacgcttcttcctctgattgcttactacggcaccggtcgtttgtggcagcagaaaaagctgactgaaacgaagaagattcagcgcacctctcgtaccgttggctacaccgactgcttggatccggcttccagttacaaatccttcgtggcgtggtttcgctactggagcctcaacgccgctgaggcacgcatcaaggcacatgaggcggggcacggggtaatcaagaccgagttcgatgactatctcttatctatcagtagggccgtgaacacctgcatccacccctccggttggtcagacatcgaatattccttctcgcgcgatgctctggtggcacaccacgagcagtttggagagcttcctgtcgagctgcttagtgacggtatccgcaatatgattggcctggtcgctgacatcgctttccgtgccaccaagctcaacggtcatcttggctgttttgctgctgcacaaaccccaggcttagttctgatcgacgaagttgacatgcatctgcaccctgaatggcagcaggtggtgctccagagtctcactcaggcgttcccagcgatgcaattcatcgtcaccactcacagcccgcaggttctcagcactgtttcgtttgaatgcgttcgggccctgcgctcatatattgatccagatactgggaagacgaccacattggccaagagggttgagtggcaaacgcgaggtgttgccagctcagacctgcttgcacgcatcatgggggtggatcctatccccaatgtgccggaagcccagtgggtgtctgactatcaagccttgatccagcagaacctgcatcaggaaacggaagggcaagtgctcaggaagaagttggaggagcactttggtgctcagcaccccgtcatacgcgaatgcgaccgtatggtcaggctgcaaagtttcaagcagcggctacctcgtcatcttggaaacggggaggactga

SEQ ID NO: 347594 - DNA, 3612 bp, Pseudomonas aeruginosa
atggcgaagttcccgctctcgatgcaaaagaagcatccctacgcggagagtgccaagaccacgcacgggcacttcgccgagaccccatacacgattcgcccgtactcggccgccgggattccatttcggtggatgttgcgcgagcaggtagaggggaacaagaagtggggcgttcctagcctaaaggagactctgcagctcggctaccaggcagagcgcgagccggatctcaccgctaacaagggttgggaaaaggacaagaagacctgggttcaggaaggcacgaaccagcgcattatccttgatacgtttttcagcgtggccaagccaaatgagtcgctggtgttcttctatgccaaacgcacgccattggtcgaggatgctcgtcgcgtgatcattggggtggggcgcgtcaagtcggtgagtgctcccattgaatatcactactcaggcggccagaaacccaaagccaacatcagtggctacctctgggagcggaacatcgagcactcgatccgtccgaacgactcggacggttttttgctgccataccagcagttgctagaggcagcaaatgtcgacgaaaccattgaccttgcggcgtgcactgcgttcgcgccggacgagtattttagtagctattcctatggcaccgaacatctggcacatgacggcgccatttcgtcgttgctggcgatcgagaaggccatcaaggcgatgcggttgcacttagctgatgagccatgggacgagcatttggcgtggatcgatgcagagctaaaccggctctgggacgtgcgtggcgcctttccaggattgggtgccgccctgaacgcattcggattttcacatggaaatttgctggcttggtacctggccattcagggcaatgagaagttcgacccttggcctgccctggcagtggtgctcaaggagccagaagggctgcctgcttatctgcgcgatggcatcggcgatacccttcgaaaaaaatgggagaaactcccgcccgagcggcgcgcgctgctgatgctgctcgcccggttcaatcttaccgatgctcaagccctgcgctggtatcagccgactgagcgtacgaaggctggaatcgttctgaatgatgcagaaatcctgggtaatccctacttgatctacgaggaagaccggttgcagaccgatcctgtggcctttgagatcgtagaccgtggcatcttcccccccgagtcaatacgtacggtatttccgctgccagagccaagtctcgtacgcgaatccatcgatgagcgacgggtacgtgcggcgatgctcctgacgctggaggaggcagctcgaaccgaggggcatacctacctcatggcgacatgggtgattcagcgggttcgagaccgtgcgctccagcccgactgtccgttggatatggacacgctttcgatcatggaagattgtctagcacccaagattgaaggcatacaggtcaaagacggcctccaagcattccagttagaccgctacgtcgagacctcaacgctgatcagatccaaaatcagcaagcgcaagtcccgtaaggccaacatcggggagcacaactgggcagtactggtcgacgtggcaattgattcgacgaaggatcagggcaactccaaatcgaaatctagtaatcgcgacctagctgcgcgcaaggaaaagtcagcagccctggaggtgctctacaaatctggagtctcggtgcttatgggcgccgcgggcacagggaaaagcaccttgctcaaggccctgtgcagcattgaaagcgtgaagagcaaggggatcctactgctcgcgcccacaggtaaggctcgcgtgaggctggagcagactagcggcatggccggtcaaggaaagaccgttgcccagtttttgaatggattggaccgatacgacggcaaaactggacggtacttcgtcaataaggatgccgaccgttcggctatgcatgccaccgttatcatcgatgaatgctccatgctgaccgaggagcagctcgccgccatgcttgatgcggtcgagagcgtggataggctgattttggtgggtgaccccaagcagctgccgccgcttggtgcaggccggccttacgtggatatcgtcaatttcttgaaaccggccaacatcgacagcctgcgaacccgcgttgcgggctgcttcgcggaactgaccgtcacgatgcgccaaggtacagaggaaggcgttgtacgcgaggacgtgctacttgctcaggcctttagcggccgggcactggatgcaggggccgacgagatctggcaggccgtggcgtctggcacgtcgagtttcgtgaagctggtccgctggagcaaacctgatcagctccagcagctgctgctcgatgagctgaaaactgagttgaaactagagtctgtcactgatgaagtgacttttgaggagtccctgggcggcgtctattccgagtacgacggtggctcaacagtattcttcaacacccagtacaaggaccgcccaggagcatccaagaaggctgaagcgtggcaaatcctttcgccggtcaagcaacatcaggctggtgtcaccgccatcaaccgagccctgcagcagcagttcaggaagtccttcattaagatggctgcgcaaacgggttgggcgaagaagatcccaagccctgtaggcccagagggaatcatctatggcgacaaggtcatcaacgtcatcaataagagcgggcgtgagacttaccctgaaaaggatgacgcctacgtcgcgaacggcgacataggcatcgtgaccgggcaccgcaaaaccaaggcgagatactggtcgccctacgaagtcgaagttgagttggcctcacagcccggaatttcctacaagtacaagccctgggagttcgactcgcaggaaagtacaccgccgcttgagctggcctatgccctgactgtgcacaagacgcagggaagcgagttcggcaagaccttcgtggtgattccaaacccctgccgcaacctgacacgcgagatgctctataccgctctgacacgccagagagacaagctcatcatcctgcatcaaggcgacttcagagacttgctgcacttcagccaagaggctgcatcggaaatcaatcggcggatgacgaacctcttctttccgtctgcgccggtagaagtcaaggtacgaaacaaatcgatcttcctggatgagaggctgatctacctgacggagaatggtgacctggtccgatcaaagtctgaatggatcattgccgacaagctaaaggctgctggcatcaagtatcagtatgagcagtcacttattctggatggcgttgagcgcttccctgatttcactattcgtgacgaagacgccggaacggtctggtactgggagcacaacggaatgctctcggatgacgggtacaagaagcgctgggaacgtaaagaagcagcctaccgcaaggcgaaaattcttcctctgccgttgcctgacaaggacgatggaagagtggggactctgctggtaaccgaggaacatgaaggtatgggcttggatctgaacgcgattctcaccaacatcaaactcatacttggggagactgattaa

SEQ ID NO: 347595 - DNA, 459 bp, Pseudomonas aeruginosa
  misc_feature (232)..(232): n is a, c, g, or t
atgattgacccaaccgacaagcaaacccaacccctccccctggagcagccgaagcgcggacgcggtcggccagccaccggcaaagccctgacggacgcagagcgagcgcggcgctaccgggcgaacaagaaaaagcgtgacgatcaaccgtcacgaaaagatgccccatcgatccccgccgatggcgtaaaggaaatcctcgacggctggcagcgcacccaagacgagctcnaccaggcgctgcaacgaatcgccgagctggaagccgaattagcgtcacgcgtcacgaaaaaagaagaggccgaggcgaagacttgggcaattcaagagcgcaagggcaaggcgcgctggcagaccatcagcaagggcctgacccggaaggccggagaacgccagttcgacaagctgctgtcgggcctgacagatccgcgctacacctaccgcatgattgaagaataa

SEQ ID NO: 347596 - DNA, 357 bp, Pseudomonas aeruginosa; identical to SEQ ID NO: 332093

SEQ ID NO: 347597 - DNA, 1233 bp, Pseudomonas aeruginosa
atgctcgacaagttgcacctcttcgttccgttccgcctcgagcacatcgaactgctcggggtggaagggcgtgcggatccggtgcacgtcgtggatctggaaagcctgggcgtgccgctccaagggcagatcagccgaggggagggcggagagctacaggcggattacttgcggcacacctgggagtcactgagtacgggcttcacgcctttggcgttcaaggtgtttcaccagtccttgggtaagcgcctgatgcccggtgtagagctgaaggccagcccggcgaagttgctccaggggcacaacgtgtttggcccaacctgcatccagaagggggccgaggtgatgttcaagtggctagccggaagctacccggacctcttcgcgaagctcgatgtgtcagcgacgcaggtctacaccttggactgcacgtattccagccggctgccggacgaacgcacggcgctccaggtcatccaggcgctgaccaacgtcagcaacggccacaccaagagtcgcggcgacaactaccagacgtccgcgtactggggcgcgaaagaatcccgcctaaagcgcctgaaggcgtatctcaagcacaccgagtttcaggcccagttggacgaattgaagcgggcagggcgggccgatctgtcggctgctcggtctgctcgggtcatgtctgacccacggttgcaggagtgggtgcgctacctgctccgcatggaggccacggtaatgcaccggtggctggaacgccggggcatcccgtctcggcttgttgatctgatcgcctaccagcagcggctccaagaagaggggcgctgcctgattcaggagtgctggcaagcggttacagcggaccttttcgcggcctttgagggtatccagatgcgtgtgattgatgatgaaaaagtgctggccgcactgactgagcgacacctgaagtacgaccgtaagggcaagcccaacgatagccacgctcgaaacctgtttcggacgtaccgcagcctcaaggactacgggtggcaggaaacgatggactccatgtctcgcccgacgttctaccggcatatcaaggaaatctgcgaggccggcctgtcgaaagccgccctgcagaagctccacgaagcggaccgggcgaacaacgtcgtaccgctgctgcggttcgtccaggtcgatttcagcgcccagcgccccgactggtacgtcgagccgaccgtggaggccgcctga

SEQ ID NO: 347598 - DNA, 1191 bp, Pseudomonas aeruginosa
atgatttatattcgcactggaaagccgggtcacggtaaaacgcttaatactattcgtgagattgacgaaaaggcatttgctgaaagtagggtggtttactatcacaacattccggaacttaagaccgataagttaaaggcgtcctggttcgaatttgaggacccttataagtggtttgagttgcccaatgacgcgattatcgtcgttgacgaggcgcaaggttggttcggtgtgcgcgatccgcgccagaagccgccagagcatgtaagccgcttcgaactgattcggcatcagggccatgaaatgcacttggttacgcaggacccgcgattcatcgacgtgcatatccggcgtttggcgaatgggcatgttcacttctggcgggtgttcaagtcccagcaactgttgaggttcgagtccgatacggtcattgatgcggtcgagaagaaaaccagcttcaaggatgcggacaagaccacgatcaagctcgataagaagtacttcggcatgtaccggagtacgcagggcaagcaccatttcaaagtgcaactgccgaagaagttcattgcggcatgcgtggtcctggtcgttgcggcgttcctggtctaccgggcatatgagcgttaccaggaagaacagcagcaagctgcggcggaagcagctcctggtgcggcatccgtggtcgactcggtgacggacaaggtcggttcgatcctgaacccggtttcggcggcaggtggcggcggccaggaaaaggtgttgacggaagcgcagtacctggagcttcgcaagccgcgtgtgccggacttgccggcgtcggcgccgatctacgacgagttgaccaagccggtgacgtacccgaagccgttctgtgtgtcgtcgcgcaatgaggacctagtgcgccgcaacgcttcgaagatggagttggggtatcgtgatggcgtgttgaacgggtgtcgctgcaacacgcagcaaggcacgcggattcggctgtcgttctcggcctgcatgaactatgtggagaacggggcgttcgatccggcgattcctgatcgctcgatcgatcagcgcatggttcagcctcagccggcatcgcagcagttccaggtgcagcaggtgcagccgcgggatgcgttcgggacgcgggtcactgtagtgcctgatagcagccgttcgccccgcacgttgtga

SEQ ID NO: 347599 - DNA, 459 bp, Pseudomonas aeruginosa
atgattgacccaaccgacaagcaaacccaacccctccccctggagcagccgaagcgcggacgcggtcggccagccaccggcaaagccctgacggacgcagagcgagcgcggcgctaccgggcgaacaagaaaaagcgtgacgatcaaccgtcacgaaaagatgccccatcgatccccgccgatggcgtaaaggaaatcctcgacggctggcagcgcacccaagacgagctcgaccaggcgctgcaacgaatcgccgagctggaagccgaattagcgtcacgcgtcacgaaaaaagaagaggccgaggcgaagacttgggcaattcaagagcgcaagggcaaggcgcgctggcagaccatcagcaagggcctgacccggaaggccggagaacgccagttcgacaagctgctgtcgggcctgacagatccgcgctacacctaccgcatgattgaagaataa

SEQ ID NO: 347600 - DNA, 357 bp, Pseudomonas aeruginosa; identical to SEQ ID NO: 332093

SEQ ID NO: 347601 - DNA, 1233 bp, Pseudomonas aeruginosa; identical to SEQ ID NO: 347597

SEQ ID NO: 347602 - DNA, 363 bp, Pseudomonas aeruginosa
atgctcgctctcatcggcctgtgccagggctattactgcgaaacccgcaccgtcaacggccagaacggccagcagcaaatcaccgagcactcagtgcttgtccaggtcgagcagccgaacaagttcggtctgatcgaacagaaagttatcgccgtgcggatctccaagcggcacatggatggcggcttgaacaacgcctggaatcagcagaagggcaagacggtttccgtgccggtgttcgtccaggcctgggcgagcagggcgggtaacgccggcttcgacttctggttgtcgggtgatggtctgccgctccagctccaggccgtccagccggccgcgccgaaggcagcagcttcggcatga

SEQ ID NO: 347603 - DNA, 996 bp, Pseudomonas aeruginosa
atgtgtaagcccgatgaaaaccagtgtcgagataaggcagggcaaactacgtcatggtctttgattcgcccggacttgaatggtctcggctcgattgaaaacgtctgcaaacagggctgccgggtcgccctgggcgcttcgacgtgtggcccgatgaataccgacccgacgaagggattttgttctggcacgggcacattcaccggcgatgaatgttcacccacggatgagagttcgggtggcaacaatccggaccccacagacccgactgaccccaccgatcctacggacccgactgaccctaacaagcccgacgagcacggttgtatcccgcctgcgaagtggtctggcacgacgtgcgtgatgcctgatccgggcgatggtggagacggtggggacggtgatggcggcgacggtggcggcgatggcaacggtaatggaggaggggacggcaatggagatggcggtggcgatggagacggcaatgggaacggtgatggggacggtaatggcgatggagacggcaacggcaacggcgacggggatgaggatggcaagtgtgacccggccaaggaccccagttgcaagccttcttcggtctctggtgaggcgtgcgaaaccccgttgcagtgcgaaggcgacgccattcagtgcgccatcttgcgacagcagaaacaggcgcgttgtgacgctcaggaaatgaatgatttcgagaagaacaaagagaagatttcgaagttgttccagggcgaagagttcaaagaacagcctgaccaggaagtggaaatcccctcgttcatttcgcagtctggtcggtttctaccgtcgggttgtccgcctgataaacagttcagtctatctactggtggcggtcactccttcacgttctcttataagccgctgtgtgcgtttgcttctgacctgggcgtgctgattgttgtggcggcaagtatttttgcgacgctctatgtcggtcgcggttttggaggtgagtga

SEQ ID NO: 347604 - DNA, 327 bp, Pseudomonas aeruginosa
atgcaatatctatatgctgcacagttgatcctgatgattgttatgccactggtgcgcatggtgctgcgcttcctgggcgtgggttttgttacttacatgggcgttaatctacttgtggacactgcgaaagatttcattacgtccaagattagcgcgtcctctgtagagatacagatgattcttggcttgggcaatgttgatatagcgatcaatatttgcatggcggctgttgtgactcgcgcgattctttccggttgggataagcgaactgaccgcaagcgcaaacaagtttggaataagccgggtggaacttcgattgaggcttaa

SEQ ID NO: 347605 - DNA, 1191 bp, Pseudomonas aeruginosa; identical to SEQ ID NO: 347598

SEQ ID NO: 347606 - DNA, 1350 bp, Pseudomonas aeruginosa
atgcctcccatcgacgatcccttcggcaccccggccggcggcggcaacggaagcccgcccgacgaccgcaccatgatcatgccgcgtcccggcggccgcgccccggaaccggccggcggcccccgcggcggcgatccctacacgccgccgccgatggccagcctggcgccgctgagcggccgcggcgacggcctcaacccgctggagcaggccgccggcccactgctggcgatgctcacccgcctgcgcaacaccatcgcccatccggcgccggccagcctgcgcgcgcaactgctcggctacctgcgccagttcgaggagaaggcacgccaggccggcgtggcgccggacgaagtgatgctggcgcgctacgtgctctgcaccgccctcgacgaagcggtgctcagcacgccgtggggcagcaccagcgactggggcaagcagagcctgctgatcaccctgcacaacgaggcctggggcggcgagaaggtcttccagttgctcgaacactgcctgcagaacccgcaccagcgcctgcacctgctggagctgctgtacctgtgcaccagcctcggcttcgaaggccgctaccgggtcatgcacgacggccgcagccaactggaggcgctgcgcgagcgcaccgcggcggtgatccgcagcacccgcggcgagtacgagcacgaactgtcgccgcactggcgcggcctcagcgtgatgcgcgaccgcctttcgcaatacctgccgccgtgggtcggtatcgccatcggcctggccttgctgctggccttgctgttcggcctgcggatgaagctggccgccgacgccgagccggtgttcaagcgcatccacgccatcggcgagatcccggtgcaggccatcgaccgcccggcggtgcagccgcgggtgatcgagcggccacgcctggcgcgcttcctcgccgacgacatcaaggcccagcgggtggcggtggaggacgccgtcgaccgctcggtggtgaccatccgcggcgacgagctgttcgccagcgccagcgccagcgtgcgcgacgagttccagccgctgctgctgcgcatcgccgacgccctgcgcaaggtcaagggccaggtgctggtcaccggccatagcgacaaccggccgatcgccacgctgcgctacccgtccaactggaaactgtcccaggcccgcgcccaggaggtcgccgacctgctcggcgcgaccaccggcgacgccggccgcttcaccgccgaagggcgcagcgacaccgagccggtggcgagcaacgccagcgccgaaggccgcgcacgcaaccgccgggtggaaatcaccgtattcgcggagggcgcgcaatga

SEQ ID NO: 347607 - DNA, 1335 bp, Pseudomonas aeruginosa
atgtcctggaataaccgcgtggtgtggtccgaaggcatgttcctgcggccacaacatttccagcagcacgaccgctacctggaaaccctggtggatggccgctgccgctcgctcctggcgggcggctggggcttttccgagctgaagctggacgatgccctgctgacccagggcaagctggccatcgtcagcgcccgcggcgtgctgccggatggtacgccgttcaacatccccgccgacgatccggcgccggcgccgctgaatgtcgaggaaagcctgcgcgatggcatcgtctacctcggcctgccgctgaagcgggtcggcacccgcgacacggtagaggagggcgaggccctcggcggcgcccgctacgtcagccaggtgcaggaagtgcgcgacgacaatgccgccttcgagagccgcgccccggtggccctgggcagccaggcgttccgcctgctgaccgagcgcgacggcctcggcgaatacgccgcggtgggcgtcgcgcgggtccgcgagaagcgcgcggaccaggccctgagcctggacgaggactacctgccgccggtgctcgacattgccgccgcgccgcccctggcgtccttcgccaaggagctgctgggcctgctccaccagcgcggcgaagccctcgccgggcgggtggtggcatccagcgccgggggcgcctcggaaatcgccgacttcctgctgctgcaactggtcaaccgcgccgaggccctcaccggtcacctgtcccgcgtgcgcccgctgcacccgcaggagctgtaccgcgaactggtggccctggccggcgagttctgtaccttcaccgccagccagcggcgtcccgaggagtacccggtgtacaaccacgacgacctggccgccagcttcgccccggtgatgctcgccctgcgccaggcgctggcgacggtgatcgacgccaaggcgatcgccatcccgatcgtcgagaaggcctacggcgtgcacgtcgcgatgctcagcgaccgcagcctgatcgacaacgccagcttcgtcctggtggtgcgcgccgacgtccccggcgagagcctgcgcgggcacttcccgcagcaggccaaggtcggctcggtggagcacatccgcgatctggtcaacctgcaactgccgggtatcggcctgctgccgatgccggtggcgccgcggcagatcccctaccacgccggctccacctatttcgaactggaccgcggcagcgcgcattggaagcagctgacgcactccggcggcttcgccttccacatcgccggccagttccccgggctgaacctggccttctgggccattcgaggataa

SEQ ID NO: 347608 - DNA, 465 bp, Pseudomonas aeruginosa
atgcagaaactgatcgtcgcgctgttcgggctgctgctcgccgcctgttcgtccaggccgccggaaaccccgccgacccgggtggtgatctggctccacgccgcaccgaacctcaacccgtccgccgccggccaggcggcgccgctgcgcctgcggctgtacgagctgaagaaagataccgcgttcggccgcgccgactacttcgccctcaccgacaacgcccagtcgaccctcggtggcgacctggtggagcaggacgagttcctcctgcgtccgggcgaggaacggcgcatcgaacgcacgctcgacgagcagacccgccagctcggtttcgtcgccgcctaccgcgacctcgaccgcgccacctggcgccaggtcctcgacgtgccggggcaacgcaccagccatctcgacatcacgctcggcgcgcaggccatcggcatcgtcgcgcgtcccgcgccctga

SEQ ID NO: 347609 - DNA, 633 bp, Pseudomonas aeruginosa
gtggcggcgccgacgccgccggcaagcgccgccgcgtcggccggcggcgacctgctgcaagcgttcctgcgcggcgccggcatgacccagttgaaggtcgacccggccggcgccgaagcgcagatggaagccatcggccgcagctatcgcggcctggtggaaggactggtggacgtgctgcgcgcgcgggccagcctgaagggcgagttccgcatggcgcagaccatgatccagccggtgcagaacaacccgctgaagttcgcgccgaacgtcgacgaggccatgctgctcctgctgcgccgcgacaaccaggcgttcatggcgccggatcgcgcggtggccgacagcttcgaagacctcaaggcgcaccagctggcggtgatggccggcgtgcaggccgccatccgccacctgctggcgcgcttcgaaccggccgcgctggaagcccgcttcggcaagccggccgggctttccggcctgctgccgggggcccgccaggcacagaactgggacagtttcaccgagctgtacgcgaagatcctgcgcgaggcggaggacgacttccaggagcttttcggccgcgaattcagccgcgcctacgaggaacacagcgctcgactacggcgttcctga

SEQ ID NO: 347610 - DNA, 1077 bp, Pseudomonas aeruginosa
atggtgctgggtgatgaccaacacatgctcctgcccagccagcgccagcagacgcacgcgcagcagcggcccacgagccaggtcgaatggctggcggatttcctcggccacccgctggcgcaacgttgcttcgctcgccccggcgcaatcctccaggacaatgcgcaacggcatgttcgccaggatcgtctggcgcgcctgaccgtcgacctcctcgaagcgggtgcgcaaggtctcgtggcgcagcaccagccaatcgaaggcctgctgcaacgccgcctggtccaggacgccacgcacgtgcagtacgctggggagatgataggccgcgctttcaggctccagtttccagaggaaccacatgcgttgctgagcatgcgacaaaggcagctcggcgactcgcggcaatatttgcagcacaggggcagcgctcgccgcctgggactccagggaagcggcgaagtctgccaggaccggccgctcgaacaggatgcgcaagggtacgtccagctccagatcctggcgcaggcgcgagaccacccgggtggcgctgagggagtgaccgccgagttcgaagaagtgctcgtcgcgggcgatgccctcgacaccgagcagcgcctcccagatcgctgcgaccgaacgttcgagcccctcccgcggaggctctccggcctggcggcgggcagccgcgtccaccttcggcagcgccttgcgatccagcttgccgttggcgttcagcggcaagctggacagcacctgccaagccgtcggttgcatgtacgcaggcaagcgtccggccagccaggtgcgcagctccgccagaaggtcctcaccccgcatagcgtcacgccccaccaggtaggccgccagcagcggaccaccgacgccatccagcgccacgaccgctgcttccgccacatacgggtgtgcaagcagttggctctcgatttcgccgatctcgatgcggaaaccacggatcttgatctgctgatcggcccggccgagatattcgacctgaccgtcgacgcgataacgcgccaggtccccggtgcgatacaggcgctcgcccgaacctga

SEQ ID NO: 347611 - DNA, 204 bp, Pseudomonas aeruginosa; identical to SEQ ID NO: 324543

SEQ ID NO: 347612 - DNA, 135 bp, Pseudomonas aeruginosa
atgaaacctctgctgactgccctgctcctcgtcctgctcggtgcccccgcggccttcgccgccgacctcggctacccgctggacgcgcccgcccccgacggccgccgctggcggccgaggaaaacaaggacctga

SEQ ID NO: 347613 - DNA, 459 bp, Pseudomonas aeruginosa
atggaaatcttccacaccagccccgttgagatcaccaccatcaacactcaaggccgcttcggtgagttcctttgcttcgccgccgacgagtacgtcatgactgctggtgatcacatcacttatagaatcaaggtagacgagagcgacatcatcatggcgggctcgattttctaccatgagagggctgctgacctgtccggcctggtcgagcgggtgatgcagttaactggctgtgacgaagataccgctgaagagctcatttcccagcgcatcgacgttttcaaccttgatgacatcgacgcctcggatgctgccgagttgtcgtgggaaatccaggccatcaccgccaaggccgcgaagactctaggattccgtggtgtttcgatgcaggatgagcagggcacttgctacatgatcgacatgctgggacatgatgccgagctggtgcgcgtcaaatga

SEQ ID NO: 347614 - DNA, 339 bp, Pseudomonas aeruginosa
atgcacttccatatccgcgaagtgctgcgcctgaacgccgatagctataccgagagcttcgccggcatcgagatcccggtgctgttcatgaacggcgagttggacatctacaccacgccccacgaagcccgccagttcggccaactgatccgcggcgcggaattccacaccatccgcaatgccggccacttcatcgacgtcgagcacaaggccgcctggcaacagacccaggacgccctgctggccttcctccgcccgcagcgcacgcagccgctcaacccgatctaccgcccccagcccaacggcgccagcgtccccctcgccgccctcgccagctaa

SEQ ID NO: 347615 - DNA, 1587 bp, Pseudomonas aeruginosa
atgaaaatgaatttttgccggatcatgcgtctgatggcgctgcgctatcgcgaccaggaggccatcgtcaacattgagcgcaatcggcgcttcacctatgggcaataccacctgctgactaaccgtatcgccgacgccctgcgcaccacgttgcaggtcggcaagggcgacaagttcatgttggttctggacaacgacaacctcagcctgatgatgtttcccagcaccttcaaacaggaaggcacggtggtcatgaccaaccgccgcgacccgctggaagagcacgcacggcaaatcgagctggtaaaacccaaagtggtgttcctcgaaacactgctgctggacagctactacgacaccctgcgcagccacggctgcagcattgtgctaatggatccaccgtccgccgagcaagctgcgcgccccggcgtgcacagcttctggagcctggtagaagctgcctccgagctcgaccatgagcttgagctggataccgacgagcacatctgcatgctgcgcttcaccggcggcaccaccggcaagggcaagtgcgcgatgtactccatcgacaactggatggcctgccgcgacgcggcctttatcaacaccgacatggccatcgacagcaacacccgcctgctgcatgtctcgccgctgacccacggttcgttgatgttgttcttcccgactttctatgccggcggcaccaacctgaccatgaaccagctggacatggagaactggcgtctggaggtggagcgcgagcgcgtcacccattcgttcctggtgccgaccgtgctctaccgcctgcttgaattgcaacgcgccaaccccagggacttctcttcgctgaccaccctgatttacggtgccgcgcccatgagccctgacaagctcggcgaattgatcacctgcttcgggcagatttttgtccagggctatgctgctaccgaaacgccgatgacggtcgccttgcttggcaagaccgcgcaccaacccgatgccaccggcagcctgcaacacctgtcttccgctggccggccgacggctggggtcgaagtgtttatcgccgctccggacggcaaaccgctgcccttgggtgaaaccggcgaaatccgtatccgctgcaaagccgtgatcaagggctattacggcaacccggaagccaccgctgccgagttcgacgatggtgcctggaagtccggtgacctcggctatatcgacgccgctggttacctgtacatcgtcgaccggctcaaggacatgatcatcagcggcggctttaacgtctacgcggtcgaagtcgaggccgcgctggccgcgcacccgcaagtgctgatggccgccgtggtcggcattccccacgccgaatggggcgaagcggtgcatgccgaagtgatactgcggcccaatgcacaggtgaccgaggacgagctgatcgcccaggtcaaagccaaaatcggcgcctacaaggcacctaaaaccctggccttcgtcgctgaactgcccacctcggtggtcggcaaagtcctgcgccggcaagtgaaggagaaatactggcaaggccaggcgcgcaaaatcagctga

SEQ ID NO: 347616 - DNA, 777 bp, Pseudomonas aeruginosa
atgcgtattcaagacaaagtcgttgttatcaccggtggcgcatcgggccttggcctggctaccgcacactacctggcggcagaaaaaggggctcgtatcgccatcttcgacctcaacgtcgaagccggcgagcaagccgtggcggcacttggtacagagcgggcaatgttcgttgccaccgatgtcagcagcgaagagtcggtgcagaacgccgtcgatgcagtgatggcgaactttggtgccatccacgtttgcatcaacggcgctgccgtgccgactggcttcaagattctcggcaaggaaggcaaggccgcaccgctggcgcgtttcgcccaagccaccgcaatcaacctcaatggcgtgttcaacgtcatgtccaagtgcgccgaacacatggccaaaaacgaagccgaagccggtgaagagcgcggcgtggtgatcaacgtttcgtccggtgccgcctacgaaggccaactgggccaatgcgcctactccgccaccaaagctggcgtgatcggcttgaacatgccggctgcacgcgaactcggcgccatcggtgtacgggtcaacgctatcgcccctggcctgtttctgaccaccatggtcgcggcgctggacgaaaaggtgctgggctcgctgaaagagcagatggaggcaccgaaacgtctcggcgacacccgtgagttcgcccattgctgcgccttcatcatcgaaaacgcctatatcaacgccgaaactatccgtctcgacgcggcctcgcgcatgcgcgccaagtaa

SEQ ID NO: 347617 - DNA, 1158 bp, Pseudomonas aeruginosa
atgggacacgtcatgcgcaccccggagcaactggaagccgtcgagagtttccgccgtttcctggcggacaggatcgacccggtgttcaacaaggaataccgcgacaaattcatgcccaaggagaagatggccgaaatgctccgccagctctccgagttcggcatggtctccggtgccgtcagcgaagctaatggcggtttgggcctggactggccgaccatgaccatgttgttcgaagaggtcgcggcctgctcggtagacctgtcgacgccggtggtgatcaactcgttcggcgcgcaaatgctggaaaaactcgccccggctcacctgcgcgagcgttatctgccgggcctgatcagcggcgactcgttcgtcagcgtcggcatctcggaaccggacgtcggctccaacgtactggaaatcaagacccgtgcccgccgcgacggtgacgacttcatcatcaccggggaaaagacctggatcagcaacggctcctactccgacttcctgatctgcacctgccgcacgggcgatgatccgcgtaaaggccttacgcactttttgttggatcgcaaagagcacccgtatgaagtccagaacatccacaagatggcctggaacagccagtccactgcacagattttcctcaacgacgtgcgcgttccggccagtaacatcatcggcaacgaaggcgaagcgctgaaaaacaccctgtcgttcttcgagcgttcgcgggtgttcgtcgccgcccagggcctgggcattggccggcgcgcactggaagaggccgtgcgttatgccaaagaacgcaaacagcacggcaagttgattgccgggcaccagttgatcagcgccatgctcgcggaaatggccaccaacgtggatgccgcacgcctgctgacctaccgcgccgccgagatgatcggcgccggcattccggcagaaatggaggccgccatggccaagtacttcgcctgcgaagcggccgtgaccattgcccgccaggccgtacagattcatggcggcgcaggtgtcaccaccgacttcctagtcgagaagctggctcgcgaagccatcatcgtgccgattccggaaggcaccacgcagattcagcaactgatcatcggccgcgccctgaccggggttaacgcgttttga

SEQ ID NO: 347618 - DNA, 1242 bp, Pseudomonas aeruginosa
atgaatgacatttatgtagtgggcgttggcatgacccccttcgggcgcctgctcgagcgttcgctttacgacttggttgaagaagccgtggatctggccttgaaagatgccggcgccgcgacctgcgatgtgggcgcggcctactacggcaccctgaccaacggcatgttgcaaggtcagaccgcgattccagggccgattgccatgcgccgcctgggcattgaaggcgttccggtgttcagcgtcgagaatgcctgcgccaccggttcctcggccttcaacctggcgaccctggctctgcgcgccggtcagtgcgacatcgccctggcggtcggcgcggaaaagatgaacgtcgctgacaaggccaagatgtttgccgtgttcgatggcggctgggacgtttccaccgtggaacagaacaaggaaaccctgctggccatgggcgaaggcatagtgccgccgccgggcagcatgtccgaacgcccttacagcgtgttcatggacgtatacgcagccatctgccgtaaccacatgacgcgttatggcaccacccaacggcagatcgccgccgtcgccgcgaagaaccaccaacactcggtacacaacccgctagcgcagttccagcaagccttcagcatcgaagaagtcctggcttcgccaccgattgcctacccgctaaccaccctgatgtgctcgccaatcagcgacggcgccgccgccgtgctgctgtgcaacgccgccggtctgaagcgcctgcaaggtgccgataagcgcgccatccgcgtgctcgccagcgtggtgcaaaccggcaccacgcgcagcctcgatgaaccggaaaaaatcattgcctgtctcgccgccaagaaagcctacgagcaggccggcgtggccccaggcgacgtcgatgtggcggaagtgcatgacgcctcggccatcggcgaaatcctcaatgccgaatccttgctgctggtgccgttcggcgaaggcggtccggcggctgaacgcggtgacttcaccgtcggcggcaagattccgatcaatccgtccggcggccttgaatccaagggccacccgattggtgccacaggcctgggtcagattcacgaactggtcacccaactgcgcggtgaagccggcaagcgccaagtcgagggcgcccgtatcgccattcaggaaaacggcggcggtctattcggcatcgaagaagccgtagtcgccgtgaacattctcgccaaacagtaa

SEQ ID NO: 347619 - DNA, 786 bp, Pseudomonas aeruginosa
atgtctgaagctgtcctgctgtttgaaaccctcggcccggttgcgcgcctgaccctcaaccggcccaaggcgatgaactcgctgaacctggcgatgctcgccgagctagaacagcgcctggccgaaatcgccgccaatgacgagctgcgcacggtgattctcactggcgcaggtcctgccttttgcgccggtgccgacctcaaggaagtgcttgccggtgccagcctggccgcaggggaagcggacttcctcgaccgcgccaaccaggttttcggccaactgcgcaacctgcccaagccagtgatcgccgcgctcaatggcgtgaccatggccggcggcttggagctggcgatgtgcgcggacatcgtagtggcagctgacagcgcgaccattgccgatgcccacgccaacttcggcgtctacccgggcgccggcggcgcggcgattctgccgcgactgatcccgctgaacatggcgatgtacctgctactgaccggtaaatccctgtcggccagcgaaatgaaagcctgcggtctggtctgcgaagtacacgccgacgccgaactcgccgaggccgcgctgagcctggccaagcagatcgccaagaaaagcccgattgccctgcgccggatgaaggaagtggctcgcgccagtgccgacaaaacccgtgatgacgccctgctgcatgaacaggtcatgttgcgtcagcacctgcgcagcgccgacttgcaggaaggcctgcacgccttcaacgaaaagcgcgcaccgcagttcaagggccgctga

SEQ ID NO: 347620 - DNA, 1443 bp, Pseudomonas aeruginosa
atgagcagcagccaacagcccgatgccgagtcgaccatcgcccggatgcgtgacgtccttaagcgtcagcaggcagcgtttatcgccgaaggcccgccctcggtggagttacgtatcgcccgcatcgacaaggtgattgccctgctgcaggacaatcagcagctcctgtgtgaagcgctggccagcgatttttcctggcgttcccatgaccagtcgctgatgaccgatgtgctgttgccgattgccggcctcaagtacgcgcgtaagcacctgcgacagtggatgaaacccgaacgccggcgggccgagttgggcgccgggctgctgggggccaaggccgaaattcattaccagccgctgggcagcatcggggtcatgacgccgtggaattttccggtggcgattgcctttgggccgctggccgaagcttttgccgccggcaatcgggcgatgatcgtgctgtctgagttcaacccggcgacggcggcgttgctgatcgagctgctggcggaaaagttcgccgataccgaggtcgcggcttttatcggtggggccgaagtgggtgcggccttttccagcctgccgctggaccacatcattttcaccggtagcccgcgtgtcggtcggctggtgatgcgcgcggcggcggaaaacctgaccccgctgactctggagctgggcggcaagtcgccgaccattatcgcccgtggtgccgacctggataacgctgcgcggcgcatctggggcggcaagggcatcagcagcggccaggcctgcattgcgccggactacgtgctggtgcatgaagatgatcgcgagcgcttgctggtcagcatgcaggccgagttgccgcgcatgttcccgactatccgcaacaacccggactacaccgcgatggccacacccggccagtaccagcgtttgcagagttacctgggtgatgccgaggcgctgggggtgcgttgcatcgagatcaacccggcgggggaagacctcagcagcgtgcgcaaaattgccccgaccctgctgattgatccgccgcaagacgcactggtactgcaagaggaaatcttcgggccgctgctaccgatttgcagctatcgcagcatcgacgaggccatcgcctacatcaacgcgcggccccggccgttggcgctgtactacttcggcgacgaccaggccgaggcccggcatgtgctggctcatacctattcgggtggtgcctgtatcaatgaagtaatgcagcacatctttcagaacagcctgcccttcggcggttgcggcaactccggttacggtcgctatcgcggtggcgacggcttcaaggccttcagcctgcaacgctcggtatttagcccggcgcgttttgacgtcatggccatgctgcgtccgccttacggcaagctgttccggcgggtcatggggttgttgttgcgcgcttga

SEQ ID NO: 347621 - DNA, 555 bp, Pseudomonas aeruginosa
atgagcgatgaggttgatgagcagggccggcgcttgattcaccagcgccaggtcgagtgcctgggttatctgcgagccgatggtctgtgggatatagaagggcggttggccgatagcaagacccacgccgtgcccttggctagcgaggcgcgcacggtggaagctgggcaggtttatcacggtatgttgatccgtctgacgctggacgacgacttcatcatttgtgaggtacaggtcgagatgccgaatgtgcccaccagcgaatgccggggagccgtgccggcctatcaaaagctgctcggcgagcgtattggtgcgggtttttcgcggcggatcaaggagctgttcggcggggttggtggctgtgtgcacttgagcgagctgttgctgccgattgccactacggcctttcagaccattccgatggcgcgagccatggtcgcaccgcgcaccacgcacgacagcgaagcttacaaccgcgccaccgccgggctgatcaacacctgccacgccctgcgcgcgagtgggccgattgcgcaactgatcaagaaataa

SEQ ID NO: 347622 - DNA, 1134 bp, Pseudomonas aeruginosa
gtgggagcacttgatggcgttcggatcgtcgaaatagccggcatcggaccggggcctttttgcggcatgttgttggccgacatgggcgccgaggtcatcctgatcgagcgcgctggcaaaggcggcgacctgctcgatcttggccagcacgccatcgtcaatcgcggcaaacgctcgctggcgctggatctaaaagacccggccgccatcgaggcggtgctacgactgatcgaaggagccgacgggctgatcgagggcatgcgcccgggcgtcatggagcgcctggggctgggcccggaggtgtgcctgacacgcaatccacgactggtgtacgggcgcatgaccggctggggccagaaaggcccgctggcccagaccgccggccacgacctcaattacatcgcgttgtccggcgccttgtggttctccggcgaggccggcgcgccaccgctggcaccgccgacactggtcggcgacctcggcggcggtgcactgtacctggccatgggtatgctcgccgggatcatcaacgctagcaacaatggcgtcggccaagtggtggatgccgccatcgtcgatggcagcgccaacctgatgaacctgttgctgtcggcgcactcagccggccagcaaccgctcgcacgcggccagggcctgctcgacggcgcgcactgggcacagacctacgcctgcgccgacggccacttcatcagcgtgcaggcactcgaaccacagttcaacgcgctgttgttcgccaaacttggcctgggcgatgaccaggacttcaagaatccctacgacccgcgtctctggggatcactgcgtgagcgcttggccgccctgtttatcagccagcctcggcagcactgggttgatctgctggaaggcagcgacgcctgcttcgccccggttttgaccccgctcgaagccatgagccacccgcacatggccgcgcgcggtgtatacagcaagcccaatggcgtgctgcaagccgccccggcaccacgcttctcggcgaccccagctggcgagcctggcgcggtgcccaaacgtggcgagcatggtgccgacattctgcgcgcagcaggcttgagcgaagcggctattcagggtttgctccaggcgcagggttag

SEQ ID NO: 347623 - DNA, 1599 bp, Pseudomonas aeruginosa
gtgttcgattacatcgtggtaggtggcggcgccgccggttgcgtagtcgccagccgattgtcggaagacccggcggtttccgtgtgcctgctcgaagccggcgggcgcgacaccaacccgctggtgcatatgccggccggggtcgccgtgatggtgcccactgcgatcaacaattggcagtaccagaccgtggcgcaaaaagggctgaacgggcgcatcggttatcaaccacgcggcaagactctgggcggcagttcctcgatcaatgccatggcctatcaccgtggccaccccaacaattttgacgactgggaagcgctgggtaatccgggttggagctatcaggaggtgctgccctacttcaagcgcgccgagcacaacgaagactttcgcaacgagctccacggccagaacggcccgctcaacgtgcgcttccagtcttcgccgaacccctttattgaaaagttcatcgaggccggtgcacatgccggctacccgcattgcgtcgaccccaatggcgcgaccatggaaggcttcagccgcgtgcaggtaatgcagaaagacggccagcgctgcagcgccgcccgcgcctacctgacacccaacctggcgcggcccaacctgcacatcgaaacccacgcccacgccacccgcctcctcctcgagggcactcgcgcggtgggcgtcgagttcatccagcacggggtgacacgccaactgcgcgccaacaccgaggtgatcctcagctccggcgcgttcaattcgccacaactcctgctgctgtcaggaatcgggcccaaggatgagctgcaaaagctcggcatcgaggtcgtccatgacctgcctggtgtcggcaagaacctggtcgatcacatcgattatgtgcacccgttccgggtcgagtcccgcgccctgttcggcctctcgctgcgcggtgcctgggatgtgttgaaagctacatggcagtatttccgccagcgcaaaggcatgctcaccagtaacttcgccgagggttgtgccttcgtcaaaacctcgccggaactgcgcgaggccgacatcgaactggcgtacatcatcgccatgttcgccgaccacggccgcaccctgtatcgcggccatggcatgagcattcacgcctgcctgctgtatcccaaaagcgtcggccaggtgacactggccagcacagatccgctaacgccaccgctgatcgacccagccttcctgacccatccggacgacattgccaccctgatcaagggctacaaaatcattcgccaggtgatcgaggccccagcactccaggcactcaaaccacgtgaagtcttgaaggtgccgatgcagaccgacgccgaaatcgagcagatgatccgcaaccgcgccgacaccctctatcacccgattggcacctgcaagatgggctgcgacccgctcgcggtggtcgacgcacgtttacgggtgcatggcctcgacggcttgcgcgtggtcgatgcctcgatcatgccaaccattgtcggctgcagcaccacggcagcgaccgtgatgatcggcgagaaggccgccgattttatccgcgcggatcgcgcagccagcgccgcttaa

SEQ ID NO: 347624 - DNA, 1041 bp, Pseudomonas aeruginosa
atgtcaggtttacacactccagcgtcaaccgcagacgtcacactttcgccacacatcaccaccatcggcagctacagcctggtggtcgcccgggctctggaggtcagtggcatcgacagcgcgcggatttttaagagcgtcggcatcccgctggatgtagtcaatgacccgctgacccggattcccgtggcccagatgaatgccctgtaccgggcctgtgtggacgtgaccaacaacccgtatttcggtctgttggtggccaaatacatccacctcccacacctgcacgcactgggttacgcgttggccgctagcggcaccctgttggatttctgccggcgtctggaacgctacttccagctggtttcgcaagtggcgaagattcacctcgatgaagccgacgggcagatacggctgagctttgaatacctggccgagcccagcggcgagaccgaggatgcctttgtgggcttcctggtgcgcaccatgcgcctgctgcacaagccgggcttcaacccgttgcaggtggcgctgcaccggccgatgccgcgtgaaggcgctgagccttatgaaacgttgtttcgcgcgccggtaagctttggcgttccacacggtttcctggtcttcgacaaggctgagctactgcagagcctagccggctcctgcccggagctggcgcaggtcagcgacactatcgtcatcggctacctggcgcggctggacaaaaacgatgtaatcaccagcgtgaagcagaagatcatcgagttcttgcccgatggcgattgcacccgcgacaaggtggcgaatgcgctgtgcatgagcccgaccacgctgcaactaaaactgtcgcaacgcagcacgcatttccagcaactgctggatgagactcgcaaggatctcgcctgcagctacttgcgtcaggtgacgcgaccggtgacggaaatcaccttcctactcggtttcagcgataccagcaacttcacccgcgcgttcaagcgctggaccgggctgtcgccaacgaattttcgtcagcaactctaa

SEQ ID NO: 347625 - DNA, 1986 bp, Pseudomonas aeruginosa
atgaaaaagaccctgcctttattcctgcctgccctgctgtcgctggccgtcagccacgcagccctcgccgaggtagcgaccaagccggccgagcccacgaccatcgcggtcaacgccgccgcggccaaggtcttgccagccggcgaccgctcggacgacctcaaccgcggctttatcgccagcatcgccgacgcgcaaaccctgggtgccgacggcaagctggtctactcgctcaagggttacgaattcctgcaagccgaagacgccccggacacggtcaaccccggcctctggatccaggccaggaagtcgatgacacacgggctgtacaaggtcacagagggcttttatcaggtgcgcgggatggacatcgccaacatgaccatcctcgagggcaaaaccggcctgatcatcatcgatcccttgatgaccagcgaaacctcccgcgccgcactcgatctgtactatcagcaccggccacagaaaccggtactggcagtgatctacaaccacagccacatcgaccactacggcggcgtcaaaggcatcgtcgacgaggccgacgtcaaggccggcaaggtgcagatcatcgcccccgaaggctttatgaagcatgccattgccgagaacgtgctggccggcaacatcatgagccgccgcagcgactaccagttcggcaccaccctgccgcgcggcgagcgcggccagctcgacctcggcggagccaaagtactgcccaacggcaccatcaccctgatcccgccgacccgtgaactcacccagccgatcgagacactgctgattgatggtgtggaaatcgtcaacatgctcacccccggcaccgaggcgccggcagaaatgatccactacttcccccagcacaaggtgctcgtcaccggcgaaatggccgtacaagcacaacaccagttgctgaccctgcgtggcgcggaaatccgtaacagcctggcctggtccaaagacctcaacgaagccttgcagcgcttcggtgccgacaccgacatcctggtcagtcagcacacctggccggtgtttggtcagcagcgcgtggccaactacctgagcaagcagcgcgacctctacaagtggctgcacgatcagagcctacatctgatgaacaagggctacaaaccggtcgaaatcgccgaaagcctgcgccgcaacgtacccgccagcctcgccagcgaatggttcagccgtggcttctacggctcggtacagcgcaactccaaggccgtttaccagcaatacatgggctggtatgacagcaacccggtcaatctcgacgcgctgaacgatgtcgactacggacgcaaattcgtcgcctacgccggcggcggctacgccctgctgaaacgcgccaaagccgacttcgccgccggtgaataccgctgggtggcccaagccaccaaccacctggtatttgccgaacccgacaaccaggcggcgcgtgaactcaacgccgacgccctggaacaactcggctaccaggccgaatccgccgtcgagcgcaacagctacctggcggcggcaatggagctgcgcctcggcgacaaaaaggtcaccgcgcccatgaaaaccgctagcgcggacacccttcgcgcactgtcgatcgaaaacatcttcgacctgctcggcgtgcgtctcgacgcgaccaaggccgagggccagcacatcgtcctcaactggaatttcagcgacagcggcaagcgctacatcctcaacctggaaaactccgccctaacctactcgcccgagcgtaatgccaaaaacgccgatgcgaccctgactctggagcgctcgacactcgacgccatccttgcgcagcaactggcaccgaaaaaagccatcgagagtgggctgatcaagatcgaaggcaacccggcagcctttggcggcctgctggccttgatcgataacaacctgccgagcttcgagctggtagcaccgaacccacctaccaaataa

SEQ ID NO: 347626 - DNA, 1815 bp, Pseudomonas aeruginosa
atgaacaacaataataaaaactgccagcgcaatttccatcgagggctgctggcgtcagcgatcatggccgggctcgggtttgtccccgtgcaggcgttcgagttcgacaccggcagtgaagactggactgtacgcttcgataacaccctgaaaatgaactacgcccagcgcgtggaaagtgccaactccaagctggccaactcctggaacaacaacgacggtaatcgcaacttttcctctggcagcgcagtggctcagcgtatcgacgtgatgtccgaactggacgtggtgtaccagcagaagatgggtttccgggtcagcagcaacacctggtacgaccatgcctacgacaacgtcggcagcgacaatgcggcgaccaaccagatccacaacggcaagccggactcccgtcacctgagcggttacgccgagcgttattacaatggcccgtctgccgagattctcgatgcctttgtgttcggcagcacggcagtcggcgacgaggctcagctcagcgccaagctcggcaagcacacgcagtattggggcgaaagcatcctggccttcgcccatggcaacagctacggccagtccgggctggatatttccaaggcgctggcgattccgggcaccgaagcaaaagagctgttcattccgcgcaatcagctgtccaccagcctgacgctgaactcggaactgaccctcgctgcgcaatacttcctcgactgggacgcctcgcggctgccggagtcaggcacttacctgggcttcaacgacggcatccagagtggcgggcataatctgtcgttgatcggtggtctcaatccggcttttggtgctccaggcccaattggagccaaccaatacctgcgcctgtccaacggtaaaacctacaccccgcgcaacagcggtgacttcggcctgatggccaagtggagcccggagtggctggatggaaccctgggcttttactaccgcaacacctctgacatcttgccgaacctggccctgtcgccggtcgctgtaataggcgctccgcagctggtctcgggcaacatcggccactacaaccagttctacgtcgacgacatcgacatctatggcatcagcctgtcgaaaagcatcgctggggtcagcgtcggtttcgacctgaactaccgcgagaacatgccgttggccagcgttccagccaccgtcagtgccgctggtgcggccgctgggttgccaggctttatcggcagtttcgacggcgacaacggtgtggcccgcggtaacaccgtgcatgcggtgcttaacgggctgtccaccttcggtcagaccccagtctgggatgccgcctctctgctggtcgaactgggctacagccgctggctggacgtgaccgagaaccagcaactgttcaagggcgagagctggtatcgcggcgtggataaagtcagcaaggacaactacatccttggtttgaacttcaacccgacctggttccaggtttttcccggcatcgatatgtacatgccggtcagctacagcatcggtctcaagggacagtccgccgtgcagttgggcggcaacgaaggctctggcagttactcggtgggcgtcggtatggatgtgcgcagccagtacagcttcgacttgaagtacgtggacaacttcggtgacttcgacacctgttccaaggccggcgaaggcgcggcaccgggcggcaatggcaagtacgactgtgtggtgggccagaccacggctttcgccggtacgccggcgcagctcaaggatcgcggcatggtcaccttcaccttcaaaacctccttctga

SEQ ID NO: 347627 - DNA, 1365 bp, Pseudomonas aeruginosa
atgaccttcgttaaatctctactggccaccaccctggccgtggctgtgagcggtgctgccctggcggcggcaaccccggaacaagcggcgcaactgggtaaaaacctgaccgcagtgggcgcggaaaaagccggcaacgccgatggcaccatcccggcctacgacggcgggctgaccaccattccggtaggtttcaaagcgggcgatgcgtttcgccccgatccgttcgccggcgagaagccgcgtctggtaatcaatgcgcagaatgccgccgaacaggcgagcaaactgaccgctacgagccaggaattgcttaagcgttatccgtcctaccggatggacgtttacccgactcaccgtacagtggccctgccgcagcgtgtgctggacaacactgcggtcaacgcgttgaacgccaaggccactaacgacggcctggcgctggaaaacgccttgccgggtgtgccgttcccgattccggccacgggtaacgaggcaatgtggaaccacctcttgcgctatcaaggggtgaccatgactaacaagtacgactcctggtttgccgacggctctggggcagtgacactcagctccatcggtatcttcaccatcgactacccggcctacgacccagcccgtccggttgggccgttggcgccggaggatgcgttctaccggattaaggtgatgtacacaggtccagcccgacgtgccggcgaagcgatcctgctggtcgatgcggtcaatccgctgaagcaaccacgacgtgcctggcaatacctgccggggcagcgccgagtcaagctggcgccagacctggcctatgacacgccgaacgccggtaccggtggcacggcgacctacgacgatgcctttgtctacaacggcgcgatggatcgctatgacttcaagctggtcggcaaaaaggaaatgtacgttccatacaacacctatcagttgaactatcacaagaacgctagcgagctggtgacgcctaagcacatcaaccctgacttggtacgctgggaactacaccgcgtctgggtggttgaggccacgctcaaaccaggcaagcgccacatctacagcaagcgcaccttctatctcgacgaggacacttggaccgctctggcatcggatcaatatgacagccgtggccagctctaccgcggtggcttcgcccacatgacctacagctatgacgtgcaggctcccgataccatcaaccacatgctctatgacttcgtcgccggcagttacagcctcaacggttactacggcccttacggcggcgtgaagtacatcgagccgcagtcgaaagctcagtggtcgcctgagtcgctagccgggtcgggtatccgttaa

SEQ ID NO: 347628 - DNA, 1077 bp, Pseudomonas aeruginosa
atgattttttttaagtggatagccttcagcgcgctgacggcggccttagcgctgccattcaaccgggcggtgatcgcggcggagttcgtcgatgtgctggatgcgccggcacagatgagtgagctggccgttcagggcatgctcaccggcctgacgcacgcgggcgagcggttgattgtcgtcgggcagcgcgggcacattctttactccgacaatgccggccagcactggcagcaagcgtcggtgccggtcagctcggatctgatcgcagtgcacttcccgacgccgcagcagggctgggccgtgggccacgacggcgtggtgctgcacagccgtgatgcgggcgaaacctggagccggcaactggacgggcgccagcttgggccgttgatgcttgcgcactaccaaaaactggccactgagaaaccggatgacgcggcgctggcggcgttggtgaacgaatcccagcgggtggctgtggaaggtgcggataaaccgtttctggatgtatggttcgagaatgagcaggtcggttatatcgtcggtgcgttcaacctgattttccgcaccgctgatggtggccagcactggactccgtggctggagcgcaccgccaaccccagttttctgcacctgtatgcgctgcgtccagtcggccaggagctgtttatcgtcggcgaacaaggcctggtgttgaagctggacgcaaacgcagggcgcttcaacgccacccccactccgtataccgggaccttcttcggcattgttggtaaaccgggcgtggcgctggtgtttggcctgcgtggcaacgtctaccgcagcgtcgatggcggcgcgaactggcacaaggtcgaattgaacctgcccctgagcatcaccgccggcactgttgcggcggacgggcggatcatcctcttgagccaggccggccatgtgctggtcagcgccgatgagggcgcgagtttccaactccagccgcgcaatggctcggccccagtgtccgctgcgctactggccgcgcccgatgccctgctgttggccggagttaatggcctgcgccagttgcccctcaaataa

SEQ ID NO: 347629 - DNA, 2481 bp, Pseudomonas aeruginosa
atgggtaaccacaaactcgattcgatgccggtgatccgcgagctgcaggatttcgatgcgcgctccggcaacctgctggaacgcctgatcttcaacaaccgcttgctggtggtgctggcctgtctgctggtcaccgtgatgctgggttatttcgccgcgaccaagctgacgttgagcgctagcttcgagaagatgattccgcacaaccagccgttcatcaaaaactacctggagaaccgtcaatccctgcgcggcctgggtaactcggtgcgggtggtggtggaaagcactgacggcgacatctatttgccgcagtacctggagagcctgaagcgcatcagtgatgagctgttcgtcacccctggcgtcgatcgagcctggatgaagtcgttgtggacgccttccgtacgctggaccgaagtgaccgaaagcggtttccagggtggcccggtgatgccggacgcctatgacggctcgcctgcgagcgttgaacaactgcgtctgaacatcgcgcgttccggtatcgtcggcagcctggtgggtaacaacttcaagtccagcatgattttcgtgccgctgttggagaaagacccggtcaccggcgtggccatcgactaccaccagttttcgcgcgcgctggaagaacagttgcgcaaccaatacgaattcgccggccagccgcacagcggcgcggaggagggcaaggggccgctgaaggttcgggtgatcggcttcgccaagctggtcggcgacctgattgatggcctggtgctggtgatgatgtatttcgccgctgctgcgttggtcgctaccgccattattttcgcattcacccgttgcgtgcggagcacggcactggtgatagcctgctcggtggttgcagtgatctgggagctggggctggtcgcgctcggcggttatgcgctggacccgttctcgcttttggtgccgtttctggtcttcgccatcggcgtgtcccatggcgcgcaaaagatgaacggcatcatgcaggacgtcggccgcggtactcaccaactggtggccgcacgctacaccttccgccgcctattcctcgccggcctcaccgcactgttggcggatgcggtgggctttgccgtgctgatgttgatcgacattccggtgattcaagagctagcgatcaccgcgagcatcggggtcgcggtgctgattttcaccaatctggtgctgctgccagtgctgctgtcttactgcggcgtcagtcccaaggctgcggcgcgcagcctgcgcgaggaaaccaagggcctgaccggcggctggcgcgtgctgtcacggtttactgaacggcgctgggccagtgtggcgattctggtgtcgggcctgctggcggtgggcggctttatggtcagcacccagctgcaaatcggcgaccttgaccccggcgcgccggagctgcgggcggactcgcgctataaccgcgacaacgcctacatcactgccaactattcactatccagcgaccagttcgcggtgatgctcaagacaccggcggaaggctgcctgaagtacgaaaccctgatcgaagccgaccgtctgggctggctgctgcaacagcaaagcggcgtgcagaccacggtgtcgctggtcaacgccgtgcgccagatcactgcgggcacctacgagggtaaccccaagtggctgaccatcgcccgcaaccaggacgtgctcaactacggtgcgcagcaggcctcggtgagcaacccggagctgttcaatgccgattgctcgatgatgccggtggtcgcttacctggccgatcacaaggccgccactctcgatcaggtggtggacgtggcccaagggttcgccgaggaacacagcaatgactcgcgtcagttcctgctcgccgccggcagtgccgggatcgaggcggcgaccaatagcgtagtacgtgaagccaaccgcaccatgctgctgtatgtctatgcggcggtgattctgctgtgctttatcaccttccgcagttggcgcgcagtggtggtggcggtggtgccgctgatgctcacctcgatcctctgcgaggcgttgatggtctggctcggcatgggcgtgaaggtcgcgacgctaccggtaatcgcgctgggtgtcggcattggtgtggactacgcgttgtatctgctgagtattcagctcgaccaccagcgcgccggcttgtcactggccgaggcctacaagaaggccttgtcgttcaccggcaaggtggtgggcttggtcgggattactctggcggctggcgtcatcacctgggcctggtcgccgatcaagttccaggccgacatgggcatcctgctgaccttcatgttcatctggaacatgatcggcgcgctggtgttgatccccgcgttgtcgcactacctgctacccacaccacgtagcgcggcggcattttgggctcgcgacaagggcgaagcgcttggcgcaccgaacggcgctactgcttga

SEQ ID NO: 347630 - DNA, 381 bp, Pseudomonas aeruginosa
atggaatttcgttacctcggcaacgggcagtatttcccccctatcgcccctaacgggcgggtttacgccgtgccttttgagcgggaagaccaggtagaaattttctacctgacttctgaggggatcgtgggggttgacgtccaagcgcgctggtcagagatcgtcggcttttactacgacgacgattcctgggaaatcattccgcgcaactacttcggccgtggaatgcgctttcgtcggagggtgccttgcctcatggtgatcgacgggcgcgagacctgcactacccatattctgggttacccgattccctcatgcgtgatgaatcgagtcgcattcgaacaaagaatgccgaagcctgatgccaatttgggagggtaa

SEQ ID NO: 347631 - DNA, 663 bp, Pseudomonas aeruginosa
atgagcaagccttctaacgacgatttcggcgcacggtcgaagttgaatagagcgcccgcgaacctgacccagcgcggagccgagcgacgcgatgcgttactcgccgccgcactgcgcatcatcgttaaagacgggcccggctcagtcactttccgaactgttgtcgctgaagctaaggccagccatggatcggtggcgtattacttcggtacgcgggaggagttgatccgtgaggccatggtgctggttgccaatcgcaacattgaggcacttgccaagatgctgagagagttcgagtcaacgccgatcgaactcgcttcactggcaacgactatcgcccatcattcgacgcaacagatgatcgaagaccggagcatggggatcaccatcatcgagcttcatctggcggccgctcgttaccccgagttgcgccccgttttgcacgactggggccgagcctacgcgcggattattcataccgtgctggctaacctgggctcatctgatcccaacgcggatgctgccttgctgatcaacaccatcaatggccacgtcattggccagttagcgctccaacgatcgaacttcgagtcggcaatactccgccctgcgatattcaggttgttgacggccatatcaagctcaactgagctggccgagtag

SEQ ID NO: 347632 - DNA, 483 bp, Pseudomonas aeruginosa
atgcctcattctacccaagcactggacagtcccatgccctatctggatgacctcaagacaggtgatcagctagaaccactggtgtacgaaatcacccaagatctgattcatcgttacggcttggccagtcttgacctcaatccggtccatatgaacccggcttggtgcgagcgcgcccaggtattcggtacaccgaagacggttcagcacggcatgatgaatatgtccttcatggcgtcggcggtattgcgcacgttcggccccttggccgatgtgttcctggtggacagcaagttcaccaaaccgggcccggtgggcaacaccatcacatgccgtggcaaggtgcgcgatgtgcatgtactgaacaatggcaatgacttcgcaattattaacgttgaggccacggatcaggatggagacctcgttggcataagcgaagtgcatgtgcgactaccccgtaaacctggcgctaacgctgtttag

SEQ ID NO: 347633 - DNA, 564 bp, Pseudomonas aeruginosa
atgagtaagaacaccgaggtattcgagcattttgtgcaaaccgagaggcagcgaggcttctcgcgggatttcctggccacctgggagcagtgtgagttctgggactcggtcgaggtgggccagatgcgtaagaaccctcgcacattcgtcgtccaggaagaggacgtgctggcctataacaagtcgctgggtgagacgcacccgctattcgtcgaccccgaatacgcgcgccgccatgctccgcacgggacgattgtcgtgcacccggtgtttatcaccaccattgctttctggttcgcgcaaccaggcgacacaggctcttggatcaggacgcctggcgcccgtaaccctttccagcatatcgaaatcattgagccgattcgcgtgggtgaccgcctgacgcagactcaggaaaccagtgaccgcttctggcgtcgtgacaaggcttacatcaccactcattcaattctgaccgatcaaaacgggcgcaagaaagttgagttctcagggacgctgattttgcctccaaccgccaatgatgtccgtcgcttcgcgactgcctga

SEQ ID NO: 347634 - DNA, 1791 bp, Pseudomonas aeruginosa
atgaatgcaaccagcatgagtacctgtgatgtggagcgtcgaaatttcctgcatgagctggatcacttcgttgcccgcgctccagatgcggtctttttgcgcacgctggaccctgtcaccaccttgagtcgtagtgagttcgccgatcaggtcggccgtttggctgcagtcctgcgtgagctcggtgtagcgaagggggaatcggtaggcctcttgatgggcaatatcctcgagttctacgttgccgatgcggcagtgctcgcagctggaggcgtgcccgtttcgctgtacccaacgtcctcccccgaacagctgggttacatggccaaggacgctgggataaaactgctgatcaccgaggccgccctcctctcgcggctcaccgaggccgaggtgtgcttcgagatgctcagcgcggtagctgtcattgatgacctgcctggtgaggttgctgcagcgcgctggccgatcattgcgctgcagcagcttatgcgggcatccagccagcgcattactctggcagaggccgcgcagtcggtccgcgtcgaagaccttctcacactggtttatacctcgggcacgacaggtgcgccgaaaggtgtacgcctgagtcatgtgaacctgctcagtgctgctcaaagcatgggcacgctcatgcagctttccgagggtgggcggatcatctcctggcttccacatgctcatgtagcgggccgcgtcggccaatactactgcgcagtaattttcggggttgaagtcactatttgtcccgatcagaagcgattgccgatgtacctcccaatcgtcaagcctacttatttttttgcggtgccacgactgtgggagaagctcaaagccagcattgaggctgaattcgcccggctacccgagactgcccaggtagagctgcgccgcgtgctcagcgcgcgcaccgaggcgctacaaacttcatccgtaagctcgtcattggggcaagcggacgccgattactttgcgccactgcgcaccaaactcggactggatcaagcccgggttttgagtaccggtactgctccgacaccacggcatgttctagagttttttgccgcactggatttaccaatcggagacatctttggcgcgacggaaacctgtgcctgtggcgctatgggacagccggggcatttcaagctgggcagcgtcgggcaggccgtaccaggtatgcaaatcgctatcgccgaagacggcgaagtgctgctgcggggtttaccgatcatgcagggttatcacaaccagcccgagaaaaccgctgaagcgctgagcgaggaaggttggtaccggactggagatgtcgggcggctggatgatgacggttttctgtggattaccgaccgtaaaaaagagctgatcatcaactcaagcggtaagaacatgtccccggccaatatcgaagccatgatcaagtctggtgacccattgattggctcggtgtgcgtggtcggtgatgcccgcctgtacaacaccgcgttgatcgtactcgatcctgactatgcgaatgcctgggctgcagcgcggcagattaccggatcgattaccaccttggcgtcccatccggacgttgttgctgcggtcgccgcaggcgtggagcgtggcaatcagcggctgtctcgagtcgagcaggttaagcgcttcaccctccttgccgccgaatggccggccgccggcgatgagctcaccgccaccttgaagctcaaacgcaaggcgatagagcacaaatacgcccagaacatcgaacagatgtacgtcaactag

SEQ ID NO: 347635 - DNA, 252 bp, Pseudomonas aeruginosa
atggactattcccttatcacgacgcgccttggcgagcagcttcggcagcgccgcttgaaccgcgggctgacccaggccacgctcgctgacttggctggaatcacccggcagaaggttatcgccatcgagaagggcgatttgtcggtgggcatggccgcctatgcgcgagtcctgggggccctggactgcgagttctcggtggtaccctctgccatgcccacgttggacgaaatccagggagtgttcgactga

SEQ ID NO: 347636 - DNA, 1197 bp, Pseudomonas aeruginosa
atgacggccgtgctgcaagttgcaacgccagagggcgacagcggaaagattcttagcagcgctggggactatctgttccgttaccacgaagacgccaaggcgcaggccgcgatcagtttgctaatgccggtgcgcttggatgaataccgccaccgggagctgcacccgatcttccagatgaacctgcccgaaggttatgtcctggagcagttacgcaatcgcctggccaaggtggcgaacgtcgaccctatgttgctgctggcactctctggcagcagttcgcccattgggcgggtagcggtgagctcgccagaggtcgatgcattgttgcggcgacagcagttccctggagaaaagctggaagaaatcctcgcctgggacggtgcagaggatatttttgccggcctggtagatcgctacatcctgcgcgccggtatatcgggcgtgcagcccaaggtacttgtgccagagcatcaggattccgcgccgcagcgtttcacctcaaaaacctctgacctgatcatcaagagtggccgggatgagtttccggggctggcgatcaacgagttcctttgcatgtccgtggccagggaggcggggattgcggtaccggagttctacctttccgacaacgccaagctgttcgttatgcgccgcttcgaccgagatgagcagctcaatcccattggctttgaggacatggcggcattgatggggcttgctgcggagcaaaaatacagcaagagctattcggccatcgccaaggccatccgcctgttctgcccgcccgagcaggtgcagaactcgctggcgcagctatttgccatagtgaccttgagctgcatcgtcggtaacggcgacgcccatctcaagaacttcgggctgctgtattccgaccctactcagcgcgatgcgcggctggcaccggcctacgacatcgtcaacaccacggcctacatcccagaggacgtattagcgctggatcttgccggcaacaagtcgttatttgcctcgcggcaagggctgctggacttcgctcaggtgtgtgatgtcgcccggccagaagaggttatccgcgagcagttgcatgcactggagcgggtgctggcccgctcaactgacctgtgcgagcgagcaccgaatgtggtcgctgcaattaggcattgtgctggcccgtttgtgcaaactttcggctag

SEQ ID NO: 347637 - DNA, 177 bp, Pseudomonas aeruginosa
atggcgccgagcgtcagctaccaggttcgcatcgaccgcagcggcagccggccgaagctggtctggatcgacgaacgcgacggccgggcccaggtcctgcgccacgagccgggtagcctgtggcgacgcctgaacgcctgggtcgcgggaatgatcggactggaaaagatgctctga

SEQ ID NO: 347638 - DNA, 747 bp, Pseudomonas aeruginosa
atgcttgcggttgccgtaggtggattccaccagcaggtagtcggcgccggggacctgcaccggcgggcgcagcaccgggtcgttgggccggccgatgtcgccggagaagagcacggatcgccggccgtcgttgaggtgcacgaaggccgagccgagcatgtgcccggaaggcgtcaaccgcgcggtgagtccgggcagcgcctcgaagtcctgagagaacggacgtggcgcgaacagcttcaggcagcgctcggcgtcctcacgggtgtacagcggcagcgcgggctggtgtttggagaaaccgtgccggttggcgaacttcgcctcttcctcctgcagatggccgctgtcggtgagcaggatcttgcacagctcgtgcgtcgcggacgtgcagtaaacccggccgcgaaagccttgtcgcgccagcagtggcaggtagccgctgtggtcgatgtgggcgtgggtgagcacgaccgcgtcgacggtcttgggcgcgaccggcagcggctcccagttgcgcaggcgcagctgcttgaatccctggaacaggccgcagtccaccagaatggtcgcgtcgccatggcgcagcaggtatttggaaccggtcacggtgccggtggcacccagaaattgaagttgcatggtaggtctccaaggatgttgtcgttcaaagaaggaccggccgatccggcaactcgttgccgtggtccgcgccccgcggaaagtgctgcaccagcaggtggctga

SEQ ID NO: 347639 - DNA, 1491 bp, Pseudomonas aeruginosa
atgcacggattgttcctcggcatcgattgcggcacccaaggcagcaaggcgctgctgctcgacgccggcagcggccgcacgctgggcctgggcagcgccgcgcagcgcccgccggaaggccgcgacggacgccgcgagcaggacccggcggactggctggaagccatggccagcgcggtacgcatggccctggaagaagccgcggtggacggccgcgaggtccgcgccctggcggtttccgcccagcagcatgggctgctcctgctcgacgccgagggccgggcgctgcgcccggccaagctctggtgcgacaccgagagcgcggcggagaaccgcgagctgctggaagccctcggcggcccggccggctcgctggaacgcctggggctggtgcccgcgccgggctacacgctgtccaagctgctctggagcaagcgacgctttcccgagctgttcgcccgcgtcgcgcatatcctcctgccccacgactacctcaaccactggctcaccggccgcgtctgtagcgaagcgggcgacgcctccggtagcggctacttcgacgtgcgccggcgcacctgggccagcgacgtgctggagctggtcgagccgggcggacgcctggcggcagcgctgccggagctgatcgagcccggcgcctgcatcggcaacctgcgccccgaagcggccgccgcccttggcctggctccccacacgcgggtcgccggcggcggcggcgacaacatgctcgccgccatcggcaccggcaacatccgccccggcctgctcaccgccagcctgggcacctccggcaccctggccgcctatgccgagcggccgctggtcagtccgcacggcgagctggcgaccttctgcgcctcgtccggcggctggctgccgctggcctgcacgatgaacctcaccggcgcttgcggcctggtacaggacctgctgcacctcgatctagacgaattctcccggctggccgcccaggcgccggtcggcgccgaaggtctgctgatgctgccgttcttcgacggcgagcgggttccggcgctaccgcacgccagcgccagcctgcatggcatgaccgcggccaacctgagccgcgccaatctttgccgggcggtgctcgaaggcaccgccttcggcctgcgctacggcctcgacctgctgcgcgccagcggcctgccgggcgaggaaatccgcctggtcggcggcgcggcgaagagcccgctgtggcggcggacgctcgccgacctgctcggcctgccgctggtctgtccacggcagaccgaggccgccgcccttggcgcggcgctccaggcggcctggagcctgggccgcgaaagcggcgccggtgaaagcctggaagccctgtgccggcgctgcgtggcgctcgacgaggcgacccgcacccagccccaggcgcgacgacaggcagcctacgaacaggcctaccggcgttacctggagcacctgcctccgcgataa

SEQ ID NO: 347640 - DNA, 960 bp, Pseudomonas aeruginosa
  misc_feature (890)..(899): n is a, c, g, or t
atggcaattagcctgaccggacttagagagtgtgagttattcgcggaagtaatgaaaaagacctctctgaacatactgctagacagtaaggaattggagttcattttaagctgcgcaatagtattcctgaatgaatacagcggcgacaagagaaagtcaccctacttcgaaatcgcatactacataaccctgaagtgcgcaattaataataattactacgagcctctactagacaccagttcaaattttggattatatccaatagcacaatacatagtaaaaaacaaactaactgaagggaccagcagcacgggcttctctttagaataccaacttgacaaatttaagaacgagcacataactgaaacttatgagcaaaaaaaatacaaagcacagatgattggcagtgacagcaaagagaactgctatatagcgccaacttctttcgggaaaagcgcattaattgtagacataataaaagctcgaactccgaagagaacagcaattatcgtccctacaaaatcgctacttatacaaacctataagctaatcaagaacaacttcccacaacaccatataatatttcacgacgagatgcatgacggggcagatgaatttatatctatcttcacccaagaacgcgcccttagattattaaaaaacaaagctatatcttttgaactgctgatagttgatgaggcgcacaacttattcgaaatggacggaagaagcattctactaactagactgatacgtagaaacaggctcagaaaccccaactcgacaaactactacttatccccattaatatcagaaactgaaaacctcaaaacaagcgaggctcagaatttttttgagcggcgcatagcaagcaacattaaagagcctgnnnnnnnnnngagcctgacatttatgagttcagaacaagcggcgagactctctcctacaatagatttttaa

SEQ ID NO: 347641 - DNA, 759 bp, Pseudomonas aeruginosa
atgattccatttgaaatcaagccaatatctcccacacacgaactacatgtcattaacatagagtctttagatagcaatacaactcaacatcttgatgacttcttagtctctatatgtgagggtgattccggtagcgagctagagctagttaaaaaaagattaaagaaattcttagaagacaaagacaccaatacacgaatgggtgcagccgctgagcttttcgctcacctatacttaaatattagtggttataagcaagagtttctattcttcaatcttgaggaagggtcaatcaaaaaagggttcgatgggtttttctcaaaagactccaacacttatatacttgaaagcaaatccggatctatatctagccaaaaagtcagccacaaagaaaagcttaaacacgcatactcagacctaaacaagtacgtttctggaaaaagtgacaaagggaaaaacaacccttggaaaaacgcttacaaccatgcatcccatgtagacgtgggaaccgaaaaatcaattcgcaaaaaaataaaatcacttcaagacatgtttgacttaggaacattcagcaagataagtgagttcaatgtcatcacatgctcaactatatttctcaatggcgcatgggatgcaaaaaaaagcagtgaaatcttgagcgacaataatttcatatccgactttgatggaaaaacaattaaagccatgtgcctgactaaatccagcctgaataacttcattgattacttggggaagtga

SEQ ID NO: 347642 - DNA, 669 bp, Pseudomonas aeruginosa
ttggatgctgtccagaaagagctggagcaccaacgctgggaaaaactggcggggctgctggactacgtgcaaagcctgctggatcactacccgcaggaaggcattacagatgcggccctgactgtcctggagatgcggcaggcagaaatgatcgaactgacgcagtttttcgagcggaagatgagggaagaattaaaactcgccgaagatgtggaagccagcaaggtcttcggcgtagaagcatcccgcatggctttacaggaaagcctttccaggatgaacgactgggtcagcggctacctgcaggtcactcaattgcaggtcgtaagtgctgctttacgctacatggcgcaaccacgcgagctgtaccgaagcgctgcagtcaaagtgcttgaaggcctgagccaactcagcgccaaggctgccgagagccgtaaggtctatggctcccagatggaactgaccaactcacgggtattcagccttggagagtcacagcgtgagcaattcaccacgagcttggactcgctgaccaacatactgaccacaggtccactcgacactcgccgactacaccgaatgctgttcgaacaaggggagcaccaagtgttgctgcagattgaaaatggacaattcacaaagggacagttgctagatccggatatttga

SEQ ID NO: 347643 - DNA, 312 bp, Pseudomonas aeruginosa
atgccgaccaaaaaaattgagtgcgataacgaactgtttctcagcttgcgacaggcatcaccggaggaagtggacgtgctggtggacgtcattaccgacttcgccaggggccgcgccggcctagatacagatgacaagaaggccctggtgcaggccaagcacgcatccaggcccaatggatattccgaagaccagctcatgttgctgggacacgagctgcagcagttcggcggccattcggcattcaaccttgcccgccgcctgctccaaaagcccgcaattaactacacagaaatcgtcaacgacgtttaa

SEQ ID NO: 347644 - DNA, 285 bp, Pseudomonas aeruginosa
atgagttttcctgcgtatccggagtacaaggattccggagtggtgtggttaggcggtatccctgcacactggaacatcaaaaaattcagatatgttttcgaagaaagccctgaaaagatcaccgatgaggtggtgggcgatatgctgtctgtttctggatatcgaggcattgaggtaaagcagtatgacgatgaggggcgtcgtcgtaccgatgaagaactgttcggatatagagtcgtaaggcccgggcagctagtcgtcaataccatgtggcttggctcctga

SEQ ID NO: 347645 - DNA, 720 bp, Pseudomonas aeruginosa
atggtcgaagccttccggccgggccagcagctcggcctcgctgacgctctcggtgaactcgtcccagggaatcaccgcctcaatggcggcatagggatcgctaccgctttccttggcttccagcagagcctggccgatcttcgagtacaggcgcaccttgtcgttgatcgccttgccctgcttctggaactgctgctgatgcttgtgcttcgcgctgctgaacagcttgaccaggatacggtcgtgcagatcgaccaactcatcaatcaccgtcgcggtgctctccagcaccacggcggccagggtcgcgtagcgtcgctgcggctcgaacttgccgaggtctttgggcgtcatctgcccaccctcgcgggccagcttgagcaggcggttctggtggatgtgtcggcccaggccttcgggcaagtccaccagctgaaatgtcttcagccgctcgatgtgttcgagcatgtggcgggagttcggtttcagcggtgcctgtcgcagccaggtcaaccaggtgatgctgctgccggccttgagcttcaacagctcgtccagcttggcccgatgcgagtccgtgagtggttcgaccagggcgcggtagactcggcgattggcccgcgcaatggcctccgaacaagctcgatcaattacgctcaacgccggcagaatgcgccgcttctgtcgcaggctctccagggcctgaccggccagcagtaa

SEQ ID NO: 347646 - DNA, 267 bp, Pseudomonas aeruginosa; identical to SEQ ID NO: 330012

SEQ ID NO: 347647 - DNA, 1494 bp, Pseudomonas aeruginosa
atgcaattggctgggcagcatgtgcgagggaatctgttcggcgagatgctggtcgatgcgctgcgccagcaggatctggttgtcgtccagcggagtggccagggtgacgaacagggtcggacgcaagccgtcgtgcagccggcaggtaggaaccagaaccgcctcgctcacttccggcagatgacggcagatcgcctgctcgacctgggtcggcaccacccagcggccattcaccttgaacagatcgtcttcccgcccacagtgacggtaggcacccgactcgtcgcgctcgaacaggtcgccggtgcggtaccagccacctgcgaagcgcgcctgctgctcttcgctggcccgccagtaacccggactcagcccagggccacgcaccaacagcacgccttgccggcccgcttcctcgatagtgtgtccttcgcggtccaccagccggcactcatagccaggcaacggcagcccggtgctgtcggcacgcgcctggcccgggcggttggcgaggaacacatggccgacctcggtagccccgatgccgtcgcagatctccagcccgtgcgcggcccagaattcgaactcgccgcgcggcagcggcgagccggcggaaaacgccaggcgcacgctgctcaacagctccctggcctgcggacgcagcgaggcatagatggccggcaccccaaacaggacccgggggcggaaggcgaccaggttctccagaacccgctccgggctcggccaggtatcgtcgagcagcgccgaggctccgctgaaccagggaaagaacaggctgttgcccatgccatagccgaagaacatcttgggaatcgaatacagccggtctcccgcctgcaatgccagcaactccgtagcgaacgcccggcagaaaccgagcgtgttgcgcaggctgtgcatcacccccttgggcgccccggtggaacccgaggtgtattgcaggaaacaggctgccgccgggtcctggcgatggaaggcactccaatcgaggtccgcagggccgaccagcgcgtccagcgagaaatcgtcgagcaaagggcgaccggcggccgcacgcagggtcaacggcgccaaaggaccgctcagcgacggtgcatcggcttcacgcaccaccaggctggcctggcagtcggcagcgatatcggccagggcctgctcgcgggacttgggattgatcacggcgggaatggcgccgaccgcgatgcaggccaggaacaggcaggccagcgaaggcgagtcgttcaacgccagcaccacgcgatcgccgggcttgagcaggcgggccagttggctggcctgggagagaatgtaggtccggcattgcagccggctgagagtctggccccgatagtgataaacggcggtatcgggatcgaaatcgaggcggaacagaacctcggtcaggttggccaatgtggacatgacagaacgttccctcttcagcgatatgcatccggatcaggagatgcctga

SEQ ID NO: 347648 - DNA, 867 bp, Pseudomonas aeruginosa
atggcagaggcctcagctgcgtgtatcactgttggagatagacaagtccatgatgaacatattgggccagaaggccctgagattgatcagacttatttctataataatctgaggaattatggcaatggtgctgtgttttttgagctttggtcctatatacctggacgtatgcccgctgggtttacccctgaccctaatgtaaataatgcctcatatgatattgcgcagattgtagatggccgaggaaatccaaaggagcttattcaaatatcacatgttttaatatttggaaatgtggtgatagttgaagctagtaaagggacgggtggctcttttcttattcagaagtatatcaacaagcttctgcgcgcaaaatgtgcacctaggcctcctactgtcatgctgacgacggctatttcttctgatctagataaggagattgagcaagggggtggcgccgtttccgtttctcttggtatctctgcggcacaagagcaaaatgaaaatagagttgcaggacttctctcgagggcccattctgttttcagtaagacaggcttggttgcgttaagttggacggcagagaaggatagcgttctcgatactgaggaagttgtagaggaagcttgtacagctaaagatgatgagtttgatcgaatatttattaagctaaagcatggaagtattaaagggctttcaaggtataaaatatctatgcctataactgttcgggatgctggcggaaggaaccctgatcatgcagagattcgagagagcatgattcactatcttgggctccttatggctcccgataagaaaggcaatcgagttattgacgatgagggtaacatgataggaaatggctaa

SEQ ID NO: 347649 - DNA, 408 bp, Pseudomonas aeruginosa
atggacttagaactagagaaattcagagccagaatgcttgtggtggttgggcgaatggtgatgtttttgtttttcttggtttttctaatttcggcgatgaagagcattgctattagtcttgatgggaacgatctcggtgtcttcgttaatgtcaggaattcgatacttgatctctatcataatacccagtacccagtcgtgagttgggtttgggaatattctcctgttttttataattatcaggtttctagtctttttacctttggttggatggtggtgtttctgggtttctcgattggtggagtgtttttatacatgggcaagaaaaccctaagagagcatgatgaggcaaagaatgaagcgagaaagagtaagttgactgaggcctataagaacaagcttggatga

SEQ ID NO: 347650 - DNA, 369 bp, Pseudomonas aeruginosa
gtgatctccgcccgtgctttatcggtcgcgctggcctgcctggtgctggtcggcctcggcgccgccggcggtgtctggctcggcgcgcggcactaccggccgcagttggatgccgcgcggtcggacctcgttgcctgccgagccgcccggggagagttggaatccgcagtggtggagcagggcaggcaggtcgccgcgctgcgtcaggctggtgagcagcgcgccaaggaggcagcccatgcgctggagcagggccgacagcaggctgccgaccagtattccgccgccaaccgtctgctgcgtgaccgcaccgccggcgagcagtgtgcggccgcagaggcggtcatcgacaaggaactggggctatga

SEQ ID NO: 347651 - DNA, 843 bp, Pseudomonas aeruginosa
atgctaaattttgttaagaactatatggagaagctgtttatatggtttgaagagtttgtgtctccagaggaggccggaaatttgaatgttcgccctttatttgggttgtttatgttgggtggtttcttagtggtatctgtttttgtttttgatctggtgcttacagtaatgcatcctgcaaaggattggcatggcgcgtttggtgacttttttggtggtattgttaacccaattttgacttttctgagttttatgggacttttaattacaattgtaatgcaaagggtggagcttagagagactagaagggagttggagaaatccgcaaaagctcttgaggagcagtcgtcacatttcaagttgcagaattttgagtcttcatttttcaagatgattgagatacagaggtcgtgtgttgctagtatggcctttggaagtgtctctggtaggcgggcgttttctggtttttgtaaaactctgaatagttatttggtgcgggaaaatgttaatttaagttcgagaaaagctcagcatgaattggttgatgagttaagaattaagaatggttggaggaatttttgggatcagtatcagttggaggtttcaaattatttttccaatctgatggtgttgattaggtttctcgatggatggcaagagaatgatagggtatatatcgagattttgcgctcgcagttctgtgatgaagaaagggttttgcttctttactacggaatttatcacggtggctacattggtcagagtattatcaggctcggattagtcgagggtctcaatttaaataagcttacttttcagaaagatacttcacttttgaaataa

SEQ ID NO: 347652 - DNA, 1356 bp, Pseudomonas aeruginosa
  misc_feature (64)..(64): n is a, c, g, or t
atggcatccatcaagacccccccatccccagatgtgatccatacggccatccaatctaatattnatcgctatatagacaatcttgataaacactcatacgtcgatagcaagggacgctatcagcactggcacgacttcagatttagagttcctgccggagaagatgctgtcctggcatgggctgcggtgaagaggtcaaggagctctatcctgagagagactggactgtatgccgaaaacggtaagccgatgcggttctgcctacccgactcagcctcaacagttgtacataagattgaccagttgagcgccaagatcggcgcccattccccttccaatagctcatccaccgagaacaaccaatacttggtggaatctttgatgatggaagaggcaatttccagcgctcaactcgagggggcctcgacgacgcgtagagttgcgaaagagatgctggagtcagaaagacctccgtcgaatgatgacgagaggatgatagttaacaacttccttctcatgaaacttgcaaagagaagcagaaacttaaaactctcgatcgagctaattcggcgttttcatgaggaagctacaagaggaattcaggaagaaaaggcactacctggtgagatacggcaggacaacgatattttcgtcgtagataggaactccgagattgcacaccagcctccggaccataaacttcttctccagcggctggaagctctgtgcgacttcgcaaacacagagcataacggacaggatggtgagctcttcattcaccctgcagtgaaggctatcatccttcattttatgctcggctatgaacacgccttcaacgacggaaacggtagaacagcaagaggtatattctactggtacatgttgaaaacggggtattggggttttgaatacatctcaataagcacattattgaaaaaggcgccagcccaatacggcgagtcttacctattcacagaaaccgacgactttgacttaacctactttataaattaccagctctgcattatagagcgtgcaatggatgacttccttagccacctgaacaagaaacgtcgtgaattcttcgaaatcatgacatggcttgagcgctctggattcagcaaggatctaaacttccggcaggtacatttaataaaaaaagtagtaagaaacccagggagactattcactgcaaaggaggtaaaaaatgactttggtgtttcagaggggacggcgcggacagaccttgagaagcttgtaaagctcaagcttctcgcaaaacacagggaaggaaagtcatatatctatgttgcaaggggtgacgcaatcgagactgtaaagtcgagcgtgacctaa

SEQ ID NO: 347653 - DNA, 639 bp, Pseudomonas aeruginosa
atgaatagagcgctatcgctagttggcttatctcttactgttgtttacggacttatcgtcggatggcttgtatgggatcgtgttggaacactccaggcaatggagctaaatgcagtaggtgattttctagccggggtcttcgggcctatagctattctttggttgatactggggttctttcaacaaggaatggagttgaggcagaataatgaggccttgcatcttcaagcgaccgagctccggaactctgtgcggcagcaaacttcaatggcagatggtcaaaggcagagtctgagaaactatgagaggagcctggaaccacttttgcagctggttgtggttagatatacagataattatggagagtcgcgcgtttattttaatttggagaactccggtgagtattgcgaaaaagttgttgttgacttcgggtcttcgttgcatttgacgtcatttgatacgttgtttggaggtgcgagtgagagtttctgtattgtgagttatctaaagcctcatatttattatgatgtaaaagtttcctatgtgaatcgaggtggggccgcgggtgttcagacattcgaatttatgtacacgacgcagagctaccacttggtgaagaaagcatttctctcgaactaa

SEQ ID NO: 347654 - DNA, 282 bp, Pseudomonas aeruginosa
atggcaattgagacgagctacgacaacatgcttcgccaggctccgatggcggtacacgacatcctcaatgcggtgatcacggatatcgatagcctcctgggaggcggttacgcgaaggaacatccggaccttgtggctgcctgtgtaaaggcggcgacttccgagttcaataactcagcaatgatcgtcgctatccaggaagcatccgaacgagtcgcaggagcgttggagcttgctggtcgggccatccaagcggggctggaaaggcagaacgacctgtaa

SEQ ID NO: 347655 - DNA, 810 bp, Pseudomonas aeruginosa
atgagggataatttcgaggcattccaaaagggcaatccgcatcgtttaactaggcagcagcatgtttttccagcggccagcatccagcgatttcaagggagggatggatgtgttcaggtatttcgcgttggtgctggaaattgcttctctgctaagccgaataacccgatattcgtggctcagagagtttgggatgagaaggcggaaaatggcattggtaaaaatattgaagataaatttcaatatctggctgaaggagtcgtaaccgggcgcttaaatgccattgggcttctagagaagcctgttgttgaagagttttatagtctttggagaactcgatatgggttcaagtatcgcggtctcccggacatgcaggtaaatcgcgtaagcggcaatgacctgtcaaaagatgaagaggaggtcctcgagtctaagcacactatgtacatcagggctgatggtacgatgcctggccgactgctcgctggcgtgcatatattcggatactacaatagattcagagatagcgcgaagtcgttgcagtgggggattgtaagatcggccgatggggaatttgttgttcctgactgttttcatgatttgctgattattcctgtctcgccttcaattttgattatggcagatcaaccaaattcttggctgacaaaagatgaggttgctgtcgttaatagatgcgctatagaaaggtccgaagattattatttcgcgcgcaacttcggttcttgcccgatatacagcataaatccgccaagaattcagcggttattcgctcggcccacagaattctga

SEQ ID NO: 347656 - DNA, 279 bp, Pseudomonas aeruginosa
atgcccgaacaaaccctcaaggcctaccaggtaggcgactacgacatcgtggcggcctatgacgaggccggagccattcgagtgctgctggagcagcaaggcgacgcagaaaaccactacggctacaccctggacgacgtgaagctggtcagtgacgccgtgctggacaacccgcaggcctacgaccaggacgaaggcgaggtcatcaccctggacaagacgttgcgccaggaactggccgagcagactgagccagcctacctcgccggatgggagtga

SEQ ID NO: 347657 - DNA, 1200 bp, Pseudomonas aeruginosa
atggcgcgaaaaaccatcactggcctctacgagagaaacggaatctggcatgtcgacaaggtcgtcagaggtcagcgacttcaagaaagcactggaacaagcaaccgggaggaagcagaacagtacctgatacaccggctcgagaagctccgacaggagaaggtctacggtattcgccgagtcaggagctggcgcgaagccgcgacccgctacctgatggagtataaggacatgccgtcgatcggcctggccgccatctacctcgaacagttggacccctacatcggcgacctaccgctcacgcacgtcgatgacgagtcgctttccccgtacatcaaggacaagctgaagccgagcagggcatcgaccggcaaggtgaagcctggtgtaaccccaaggacggtgaacatcgccctggagaaggtcatccgcattctcaacctatgcgcccggaaatggcgtgacgaagagaaacggccctggctggacacggtaccgatgatcaacaagctggacgagaagcggtcgaggcgtcccccctacccgctttcgtgggaagagcaatcgctgctgttctcggaactgccggaccacctgcgccgaatggcgctctacaaggtcaactgcggctctcgggagcaagaagtggtcaagctgaggtgggactgggagatcccggtaccggagttggataccagcgtgttcctgattccttcggactttggaggtagggacaagggatcaggtgtgaagaacggagaggaacggctggtcgtgctgaacacggtggccaagtcagtaatcgaggggcagcgtggcctggatccggtctgggtattcccgtatgggatgcccgacaggaatggcaaggcgacaccggttcatcggatgaacgattcggcatggaagaaggcccggatcagggctgcgaagaagtaccaggaacgcttcctgcgaccggcaccgaagggattcgcctcgatccgcatccacgacctgaagcacaccttcgggagaaggcttcgggcagctggcgtcaccgaggaagaccgacgggccctgctgggccacaagaacggcagcatcaccagtcactactcggcggcggagctgggaaaactgatcgatgaggccaacaagatatcagcgacggactcgcgaggaccggcgctgacaatactgaggaggaaggcaggatga

SEQ ID NO: 347658 - DNA, 1338 bp, Pseudomonas aeruginosa
atggcaacgataactgacaagcaaatggctgctaagcctgcaaaaccaacctggctgattgaagatgcccctcgtggatgcggtcgctttatggcgaggcttaggccaaacggcgagcgacacttctactttcgttatacgaactcaagcagcgagcgcgtctttctcccactgggcgtctatgaccctgccggaatagacggcttgaccctaaaagaagccagggccaaagcaggtgagctttctcgtctctatcagggtggcgttcgtgatctacgcgaacacttccaggccgaagaagaagccagaacaaccgcaagagaagcagagcagaagcgccttgctgccgagaaggcagcatttgaggcagctgaagcaaagcaagcggcaagaaaaacagttcaagacctctttgatcactgggccaaggttgacctgatcaaccgaaaagatggcggagatgaggtacgccggatgttcaagaaggacgtcctccccctgcttggaacgctgccccttgaagaagtcagaaaagggcacatcaccgaggtaaccgacgcattgctggcccgaggcgtgaaccgcatggccaagttgattttcagcctgatgcgccaaatgtttcgatttgctgtagatcgggatctgcttgagcatgatcccaccgcaagcatccggaaagccaagatcggcggaaaagatgtcgagcgggacagagtactcagcgatgaagaaatatcttcgcttgcgaagcttttgccagacgcaggccttctcgtttcaactgaggccgctatatggattgccttatccacatgctgccgcataggcgaactcatgaatgctcgctgggaaaatgtcgatctaaaagcagggacctggcttattcctgccgaagatagcaagaatggaagggctcacacagtaacgctatctaatttttccagaaaccaattcgaaaggataaaagcaatttctggtaaatgccaatggtgctatccaaacaccaaaaagacaggaccagtctgctccaaaacagtcaccaagcagcttggtgataggcaacgaaaaccagatcaagcaacaatgagcaaccgcagcgccaattctcacgctttgtcgctaaaaggtggcaagtggacacctcatgacctgaggcgaaccggcgcgacaattatgacagccttgggtgttctgcctgaagttgccgagagatgcctcaatcacactgaagaaaacaaagtaaaaagaacttaccaaagacatagctactcaaaagaaatgtcagaggcatggaatatactaggcgaacacctgcaaaaaattacgaaaaattaa

SEQ ID NO: 347659 - DNA, 1095 bp, Pseudomonas aeruginosa
atgaaactttctgtgccgatagctagtcattatggcgcgttgattactaatgactcttttgaagttttaatgcgtaaagatgcgagctcttctaaaggggcatttttgaggtgggagatcaagacggattgtgaaatagtaaaatttgtatgctctcgcttaatagaggagtgtggtattgctgcacaatttattgtaattaatccttatttggttttttttaaaggtggcactctggtaaattttctatttatgtattcgggtggcgacgtggatgctttaaattttaaatgggtttctgtgagtgaggcctggaaagagttgtctaaattagatgacgatgaggctcgctctggcgagttagggtcattaagtttattgaataactggattcatgatcaacgacgtaaggttgctgaaagaaaaataaatcgaaatcaaaaggagttctatgacaagcttgatcagctctgtcatgacgccaggattttgctggatcgataccctcgatactttgatgggatcggaatgcattcagaatttatgcagtcaacgataagttcgtctgctgcagagatggagggaattgaaaatttttcttcatatttagattctctatgtgcttcggtggagaaaaatggaagaagtgcctctcgagagaaagaccttattaatattgttcggtttagtctagctactgcgtatcgttgtttgcgtgagggaaggtttgatgattttttagaatgttgcttgcgtgctgaaaagtttatggctttacttggtgaaatttataaggttgaattttcgcaggaggtaagatctcgcgcgattaaggggggtggggcgagaaggaagggacatgttaaaactggtgagattgaagtagtaaattctattattttaaaagcgcttgaagataaatcgttatacagcaaatctgataagcctcttgatattgcaagcaagatagcaagtgtcgtgcatagtgggatttctgaatcagatttggattgtatttttaatttggaggatttgcgacattttattcttaattttattattacaaataaggctgcgcgggcgctggtgaaatag

SEQ ID NO: 347660 - DNA, 1416 bp, Pseudomonas aeruginosa
atgaatcaaaacatcaccaatgaaacaatcttagctgcactcaatgagttccccttgcttaaagatatggttattgaggtggccgaagctacacaagcaccattggagttggttttagcctcagcgctttcaactatttcgctcctatgccaaccactgattgatgtagagcgaccaggaaaaatgatcggccccgtatctctaatggtcatcagcattgcacagtccggagaaagaaagtcaacagtcgaaagcatgtttatgggtgtcgtccggatatttgtaataaatgcgcttaaagcacatgaaaaagaattacttgtatggcgaatcaaatcagaagcctgggaagcacgaaagcgtaaaattattaaagagatgagcgatcattctgagaccgagccagcatacaaacactttgaaaatgaattaatccaccatcacgaactgaaacccggacgaccacgcgcattcaatccaatctatgaagacgccactaccgcagctcttctcaaaggaatgcgtcttgactgcccttgggctgccttgacatcaagtgaagggatttctgctttaaaaggagtgtttaatgatttcggaaaaattaacgcgctatggactggaagtactattgatgtagcacgagcaacagttgatggatgttcactaaatgatgcgcggctaaccataggtatcatgattcaacctcaagtactaaaggagtatcttgagggaaagggagatcgcgctcgatctgtgggtctactatcccgcgccttagtctttaacccagagtcgacccaaggaaagcgattcattaacaaacgaccaacaaacaaagaagtcatcgcacgataccagtcacgagcaaaacaacttcttgaaaaatgcatgcaacgacttcacaacatcacaggagataaggaagtgataaacttctcttcaggcgccgccgaatactggactgagtcatacaacaagatcgagtgcgaactacagaaaggcggaaagtatgaacgatcaaaggatcatgcatctaaactaagcgagaacatcgcgcgagtagccgcactcttgcactactttgaatttggcaatggcactatatctttaacagagctcaagtcggcagagaaaattgttcttgagtgctctaaaacattccgaaacgagtttacatttatgccgaatatcatcagtgatgcagagatcctatatgcctggctacagtcaaactgcaaaaattcgacactcttcaactgggttgaaaaaaacacaatactcaacaaagggccatggaaatttcggacagtgtcaaagttaaacccactcctcgactgccttgaggccttaggaaaagtcagtatcgactacgctgtaaaacctgtacgtgttgtactaaagcagaattactag

SEQ ID NO: 347661 - DNA, 1278 bp, Pseudomonas aeruginosa
atgcttaaagaactcaagttgagccacgtggggcctgcgccttcgatggagctggagtttggcgagcggctgaacctgatcaccggtgacaacggtctggggaaaagctttttgctggatattgcctggtggtcgatgacgcgcaagtggccagccgagctcaacagcagcctgacagtcggtaaaaaagtcaggccgcacgcaaagcagaaaggcgagatcagcttttgctttaccgcgaaaagtaaggacgaaacctacaccagcaactatcagccgcgcgaagaagcctggacaggtcgatccggccgtccggccaatcctgggctggtgatttatgccatgagtgacggcagcttcgcagtctgggatccagcccgaaactattggcagaccaagaataatgtagacgtccaggagcggcgcccagcgtttgtttttagctcatcagaggtgtgggatggcctagttgatgaaggcagcgtgctttgtaacggcttgatccaagactgggcgacttggcaaaaggaagatggagaagccttcaaactactgaaaagcgtcctcaaggtgctttcaccaaacgcgagggaggccatgctgcccggcaagctgggcaagctgagcctggatgatgtccgcgacattcccaccattaccatgccctacaagcaggatgtgctggtgctgcatgcctcttcaggcatgaagcgggtaatggccttggcttattttctggtatgggcctggcttgagcatcgtaaggcggctgagcacttgggtgaggatccgacccatcaggtggtgttcctgattgatgaggttgagtcccatctgcacccaagttggcagagaaccatcgtgccggctctgctggatgtgatgaagaaactaaccaaacgcccggatgttcaactgattactgccacccattccccgttgatcatggcatcggtcgagccgttgtttgatgagcgcaaggacgcctggtttgatttggatcttgaacaggatgaagtggtgctgcgcaagcgcccatttttacgccaaggcgatgcatctcgttggttaactagcgaggcttttgatcttgggagtgcaaggtctttggccgctgaacagacccttgagcaagctgccaagatcctttctgaagaagtgattgatgctgaactggccaagaagcttgatgccaggctgcgtaccctgctgggtgacacagacccattctggattcgttggcgctatgtgggtgaaaaacaggggtggctgcaatga

SEQ ID NO: 347662 - DNA, 3513 bp, Pseudomonas aeruginosa
atgacccaagccgcacatcgccagcccctagacaaagccctgcgccgtgcgctggaagctaccgtcgtcaaagcccgtgacatcgccgaaacggccgccagtcaggcgctaacccgcctgagcgtgggcgaagccaaagcggcggactacctcaatgaccagcaacgccagctgcgtacccggctgcgcgcccacggccgccagctgggtgacaacaaacaggccaacggccagcaaagcctgaacaagctgatcactgaagtcgcctacgagcattggcaccgcatgttgttcgcccgttttttggagcagaaccacctgctgatgtacgacgagcacacgccgctcaccttggccgaatgcagtgaattagtgcaagacccagacactctgcgcgatgacctggagcgcggctgtaagagtggttgggagctggccggtgtgttggcctcgaaaatgctgccgcagatcttccgtatcgactcgccggtctttgtcctggagttcgcccccgagcaccagcgcgagttggaaaagctggtcaccggcctggctgcagagaccttccaggcccaggacagccttggctgggtgtaccagttctggcaaagcaagcgcaaggaagaggtcaacaagtccgaggtcaagatcggggctgacgaactctcgcccgtcacccagctgtttaccgaaccctatatggtcagcttcctgctggataacagcctgggcgcctggtgggcaggccagcggctcaccgagcacgactggcaaaccgctcaaagcgaacaggagctgcgcgacaaagccgccattcctggcgtaccactcagttacctgcgctttgtgaaggatgaaaacagccagcaatggcaacccgcctccggcaccttcgacgcctggcccaagcgactgagcgaactcaaagccctggacccctgctgcggctccggccattttctggtagcagccttcctgatgctggtgcccatgcgcatggagactgagcaactcaatgcccgacaagccatcgacaaggtgctcagcgaaaatctccacggcctggagctggaccagcgctgtgtcgagctggcggcctttgctgtggccctggaagcctggcgttatcccgatgccggtggttaccgcaccctgccagaactgcacctggcctgcagcggcctgtccatcgctgctgcccgcgatgaatggaaagaactcagccgcaaggccggcaaacagaacctgaccatagccctggattggatgtaccagacctttaaggatgcgccggtactcggcagcctgatcaacccgcgccgcagcaaggccgcgcaaattgcccagtggagcgaactgcagcaactgctgggtgaggcgctcactcaggatcaggccaaccagcaaaaccaggccgacggcgaaatctccgccctgagcaatcgcctggaagccggcatcgtcgcacagggcttggccaaggccgccgaacttctttccggccaatacacctgggtcatcaccaacgtgccttacctggcgcgcggcaagcagcacgataccctcaaggactactgcgaaacctggtaccccgaaggcaagaacgatctagccacggtgtttcttgatcgctgtctggagttctgtgtgcagggcggcaccgccagcatcgtgctgccgcagaactggctgttcctcaccagctaccgcaagttccgcgagaagctgttgcagaacgacagctggcatttgattgcccgcttggggccaggtgccttcgagaccatcagtggtgaggtggtcaaagccattctgatcaacctgagccgtggcaatgccgcaggccagtcggcggatctgctgcacagtggcgagccgggtaactggattcgcggggtggatgtgtctgcaccgcgtacagcggcggagaaggcaaaggggttgttgacggatgacgtcaagagtgtggagcaggggaagcaactcgagaatccggatgcaagggtggcgttggacgacgaaataacaggtaatttgatgaatacgttgtctcacagccatcacggtttagtttgtggtgaccgccccagaatgtgtgtccaattctgggaggttgagacacaagaaaacatttggattcactattgtggaacagtgaaaggttcccagcactacggtggcaaagacacctacctgaggtggtgcaacggtactggtgcgatcaaagaactaaagggcgcaacaaatctagagactcatgcttgggataaaaaaggagttgttgtcagtgcaatgagtgagctgccggtgactttgtatactggtttggcttttgacaacaatacttcagtcatcactgcagataaggcgctcgatcttccggcaatctggtgcttctgctcttcagcagagtataacgaggcggtgcgtcgtattgaccaaaagttaaacgtaacgaatgcaactttagtaaaggtgccgttcgatctgcattactggtcaaaagtcgccgaggatcaataccccaacggcctaccccagccctacaccaatgacccctcgcaatggattttccacggccacccctgcggctcggtaatctgggacgaagacagcaaatggaccgcccacggcgaattgcgcgtcgatgacaccgtgctgcaggtcgccgtcgcccgtttgctgggctaccgctggccggcagagctggaccccaaaatggaactggccgccgaacagcgcgaatgggtcgagcgttgcctggcactggccggctttgtcgatgacgacggcattgtctgcctgccgccagtgcgcggtgaaaaggccgccgaccagcgcctggaagccctgctgcaggccgcctatggcgacgcctggaccacgccgcttaaaaaccgcctgctcgacgccgtgggcagcaagtcccttagcctgtggctgcgtgacaagttcttcgagcaacactgcaaactgttccagcaccggccctttatctggcatatctgggacggcctgaaggacggcttcagcgtactggtcaactaccacaagctcgacaaggctgggctggagcgcctgatctacacctacttgggcgactggattcgcacccagcaagccggcctggccaacggcgaagacggcgcccaagaacgcctcgccgccgccgaggccctgaagaaggaactggaagccatccttgaaggcgaaaagccctacgacatcttcgtccgctggaagcccctcgccgaacaacccatcggctggactcctgatctcaacgacggtgtgcgcctgaacatccgcccgttcctttacgcccgagatgtcagcaaaaaaggcgccggcatcctgcgctgggcccccaaaatcaaatggaccaaggatcgcggcaaggacgttgaatccgccccctggtaccgcctgggcctggaatacggcgaaggcgagggtgcacggatcaacgaccatcacctgagcttggctgagaaacgggcggcaaggagctag

SEQ ID NO: 347663 - DNA, 582 bp, Pseudomonas aeruginosa
atggctactcagcctcaactgtacaccctgcatatccagctggagccgctgcatttcaatcctccgatctggcggcgcatccgggtgagtggtgattgcacgctgcgtaagctgcaccacttcatccaggccgcctttggctggaacagcagtcatctgcatgagtttgagaaaggcctgaaccgctacctgccgctggatgccgagttcatgcacatgtacgacaacgccctggatgaccgcaggacaaagctacgccgcatactgaaagactcagaccggcttcgctacctctacgacttcggcgacagctggcagcatgtgatcgccgtcgagcgtatcgaaccgacagacatcaccggtagctggtgtgaagtgctggatggcgccagagcctgcccaccggaagactccggtggcgtgcccggttatttgcagcttctggaagcgatccagcaatctgatactgagggctttcgaaaggtcattgcctgggctggtcaacactttgatcctgagctttttgactgccgggctgccaacgccgccgtgcagcgcatctgcaacaacttctggggctaa

SEQ ID NO: 347664 - DNA, 1245 bp, Pseudomonas aeruginosa
gtgaccacgacccttcacccacgctatctgcagcaacaggtgctcgatgccctcagcgacacacctgtcgtgtgcatccttggcccacgccaggtcggcaaaaccaccctagctcgccagctggagccaggacgcacctacgtttccttcgacgacaacacgatgctggctgccgcccgctatgacccactggggtttgtggcaggccttccggaccgggtgatactcgatgaagtacaacgcgttcccgagctgctgcccgcgatcaaactctcggtcgacaatgatcgtcgccctggtcgcttcattctgaccgggtcggccaatcttctgctgctgcccaacgtgcaggagtcgctcgcaggacggatggaggtgatctatctcaacccgctctcggagcaggaaaaacaccacagcgacttctcgctcctggaagccctgctgaccaaccagatcaagcccgccatcacgggagttcagccccctgttgcaggcattgccgaagcggtcgtaggcggtggctaccccgagccgaacaccagaacggaggcgcgtgcccgccagtggtaccgccaatacctgaatgccattattcagcgggacgtgcaggacatcgccaacattcgcgacggagatgagctgctgcgcttactccaactcatcgctctgcgcaccggtaacctgatcaacatcagcaatctgatgcaggacatcggcttgcagcgggacaccatcagtcgctacctgtcggtgctggagcggttgttcctggtacgcacgctaccggcctggcaccgcaatgcagccaaacgactgatcaaggcccccaagatccacatcatcgactctggattgggcagctccctcaccggcctgaaggcggcagactggaacaagcccgacaacgcatttggcggaatgctagagagctttgtcgtgcagcaactgatttgtcagtccggctggtgtgacagcgaactgcgcttctctcactaccgcgacaaggatcagctcgaagtcgacctagtcatcgagcaggatgaccgtctatggggtgtggaagtgaaaaagtccgcctccatacaggggcgtgacgctcgcgggctggcacgattggccgagcaggctggccgtagctggcagggcggcatcctgctgtacacaggcaccagtaccctaccgctggcggagatacagaatgcctttgccgttccaatgaaccagctatggcataaagactga

SEQ ID NO: 347665 - DNA, 243 bp, Pseudomonas aeruginosa
atggctgagccggtttatgcattggtggactgcaacagcttctacgccagttgcgagcgcgtgtttcgtccggatctgttgcgcacgcccatcgtggtgctcagtaacaacgacggctgcgtgattgctcgctctgccgatgctaagccgttcgtgaaaatgggcgccctcttccacgagatcaggggcgacctcaagcgccatgggatcgttgccttcagcagcaactacgccctctattaa

SEQ ID NO: 347666 - DNA, 1020 bp, Pseudomonas aeruginosa; identical to SEQ ID NO: 337702

SEQ ID NO: 347667 - DNA, 2166 bp, Pseudomonas aeruginosa
atgagcaccccctcagtcaccccttatgttccgttcgacgcgagcaagtacgtacgtcagagcgatctatcgaaaatcgagctgagcatactttcgaatcgctctcaccgttcagactggggctacctccaatcagagatacctgagctcatgaggccgctagctgatatagcggcgcacagcggcgtttctcagcgattagccatttcatcagtggcagtcattctctggaatgtcagcaaaaccggtaaaccctactggtgttggtctgagtcgcagtggttgaccttgctcagtaatcgagcaggatcacgaccatatctcgcttccgttgcttaccatctcggcgattttcgaaccccgcagcgtatcgccaaattccggcagccggcgatatatgcttcttttatcttcggccatgccgtgttcagacatgagcacgttcgcttgagccaagcgttgagatcgctgggctacgctgctcgccatcttgagcagttcctttccaacgtgctgggtgccttgatgctggaaaacggcgatccgcggttggagacattcaccgaggaactgctactgaagggccaacagcatcgaagcgaaggtgtcgcgagatcggtcggaaaggtatctcacggcctcgctgccatggggattttggcgaaacctttacgcatgcgaggctatacctgttggcgggcgaaaagcatcgaaggcatcgatccgacttgggcaatgtggtgccgtcgatggcgagacacttccaccttgcgtccacgcacacgtgaaagcaattacagttttatcttgaggaccggtgtctggctagcgcgcgagcaatcaggaatggcggcgcctaccgattggagcatgtccacttgcgctgcatttattgctgccgtcgaccggatgacggtcggtgagtgggctttggagtcagcgaagggaacacagctaaaggggcttggtcagcctatcgctgccaactcgaagcgcggctttctacatgccttgcgacgattttttacagactttgaactctggggatggggtcgtttgaagttcagcccccggcatcacctcgccaccccgcgatccgtgacattcaactcgggtatcaacccgcgggtaattgatgactcgacctggctcaagctgatttgggcgagtctaaatcttgagcgtagtgatctgctttcggagattcactatccgctgtcgatggttcaagccattgctgtagtgtggacgcacgctggtttgcgcagcaatgaaatcatgcgcttggataaaagatgcgcgcatcctcagaccaatgatgtggtacacgaggatgggaccatcgttccagcaaaaactttatgctatctcgatattcctgccagcaagacgttcaaagctttcgtcaaacctgtagcggtggtcgtgaaggagcgcattgacgcctggctggaggacaggcctgctaaccaggccgctttgctggatgagcgaaccggggaaaaagttagctacctatttcagtttcgaggcaagcgcataggctccagtgtcattaatggcaccatcattccaatgctatgcgccaaggcgggtgtgccactggaggacagtcgcgggcgaatcaccagccaccggggacgtgcctccgcagtgacggcgctcgccagcgtccctcagggcatgtcgctgatcgagctaatgcagtggtcgggacatagctcgccgaattcgactttgcattacattcgaattcggcctaccaagctggcagcatccttcgttaaagccgatcaaatggcccatatggtctccgttttgatcgatcatgacgtaattgttcgccattcagatgccccctacaccttctatgacttgggcgactcgtattgttcaaatcccttctggagcagctgcccacatcgcatggcctgtgcggggtgtgacttcaacttgccgaaagccagcgcaagggcccaagcattggaaagcaaatcgtctatcggacggtacttggaggccgtgcctttaactcccgacgagcgagccattgccgagggcgacttggaaaagctggagagcctcattcgaaagctggacaatgtgccggctctagacggcaggatgccgaggagatcgatgagagaaagaggaggctataagtag

SEQ ID NO: 347668 - DNA, 1014 bp, Pseudomonas aeruginosa
atgacaatcttggagggctgctttccaagcatcgaggtctacagcatcgacgaggcctttgccgatatgaccggtctacccgaaccactggagtcgataggccgtaaggtgcaggctgagattaagcaaaagacaggtatcccggtcggcataggcatcgccaccactaagacactggccaagctcgccaataacgccgccaagcgctggcagaagcaaactggtggtgtcatagacatccgcgatccggttcgtcgcgacaagctgctcaaggccatgcctgtagaggaagtctggggcgttggtccccgaatacgtgctcacttggaaggcatgcaaatcaagacagcttgggacttggcacagatggatgcctggacactacgcaagcgattcaatgtcgtggtcgagaaaactgtgcgcgaactgcgcggtgtggcgtgcctggagatcgagaacgaaatcgaacccaagcaagagatctgcagtagccgctcattcggcaagcgcctgcgagagttagcgcctatccaagaggccgtcaccagctatgcgacgcgcgctgctgaaaagctccgcaggcaggagtcgctctgcagacaggtgcgggtcagtctgcgcaccgggatgttcaatccagctgaagcgaaatatgccaatggcgtcctatgccaactgccctatccaaccgatgacagcaggctgatcatcaaggccgtccaggctggattgcagcaggtctacagagagggattcagctacgccaaggctcaggtgatgctgttggatctgtgtcgcaagaatgagtacacaccggatctgttcgcccctgaacagcccgtgaaaaccgagcgactgatgagcgccctggacgccatcaacaaccgctggggacgtggcacgctgcaaccgggacgcatcgccaagccagccgagtgggctatgcgaagagaaatgctctcccctgcatacaccacccgctggtctgaattaatggtagccaaggcgcaataa

SEQ ID NO: 347669 - DNA, 672 bp, Pseudomonas aeruginosa; identical to SEQ ID NO: 335580

SEQ ID NO: 347670 - DNA, 402 bp, Pseudomonas aeruginosa
atgctcccggttgagaccaagaaggccataagcgcccaggcaaaaaaactgaagatgtcgggggaagcactggtcgcagacctcctcagtggcgctgaaaaatcgcttgaggagcaccgcaagcgcgaacaggccctgcaagacgccctggcgaacgagcgtaaacgtcgcactcaactcgacgagcgctggaaggtgaagcatgacgaggccatgaaacagatcgagcgactggctaccctagtaaccatgtgggaactcaccttggggcaggccgatcctggtttcgatggggacgaagctacacttcagtcggtgacgaagaaaaaggtcagcggaattaagaaagccataaccgatgccctcaaaatgcatgaattgctggaggcaagattgatctga

SEQ ID NO: 347671 - DNA, 1383 bp, Pseudomonas aeruginosa
gtgtctcttaagacaaagcccgttctgagcagattgatcgactgcaagccagaggcacgattcatcttggaagccactgcacgggatagttcgcttggtagggctgagggccagtacatccgaagcaagctgcttgcgaagcagctgcgtatggtggaaggaacagttgctgcggcgctgggggagctggtgtcggctggcctagtggaacgcatcgagtcggctactaccggcaaaggccggccaagggtcagctatcaaattgcgccacagccactggcgctgctggcagatcaggaatgctcactgttcgtccactcggaacacctgcagcggcttttttctggggcggatatgcctgcagaaatattgggttcgaagcctaagcctcggaaacagcgggcggtcgtcaccaaggatggaaatccagcgcctccaggtgcccgcagcagattgagtatctgcaatcgattgctgctgggagcgttgttggcgaatgccgatcaatttggcgttgtggaggggctcagtagccaggagttgaggaagctgacaggcctagattccgagagcttgaaccataggcttcggcgtctaagagggctgggtttgatccgcagctatgtgccaggagtgacgagttctattttccgtggcaaaaaagtcagtagcacgtatttcctcaacctgaatcatccgggctatggcttgggtgaggagggggcgattctggtgcactgtctgccgcagtccaatgtccaggaggatccttgcggtttgctttggcgggatgttaatgggcttcgtggtacctatccaccgctgaacgcccctgagacacccgaggcggttcttcggtttttagcttctgcgcagcagcctatttttgatgtcttgcggattaagctctatcgatgtgcatctgagttgctctcgcgccattggagcgatctggcccttgatggcaaaggaagctatgactggctacgcgatcagattggggcagtttttcagcctcctgcaggctttggtgaaggaggcgttgagcctgatcaaatctgggtggagatcctcgactatttctgcacgctggtgatggatatcgccagggcctacagaaggaggtttggcgcggcaaactggattgggtttgacttggttcaacactgcatcctgccagtactgcaatccgaccgggacgaagttatcgcgctacttatgcagcctcggcctcaagaagtatcgatatgcactgttctctgggagtcgctgcatggcgacttgatccctgaacactggggtacggaagccgaggttccgctcaattatcgcttcaaatgcgggttgttgacgccgccagcgcggcggctactgaagcggtaa

SEQ ID NO: 347672 - DNA, 468 bp, Pseudomonas aeruginosa
atgatcgtggaacaggtgtccggatcagcgtgggctgagtgtccgaatggcgtggaatccgcaatcgagctggagcgccagttctggcactacgtggaaaccgacaccccaccgcaggccgatggcaccgcctccgctgaatcagccctgcgctgcctctacccggaggatagcggccaggtcgtcgacttcagcggacatgccggactggccgcagccttccttgaactgaagaccgttcgccagtcgattgccgacaaggaaaagcgtgaggccgagctcaagcagatgctgcagcaggccatgggcgacgccagtcgggcggagttttccaatggctacgtcagttggcgcaaagccaaggacagcatcggcctcgatgtcgctcagttgcttaaggacaagccctacctgcaggccaagtacccgctgctgaaacagggtgctcgacgcttcctcgtcggctga

SEQ ID NO: 347673 - DNA, 330 bp, Pseudomonas aeruginosa
atgtcattgcagtgcccccgctgtcactcccccaaagtcgcttcattccatcacgccatgaaaaccggcgctgccatcggcgctgttggaggcctcgcacgtggtatcagtgctgctctggcaggcggcaaggccggtgcagccctcggcgtattcgccggccctgtcggcatcacactcggttcagtatccggcgccattctcggcggccttgccggaggcgtcggtggatgtgcgattggcgctcagctcggcgagtcgctcgaccgccatgtactggcccacaacctctgcctgctctgcggtcaccgcttcaacctgcctgcctga

SEQ ID NO: 347674 - DNA, 2700 bp, Pseudomonas aeruginosa
atgcgagacacttccagccagcagaaaacggactcagccccatgggagcaggccgaacgcctcaagtgcatcatcgatggcaccaacattggtacatgggagtggaacgttcagacgggtgaaaccaccttcaatgagcgttgggcggagattattggctaccgcctcgaggaactggcccccgtcgacatcaatacctggttaaaccacgcccatcccgatgacctccgtgagtcaggcgtccgcctggagcgccacttcagtggcgaaacgcccttctatgactatcaatgccgcatgcgccacaagtcggggcgctgggtttgggtgcatgaccgtgggcgtgttgtgagttggactgatgaaggtaagccgttgatgatgtatggcactcatgccgatatcaccgagatgcgcgagcagcaggatgaggcccatcgaaccagcgcccaactacaggccattctcgactcggcaaccggcgtaagcgtcatcgccatcaacccggatgggctgattacgctgttcaaccggggcgctcaacgcctgctgggctatcaggcagaggaagtggtcggtctccagaccccggcgttaatccacctgggtgatgaggttacgcaacgaggtcgcgagctttcacagctcgtaggtcgcgagatcagtggtttcgaggttttcgtccatctggcgcggcagggggagcccgaaacgcggcaatggacctatgtgcacaaagatggcactcggcgcagagtgaacctgacggtaagtgccatattcgacaggcagggcacgctatccggttttctgggcattgctagtgacatatctgaattggagtccaccactagagcgttgcaggagagcgaaaatcgtttccggggactggtggctaatctgcccggtgtcgtctatcgctgtgagaacgatgccaattggaccatgcgttacatgagtgatgaagtctcttctctgaccggttttccggccagtgacttcattgataaccgcgtccgcagcttttccagtgtcgtgcaccctgatgacctgcacatcacctaccagtccgtcgcggccattgagcgacatgaaaaatttgagctcacctaccggcttaagcatgtagacggtcacagcgtctgggtgagggagcaaggtcggggtgaatacgacgctaacggtgatctgctctgggtgtccggctttatctgggatatcagcgaccgcaaggcagccgaggacgcactgcgcatcagcgagcggcgcttcagtggcgcattcaacactgccccccagggcatggccatcgtcgaccttgacgggcgctggatggaggtcaatgacgccctctgtcgcatgctggggtacagccgtgaggagttactgcagctcgactttcagcacatcactcatcccgatgacctgaccaaggatttggcgctactgcaacagcttctggatggtgtgatcgccggctatcaactggagaagcgttacatcgacaagcgcggcaacgtgctgtggattctgctcagtgtttcattggtacgcgacgctctgggggtacccctgcacttcgtgtcacagattcaggacattacggatcgcttcgaggccgagaaacgcctgcgggagcgtgaagaatacctcagcaccctgctggacaacgtcatcgatgccatcgtgaccatcgatgagagcgggttgattgaaaccttcaacccggcggctgagcggattttcggttacgggaaagcagacgtggtagggcagaacgttaagttgttgatgcccgagcgctaccgtgagcagcatgacagttttctattcgcctaccgagagagtggcgttccacgaatactgggaaaggacttagagctgcccgcacagcgacgcaatggtgagctgttcaccatggagttagccgtgtcacagatcacgctgcagagtcagcgccgtttcattgctgtcatccgggacatcagcgagcgcaagcgtatcgaacgaatgaagaatgaattcgtctccaccgtcagccacgagttgcgcacgccactcacctcaattgccggagctctgggcctgatcaacggtggggcactgggggaggtacccgcgcagatgggggaaatgttgcgcattgcccagagcaacagtcagcgcttgtcagatttgatcaatgacctgctggacatggacaagcttgtggccggcaagatgacatttgacctgcaggcgctgcggctctggccactgttggaggcggccatagagcagaatcagccctatgccgcgcaacactcggtcgctctgcatctgaagccaccgcagttggaggtcgaggtgcgtgtggacaggcagcgctttgcacagatcatgtccaatctgctctccaatgctgccaagttctctgcacaggggcgtgaggttgaggtttatgcggctcaggtcgatgcgcgagttcgcatcagtgtgaaggattttggcgtgggtatccctgaggcttttcgctcacgcatatttggcaagttctctcaggctgatgccacggatactcggcagaaaggcggtacaggtcttgggctggcaattaccaaggagctgactgaacgaatgggagggcggatcggcttcgagtctgtcgagggccagggaaccatcttctgggtcgaactgccgatggtggtcagctcttga

SEQ ID NO: 347675 - DNA, 1677 bp, Pseudomonas aeruginosa
atggtaggggtctggcttctggtcacactgctgatatcgggtggcctggttgagcttggactttggcgctacagccagtatcgctatcaagaagagcagcgttttctgcgcgcccaggcctacgagatgagggcggtccttctggccgagctgaatgccacgctgcacctcgccagcggcttggccagttatataccgaccaagcaggggcgcctggatgcaaccgagctgcaaccctggctgcgtggactgttcgcccagggacgctatatccgcaatattggattggcgccggataaccggattgcttacctctacccgcttgaaggaaatgagtccgctctggggctttactaccccgaccttgccgagcagtggccgcggattcagcacatcatcgcaaacagggcgccgcaactggatggccccctgaatctggtgcagggcggcagaggtcttgtctacagggtgccggtgtatttgcaggaccaacgctactgggggctgatcagcacggtgattgattacgaccggctcatggcttacctggatgccttggcgcgccagcgtgatctcgcgattgccctcctacccttcgatgcccccgcagcagcctcggcaggcaacgttcgcctgccggtatcgctggccggagcacaatggcaactgcaggtttcgagtacatctcagccgctggttgctttgaccctggccagggctttgggctggagcttggccctgctcatcacctgtctggcggcctggatgatgcatctgcaccgtcgcagagcaagcctggcccaggcgctgagcaggagtcagcaggacttcatgcgagccttcgacctggctccgcaaggaatggcaatgctgaaagccacggggcagcttttagaagtcaaccagacgctatgccaaattcttgaacgtagccgcgaagagttagtgggtgcggtgctggctgatttctgcctgccgagtgaccgtgaactgttgcgccaacacctcgcccaagagtccggacaggcgcggctgggctggtggatacggatactggatgcagagcagaaccctgtcgacgtcgaatgcagtgcctcctggcttgggcaatcggtgaccggcgaagcactgtgcatactgcatattcaggacatcaccgagcgtttacgtctgcagcagatgcaacgcgagttcattgccagtgtcagccatgaactgcgcacgccactgacttccattgcaggctccctcggcttgatcaatgggggggctctgggcgaggtgccacaagcgatgcaggcactgctgcaaatcgctcagtccaacagttcgcgcttgcatgagctgatcaacgatctgctggatatggaaaaactgatggccgggaaaatgcgttacgacatccgcgagcaacccatctggccgctgcttgaggatgccatcacgcacaaccagccttatgctgatcaatatcaggttgcgcttgagctggtcggccatcctgtagaggtcaacgttgccttcgatagtcagcgtctggcgcaaatcctggccaacctgatttccaacgcggctaagttctccccgcccggatcagtcgtaactctcaaagcaagtgtcgatcacgactggctgagggttagggaaggtctgaaaaagacttcccgaatctggtga

SEQ ID NO: 347676 - DNA, 1860 bp, Pseudomonas aeruginosa
atgttcgacaacatcaccgcgttggcggcgcagatctgcgaaacccctattgcgctgatctcgttggtcgatgccgagcgtcagtggttcaagagtcggcaggggctggacgcccgtgaaacgccgcgagagctggcgttctgtgcgcatgccatcaacggcgaaaccttgttcgaagtggaaaatgccctactggatccacgcttcagggacaatccgctggtgaccggcgctccggatattcgcttctatgccggcatgccgctcgctgacagtgaaggccataacctgggcaccctgtgcgtgattgaccgccagccacgtcaactcagcgtgcaacagaaaggcgccctcaaactgctcgcgcagcaggccatcaatctgtttgaactgcgcttgcagacgcggcagcagcaagagcaggcggcgttgcataaggcgattttgagcagtgtaggaactgcggtgttgatcactgacatggcaggcgtgattcggcaggccagtccgggggttctgcctcttctgggctacgaagtggatgccctggtcggtcaaagtctcggactggtgctaccggatgaggagcgtcagctgcaacccgatcccgtcaggccgtctttcaactgcggctctgagcaggccagtctgcatgagttgagggcacgacatcgcaagggtcagcgcattcccgtgctgttcagcctggcgccgattgccatggatggcagtgcacaaatgggctatctctgcatcctcaatgacctgagctaccgcgaggaagcgctgcagcgcctgcagcacatcgccgagcaacttcccggtgtggtctaccagttccagctgtattccgacggtcgcagttgcttcccctatgccagcgaggggctacgggatgtttacggactgcagcccgaagaggtgcgagaagacgcgagcagcgttttcgcgcgtattcacccggatgatcttctcgccgtgaccgccagcattcagacgtcagcggaacacctgagcgtctggcaccgagagtaccgtttcctgcatcccataaagggcctcatatggctggaaggtcgggctatgccacagccgcgtgccgacgacagcattctctggcatggctttatcactgacatcactcagcgaaaacatctggagcagatgaagaacgagtttgtctcgaccgtcagtcatgagctgcgcacgccccttacttccattgcgggctcgctggggctgatcaacggtgaggcattgggtcctgtaccgaatgcaatgcgagagatgctgttgatcgcccagagcaattctcagcgcttgcggcaattaatcgatgatctgctggacatggacaagttgcttgcaggcaagatgagctttatcccccagcaactggatatcgacagcttcctggccgagtgtgtcactagccatcaggggttcgcccgtcagcatgatgtgcagcttagctacacgggagggccggtagcccaagtcaccgcggacccaatgcgcttacagcaggtgctcagcaacctgctgtccaatgccctgaagttctcgccagcaggcagtcaggtgcttctatctgctcaggcgcttggcggacagatcagaattttggtggtcgatcaggggcctggcgttccagccgagtttgttgatcgtcttttcgagaagttctcccaggccgatgccagtgaccgtcggcagaaaggtggcaccgggctggggcttgccatcagcaaggagctgatggaacgcatgggaggatgcatcggcttctatccgcgtcccggaggcggctctgttttttgggttgagctacccgctctatttcaggatgaaacgctatga

SEQ ID NO: 347677 - DNA, 2871 bp, Pseudomonas aeruginosa
atgacgatgcttgaacatgctttggccaaagggccccgatggatgcctctcgtggttcttttgtgcggcttattgagcactctgggagcttggtacgcgcttagcgccatccaggagaaagcagccgatcgtgagtttcagcaactgggtaatgaggtgctggaggcgatcgagaagcggatgaacaatcatcgccagatactgctgggaggggcagctctgttcgacgctagcaacgacgtgagccgcgatgagtggcggcgctatgtgcaacgtttggatctggagtccaactacccaggaattcttgggcttggctacagccaggtcgtgcagccggatcaactgcagatttttgaggagagcctgcgcaaacagggctttgctgagttcgccattaaacctgcaggaaagcgcgatctgtatacgtcaattatctacctggagccatttacagggcgaaacctggcggctttcggctttgacatgttttccgagcctacgcggcgtgcagccatgagcagggcggttgaaaccggcctcccccagctgagcagcaaagttacgctccttcaggagaataatgggcctgcacaagcaggtttgctgatgtacgtgccggtctatcggcccggggcgccgctgaattcttctgccaagcgctgggaagcattacgtggtttcgtctatagcccttaccgtatgaccgatctgatgcaagcggttctcgatggtagggatttgcagatcgacttcgccctctacacaggagcaatagcctctcctgaacagaagattttcatcagtcatccgcggcttgagcaggcagataaacctttacgcaccgagcagctggagttgtttggtcagccacttacagtgagcttctatatgcagcccgggttctacgggcgcttccagcaagggcagggcctgttgctgattctgggtggtgtgatcagcttgctgctgttttttctaacgcaggttcttgccaatggccagcagcgagccatcggcctggctaacgatatgacgtctcagctgcgccacagtaaggcaagacttcaacgcgtcttgcagggtggccacgatggctggtgggaccaggacactgaggcgggccgtttctttgcctcgactcatacctggcagatgctcgggtatcccgaccaggggcctcagccgcctctcagggacctaatacaactggtccacgctgacgatgtcgcggcgcttcgtgcccgacttgcggctcctgaaggggcaatagagcattacctcaatcatgaatgccgattgatacgccaggatggccagcctttgcccgtgcttctgcgggcgctgattcgatgctcaccagacggacgtatgctcggcgccagcggcaccgcgatggaccttaccgagcagaagcgcatcgagcagctcaagagtgattttgtctccacggtcagtcatgagctacgtacgccactgacctcgatttcaggctctttgggcttggtcatcggcggcgcgcttggcgccgtaccgaacagcatgcgacccatgctggaaatcgcccagcagaatagtcagcggctatgccacctgatcaatgatcttctggacatggacaaactcgccgccgggaagctcagtttcgagttcaccaacctcgagttgggtcagcaactcaatgaagcccttctcagcaatgcctcctatgctgagcaacatcgggtgcaactggcgcttgatcccatgcctcctgtcaaggtgcgtgccgatgcgcttcggctgcaacaggtgctcgccaattacttgtcaaacgccatcaagttctctccttcaggcgcttcggtacggctgcacagtacgcttcgagatgggcgcgtcagagtaagcgtcacagacagtgggcggggcatcccggagcacttccacccacacatcttccagaagttctcccaggcagacagcagtgatcaacggcaaaagggcggcaccggacttggcctggcgataaccaaagagcttattgagcgtatgggtggccaggtgggttttgattctcgtgagggccaaggcagcacattttggttcgagctgccggtgctggtcgagaaccatccactcactgatattcagcgtccaaccatcctggtggtggaggatgagcctgacgtagcccggctgctccagctaatgcttgagggcggtggttatcaggcagtactggctgaaaacctggctgaggcgaggcatatcctggcaacgcgcgaagtggccgccgtaaccttggacttacgcctgcctgacggccacggttttgagatcctgttggaaattcagcgtgtactgcgcaagaaggatttacccgtcattgtcatctccgcggcagccgagcaagggcaacttaatctccaggggggtatgcacattgttgactggctggataaacccatcgacccgcatcgactactgagcggcctgcgtcgtgcactcggcagcacgcggggacagcctcgcattctgcatatcgaggatgatcctgatctgcgcatggttgttgccgagcaggctagaagcctggctgagtgcgagggggccggtaatctcatggaggcccggcagcagttagcatgtggctcatgggatctggtgctgcttgacctgcacctgccagatggtgatggcttcactctcattgaggagattcatcaggcccatccaggactaccgatagtggtactgtcttcgacagagctttcgacggaacagctgagttttgtcgaggcagcattggccaaatcccgaacagagccacaggcattcctggatgtgctcgctcgcctactaccgaccaaaggggatgatcatgcctga

SEQ ID NO: 347678 - DNA, 426 bp, Pseudomonas aeruginosa
atgtgctcgctcgcctactaccgaccaaaggggatgatcatgcctgagctgaagcgcatattgcatgtggaggacgacccctccattcaggctgtggccaaagtcgccctggaggctgtcggcggattcgaggtgctgagttgcagcagcggtcaggacgccatcgagagagtggcaggttttgcgccggattttattctgctggatgtcatgatgcccggaatggatggcccgcagacgcttgagcaattggtcaacctggtggacatcaacgttgtccctgtcgcctttatgactgccaaggtacagcctgcagaggtcgaacattacctgagcctcggcgcacgtgacgtaatcataaaacccttcgatccgatgcagttggcaagtcagatacgtgccatttggagccgctcgaatggatag

SEQ ID NO: 347679 - DNA, 1662 bp, Pseudomonas aeruginosa
atggatagacagaagccgttggctgacctgcaagctcagttacagctgttgggcgagcagtttgcacagcgcctcaaggaagagctgccgcagctggcagatagggcgcagcagttgcagcgttcctctgatccaacagagcagcttgagcacctacaggatctgcgcaaccagctgcataagctagcggggagtgcaggtaccttcggcttcaaggagctgggagatcaggctcgattgcttgagcagcactcgcagcaatggctcagcagtctagagttgcagcgcaagggattggacacttttgttgatgatatccaggcactggcgtgcacttcatatctagcagtaaaggtgaatcctgctcccgcccctatcgatctgccgcgcagcagcgccccgaacgaaggctcccgtctcatctacatcctcgaggatgaagaaagtgtgggtgagagcatccgtcgaacgctctcgacgttcggctatcaagctcgccactttatctgcactaccgaacttgatgaggcgatagcgcggcagagtcctgatgctttgattgtcgacgtcaatctcggcaccgctcagcagagcggattggagtacgcgtcctcactgcttgctcgtctcccgcaggtgcctccgttgctggtgctgacgacgcaggatgacttcgatactcagctacaggcggcacgccttggtgccgtcggttttttcagcaaacctgttgatgtggccaagcttgagagtcgtcttgataggtgtttcgcccaacaaggggggactccctatcgagtgttgatcgttgatgatgactatgagttggccaatcactatcgcttggtgctgagcgcggcaaatatgctggttaaggtagtcaatgagccgagccagctacttgagaccattgctcaattcagtccagaggttctgctgctggatgtgaacatgcccggcagctcggggcccgagcttgcccagatgatccgcttcaacgatgactggatccgaataccgatcatctatctttcggccgaaaccgatatcggcttgcaaatgagtgccttgcttaaggcgggtgatgacttcgtcaccaagcccatatccgataagagccttatcgctacagtgtttgccagggcacagagggcaagactactcagcaatgcgttgtctcgagacagcctgactgggctgctgaagcatgcggatatcaaggagcaggttgcggtagagcaggagcgcgcaatgcgtacaggcaagcctgtaagcgtggtgatgctggatattgaccatttcaagaaggtcaacgattcatacggtcatggtattggtgacaacgtgattcgggcactcgctaatctgctcaggcaaagactccgcagagtagacgttattggtcgctacggtggtgaagaattcctggcagtactgcccgagtgcagtggagctcaagcagtacagatactggaccaaattcgtcagcagttctcgcgaataagcttctccagtgagatgggagatttcaatgccagcttgagtgcaggcatagcatcatgtgttgagctggaagccagtgcgcttatcgacgctgccgataaggcactctacgctgcaaaaaatacggggcggaatagggtatgtttggctgagatataa

SEQ ID NO: 347680 - DNA, 1125 bp, Pseudomonas aeruginosa
atgcgagtgatggttgtggatgacgacccttggttggcaggtttgcttaagcagctggtgttgagtaagaggccaggtgcagaggttgattgttacggggatgtcaaaagcgcttatgccggatggcagagcaacaaatatcaactcatactggccgactggaaccttcccgatgactctggcctgacgttgtttcagttgattcgtaagcatgacaaggaaacgccgctggtcatgattactggtcgtgcggatcgtgaaagcgttcttgcaatcagaccgttggctattagtgcttacatcacaaaacccttcgaagtgccaaaagtactggagtgcctagagagcctcctgccggcggataatacgactgtggctcatgagctggttcgtgaggacctgacgacattcttgtccggtcggtccgccgcggatctggatttaccgttgatgcaccaagtcaaggatcggttgatgctggctgccctcggtactccgttggattttcgagagttggccgaggaatggcaacacgaccccgctctctgtacttgtctgattgctgcagccaacagcccagcctatctattgggagagcagcgctgtgccagcttggtagacgcactgaagcgcttaggcgggcgcactagcctcaatctggcaattgctctggcactgcggcagaccagcagttctacaaatttgctgctctctgtctttattcaagagcatctggatgcctcggagcgactggctgaaagggtcgtgcaattggccaggcaggctggtgtagagcatggtgccttgcaggcagcggcaatactgcatcgactgggggaattatgtgttttgcagcaggtacaaatatgggcagagcgtggcaaccatctggacgaaggcgctgtcatccaggcgtgcgatgactatgccaagccctttgctattgctcttaaggcgtattggggggtcccaataacattgcgtgaactgattggtgctgtttatgcgttaccgcagttacaggtgcgtcgcgaccaggtgctattgcgtctagcagctgctatgagtaatagcgagccagcagatgtgattgagagcctgaaacgccttgcgggcataagttga

SEQ ID NO: 347681 - DNA, 126 bp, Pseudomonas aeruginosa
atgaaaagaaacgtcctcatttacgtcaacaccggcaggctctttcactcgctcccaatcgagaatacttattccctcattccctacactgaagctgacgaaccagccaaattcaccgaaacgtga

SEQ ID NO: 347682 - DNA, 534 bp, Pseudomonas aeruginosa
atggtcggcctcggcgggcagatccacaactacgagcgggtcgaggcgttcaacacctccctcgggaccatctacaacttcggcccgtcgctgagcttcgactcgttgaccggcgtcgccgagctggcctcggaacacctgcgtggcagcagcctgaagtacaccgcctacgacggcagcacccgctactacgccgggcgcggcaacagctcgtacgtttccggcggcgaccgtggcgaccaggtgaaccgcaacgcctacggctacaccctgctgctcagcggcacctggaacgacgtgttcgccggggtcaacgtgtcgccctacgtggtctacaaggacgacttcgaaggcaactcctaccagaccggcaacttcatcgaaggtcgcaaggcctacaccctggggatcaaggccacctacctgaacagcctggaaggcgaactgcagtacaccgagttctacggcggcgggcagaacaacaacatccgcgaccgcgacaacatcggcctgaccgtgaagtactccttctga

SEQ ID NO: 347683 - DNA, 1638 bp, Pseudomonas aeruginosa
gtgagcttggaagggcaactcctcgaccagaagtccttgcgggccgtgaccggcaagacggcagactggaacgaaatcgccaaggattgcattgcctttgccaatgcaactggtggtcgtcttctgctggggatcgaggatggtcagagcgagcctccagccgatcagcgcattcccccagacctgcctgacacactacgtcgcaaactggcagagcgcacagtcaacgtgacggtgttgccggatatcgtcaccgcccctaatggcggccaatacatcgagttgcgcattccgcgatccatggcagtcgcatccaccacggatggccgctacttcctgcgcgtagccgatcaaagcaagccggtgacgggcgatgacgtgatgcgtctggccaacgagcgttccgccttgccgtgggaaacgcaatccaccctgcatgttccccgtaccgagagtgatgccgccaaacgccacaagctgctcgcagccttgcgtgcatcggatcgcgtcaagccttccgtgaaggagaagtccgacgacgaactgctcgatcactatcagctcgcacaaggaccgaacctcaccaacctgggcgtgctctgtctggggcgtcagcatcatcgcgctcaactgaccaccgctccggtcatccagttcatcaagtacgacgagcacggacagaaggtcaacaagctggtctgggacgaccacacgcaaagcccgatggaattgatcgaagcggtctggcaggaggtgcctgacttccgcgagcgctacgagcttcctgatggcctgtaccgtcagaatgtgcccgctttcgatgagatcgtggtgcgcgaactattggtcaacgcgttggtacaccgcccctacacccagcgcggcgacatcttcctgaacctacattcggaccggctggaagtggtcaaccccggacctttgccgctgggcgtctcgccgcggaacatcctccacaccactgtacgccgtaatgaacacctggcacggctgttccatgacttgaagctgatggagcgggaaggcagcggcttcgacaagatctacgaggttctgctctcgcaaggtcgcccggctcccgaattgatcgagacccacgaccgcgtgcaggtgacggtgcgccgccgcatcctcaagcccgaggtcatcgacctcattgcgaaagcggaccagacctatcagctaacgcagcgtgagcggatcgcattgggtctgttggcgcagcacgatgcgctgacggcacgcgagctggcaacgttgcttgaactgccatcggtagaagcattgcaagcctggctcaagcgcctgctggactggcagttggtgcaaagcgctgggcgtacccaggccacgcgttactttgttgatccaggcctgctgcgcagtctccagttcaccggcgggaccactctcaagcgcatcgagccgcatcgcctggccgcactggtgttggaagacctgcaacgctaccccaggtcggccatcagcgacattcaccagcgcgttggcggcgaaatccatcccaagcaggtcaagcgtgcgctggaagaattgatcaagcgcggggaagtccgctttgaaggccgcaaccgctggcggcggtactgggcggtgacatga

SEQ ID NO: 347684 - DNA, 1560 bp, Pseudomonas aeruginosa
atgacaagcaacgaacaacgcgccgcgctgcagcgcaagatctgggatatcgccaatgacgtgcgcggtgccgtcgatggctgggacttcaagcaatacgtgctcggcaccctgttctaccgcttcatcagcgaaaacttcaccgactacatcaccggcggcgacccgtccgtcaattacgccgccatggcagacgatgaccctaacattgcggccgccaaggatgacgccatcaagaccaagggctatttcatctaccccagccagctcttcgccaacgtggccgccaatgccaacaccaacgaaagcctgaacacggacctggccaacatcttcaaggccatcgaagcgtcggccaacggctacccctccgagcacgacatcaaaggcctgtttgcggatttcgacaccaccagcaaccgcctgggcaacaccgtcaaagacaagaacgagcgcttggccaaggtgctcaaacgtgtggctgagctggatttcggcggcttcgacgccagccacatcgacctgttcggcgacgcctacgagttcctgatttccaactacgcggccaatgcggggaaatcaggcggcgagttcttcaccccgcagcaggtctccaagttgattgcccggttggcgatgcatgggcaatccagcatcaacaagatctacgacccggcctgcggttctggctcgttgctgctgcaagccaagaagcagtttgacgatcacatcatcgaagacggcttctttgggcaggaaatcaaccacaccacgtacaacctggcgcggatgaacatgttcctgcacaacatcaactacgacaagttcaacatccagctcggcaacacgctgacagagccgcactttggcgatgaaaagcccttcgacgccatcgtctccaacccgccgtattcagtgaaatggatcggcagcgacgacccgacgctgatcaacgacgaacgcttcgccccggccggtgtgcttgcgcccaagtccaaggccgactttgcctttgtgctgcacgcgctcagctacctttccagcaaggggcgcgccgccatcgtctgcttccccggcatcttttaccggggcggtgccgagcagaaaatccgccagtatctggtggataacaactacgtcgaaaccgtgatatcgctggcgcccaacctgttctacggcaccaccatcgccgtgaacatcctggtgctgtccaagcacaagaccgataccgacatccagttcatcgacgccagcgacttgttcaagaagggcaccaataacaacctgctgctggatgcgcatatcgaccagatcatggcggtgttcgacagcaaggaaaccgtcgaccacttcgccaggtcggtgccgttggaagatgtggctgccaacaactacaacctgtcggtcagcagctacgtggaagccaaagacaaccgcgaggtggtggacatcgcccagctcaatgccgaactgaaaaccaccgttgcccggatcgaccaactgcgcaaggacattgatgccattgtggcggagattgaaggcggggagttggaggtatga

SEQ ID NO: 347685 - DNA, 1161 bp, Pseudomonas aeruginosa
atgagcggtgtgagttttctggaaaagctgctggatggggaggcagtggagtggaaagagctgggggatgtcatcagattagaaaaaggccgccagctaaataaagaactgctttgtgaaaacggaccttacccggcctataacggaggggtaacgcattccgggtttaccgacacattcaattactcagaaaacaaaaccataataagtcagggtggcgcgtctgctggttttgttaatttcgtcacatccaagttttatgccaatgcgcactgctatgtagtgctaccaaatactgaggcagttgagaaccgatatgtttaccatctcttaaaactcaatcaggtgcgtctggccggtaagcaacacggtgcgggcatacccgcattgcgacccagtgagattttagaaatccccattcccatcccctgcccggacaaccccaaaaaatcgcttgaaatccaggccgaaatcgttcgcatactggacagcttcaccgagctgaccgccgagctgaccgccgagctgaccgccgagctgaccgcccgcaagaaacaatacaactactatcgcgacaagttgttgagttttgaagaaggggaagtggagtggaaggcgctgggggatctcgcagagaacctcgactcaatgcgaaggccaatcactagcgggctaagagagccaggtgatatcccatattacggagcctcgggaatcgttgactatgtcaaagactatatctttgattgcgaccttctacttgtttccgaagatggagcgaatctattagcacgaaacacgccaatcgcatttggtattagcggaaagagctgggtgaataatcatgctcacgtactgaaattcaaaacatctgtcgagcgaaagtacgttgaatactatttgaatagcatcgacttgacgccttatatctcaggagcagctcagccaaagctaaataagaagagtcttgaaagtattcgcatcccgaatccacctccagaagataagaagcgaatcgttgacatcttggataaattcgacgccttgactggctccatcagcgacggcttaccccgcgaaattgagttgcgtcagaagcaatatgagcattaccgcaatctgcttctgaacttcccgaaaccagaggctgcgggggaataa

SEQ ID NO: 347686 - DNA, 1317 bp, Pseudomonas aeruginosa
gtgagcaaaacactgaaagaaatcgccaagaagctaatcgacaccaataagaaagtgcaactgatctatgcgtttaatggatcgggaaaaacacggctgtcccgtacgttcaaagagcttgtagccccgaagaataatgggcagcagaacgatgatgaagcagcccccgcgcgcaataagatactttactatagcgcctttaccgaagacttgttttactgggataacgacttggaggctgactccgagccaaagctgaaaattcaaccgaatactttcacggactggctcattaccttactcaaagagctgggtgaagatggaaatattgtttctaacttccagcgatatacgggtagcaatgccaatcccatcttcaatgaggaatacaagaggaaagccaaggactttaatgggaaagaggtagagattaccattccagccttcacggaaattgtttttcaggtggcgtccagtgttcctgagagagatgaatctaccgctgattctgcaaatgacgagcaccatacagcccaagggcactacaaggctataaagatatccaggggcgaagagagtaattttatctggagcgttttcttcactcttctccagcaagttgtatcgacattggatgaacccaacgtgggtgacagagtcactgacaaattcaacaaccttgagtatgtctttattgatgacccggtgtcgtccttggatgatagtcatctcattgcacttgcagtcgatttggctggattgataaagcgcagttctttcaccgatggcaaggggctgaagtttgttgtaacgacacacagtcctctcttctacaatgttctgcacaacgagttcaacaatgatttgaagagggtaaatcaggaaggtaattcctcatgggtttacaagcgtggtcaatccgaaaaatatcttctaaaaaagaaggcggatgggggatttgatctgcactcatcaaatgaccaccccttttcttaccacctgttcctgctggccgaactacgatgcgcggttagagatggacagataaaaaaatatcacttcaattttttgagaaatatactcgaaaagactgcgacattccttggctatccacgatgggaagatttgcttgagaagactgcggatggtgtcccggatccattcgtaagcagaatcctgaatttttctagtcattctgcgcacgcaggtgaagaagtggctgagatcgaagactctgataaggaaaggcttgctgaactggtttcatttttgagcgaaacctaccgcttcaatgagcaagaggccaagaatgcttga

SEQ ID NO: 347687 - DNA, 3099 bp, Pseudomonas aeruginosa
atgcttgattacaaggccatcgccgaatccaataatttcattgttctggacaagtacacccgggagtggaaggttgccgagcactaccagagcgaaagcgacctggaacgggagctgatccaggatctggtcaatcagggctacgagttcgcctcgtccatcaagacgcccgaagccttgctggccaacgtgcgtgtgcaactgcaggcgctcaacgccgttcagttcaccgagggcgaatggctgcgcttcgtggaaacctggctggacaagcccagcgagggcatcgttgaaaagacccgcaaggttcacgacgactacatccacgactttatctttgacgatggacgcatccagaacatctacctgctggacaagaagaacatcgcccgcaacaaggtgcaggtgatcaagcagttcgagcagacgggcagtcatgccaaccgctatgacgtgacgattctggtcaatggtctgccgctggtgcaggtggagctgaagaagcgcggcgtggcgatccgggaagccttcaaccaggtgcatcgctacagcaaggagagcttcaacagcgagcattccttgttcaggtatctgcagctgttcgtgatctccaacggcaccgacacccgttactttgccaataccacgcagcgcaacaagaacagtttcgacttcaccatgaactgggcgaaggcggacaacacgctgatcaaggacctgaacgacttcacggccaccttcttccagaagcacaccttgctcaatgtgctgctgcattactcggtgttcgatgtcagcaatacgctgctggtgatgcggccttaccagatcgccgccacggaacgcattctgtggaagatcaagagcagctatcaggccaggaactggagcaacacggaaagcggcggctatatctggcacaccaccggcagcggcaagaccttgaccagcttcaaggcagcgcgcctggccacggagctggacttcatcgataaggtgttcttcgtggtggaccgcaaggatctggactaccagaccatgaaggaataccagcgcttctcgccggacagcgtcaacggctcggacagcacggcgggcctgaagcgcaacctggacaaggacgacaacaagatcgtcgtcaccaccatccagaagctcaacaacctgatgaagagcgagccggacttgcccatctacggcaagcaggtggtgttcatctttgatgagtgccaccgcagccagtttggcgaggcccagaagaacctgaagaagaagttcaagaagttctaccagttcggtttcaccggcacgcccattttcccgcagaacgcactgggcgccgaaaccacggccagcgtgtttggccgtgagctgcacgcgtacgtgatcactgatgcgatccgcgacgagaaggtgctcaagttcaaggtggactacaacgatgtgcgcccgcaattcaaggccatcgagaccgaacaggacgagaagaagctgagtgcggcggagaaccggcaagccctgctgcacccggatcgcatccgcgagattacccggtacatcctgaacaacttccggcagaagacccaccgcctgcaaccgggcaacaagggcttcaatgccatgttcgccgtcagcagcgtggatgcggccaagctgtattacgagtgtttccgggaactgcagaagagcagcgacaagccgctgaaggtggccaccatcttctcgtttgctgccaacgaggagcaggatgcgattggcgatatccaggacgagagctttgatgtgtcggccatgaacagcagcgccaaggagttcctgagcgcggccatcgccgactacaacgcgctgttcaagaccaacttcagtgtggacagcaatggcttccagaactattaccgcgacctggccaagcgcgtcaaagaacaggatgtcgatctgctgattgtggtcggcatgttcctcaccggttttgatgcccccacgctcaacacgctttttgtcgacaagaacctgcgctaccacgggctgatgcaggcctattcgcgcaccaaccgcatttatgacgccaccaagaccttcggcaacatcgtcaccttccgagacctggagcaggccaccatcgatgccatcaccctgtttggtgacaagaacaccaggaacgtggtgctggagaaaagctacaaggagtacatggaaggcttcaccgatgcggccaccggtgaggcgcgtcggggcttcatggatgtggtgcgggaactggaagcacgcttccccgaccctgccgccattgagaaggaggcggacaagaaggccttcgtcaaactgttcggcgagtacttgcgcgtcgaaaacgtgctgcagaactatgacgaatttgccagtttgaaggcgttgcagggcgtcgatctgacggaccctgccgcagtagaggcgttcaaggccaagcactacctgggcgatgaagatctgaccgcgctgcaggccatcacgcttccgtccgagcggaagattcaggactatcgctcgacctacaacgacgtacgtgactggctgcgccgccagaaagcaggggccgagaaagaaaaatccaccatcgactgggatgacgtggtctttgaggtggacctattgaagtctcaggaaatcaacctggactacatcctggaactgattttcgagcacaacaagaagaccaaaagcaagtctgagctggtggatgaagtgcggcgtgtgattcgcgccagcctgggcaaccgcgcgaaagaaagtctggtggtggacttcatcaaccagaccgatttggaccagatcggcgacaaggccagcgtaattgaggccttcttcactttcgctcaagcggaacagcagcgagaggctgcagagctgattagcgacgagggcctgaacgcagaagccgccaaacgctatatcaccaactcactgaagcgcgagttcgccaccgagaatggcacggagctcaatgcggttctgcctaagatgagcccattgaacccgcaattcctgaccaagaagcagactgtcttccagaagatcgctgcctttgttgagaagttcaagggtgtaggcgggcaactataa

SEQ ID NO: 347688 - DNA, 1737 bp, Pseudomonas aeruginosa; identical to SEQ ID NO: 225743

SEQ ID NO: 347689 - DNA, 1527 bp, Pseudomonas aeruginosa
gtgaagaaagccaaaaggcttcttcagcgcatcaatctgttgcgagttgttcaactcgggggcgaagcggcggcaacgatcgccacaggcattccgattggcttgattggacgtgcgctcgcaaagtttggcttgagcgacgaacagggagaggctggcgacgaccgggccgagaaggatgaggattggggggtactgaagcctgccgagccggtctctctaccaggcgaaattcaggcatttcgagacgcacttgaggagcttctggaggagctgaagattacccttgtcgtgttcgtggacgaccttgatcgttgtctcccgcagacggccatttcgacacttgagtccattcgcctgctgctgttcctgaaacgcagtgcgtttgttgtcgctgccgacaacgagttcatccgaggtgctgtgcgagtgcactttgcggggacgggcatcagcgatgaggttgcgacgaactacttcgacaagcttatccaggtcccgctgcatgtgccaaggctaggggtgaacgaggcaaaggcctacctggcgttgttgctgctggagcgggccgttgctgacggccagttcgtcgatggtcagttcactcgcgcggttcaggccgtcgctgaacgcctcaagaccagttggcgcggtgatgcggtgacgctggaatttttgaagggcctcatcaaccctcagaacgctcacttggtcgagctgatggaattggccgaggggttggcaccgctgctcacgagttcgagcaaggtaaacgccaatccgcgcctgatgaagcggttcctcaacactgtctttctccggtcagccttggccaagcctcaggggattgaattggacctcaaggctttggccaaatggcacctgttggagcgctgcgacgaagccttggcaaacgcacttgcaggccgggtcacttccgcgacggaaggacgtgttgatgccattcgactggctgaacaggccgcccgagaaggtggagccttgcctgagcccttcaaggatgagttcttccatagggagtggcttgggcttgcgcctgcgctcggcgaaatggacctgcgcccattgctccacctgagcagggactccgcgatgcgggacttcggtgacgacagcttgacgaccgaaggccgtgctttgcgggatgcgctgatggttgcgaccagcgcaaatgagccgctgacacaggcaattcgagcagctggaatgagtcaggctgacgcggtaatggccaaggtgtggcagctgaagtcaccaaagcgaaactggcgacaaaccgaagatgttgtgccattgctggaaatctccaagatctttcctgaccttggtgcaaaggccgccgcgttgctggcccaggcgcccatcaaggaggtcggtccagggctcgtccctctcctttatgagcagacgtgggctcgccctgtgctcgatcagtggcatgcctccggtgatgcttccagaccggtcaagcaagccattgaacaagccaggaaaggagcgcgctga

SEQ ID NO: 347690 - DNA, 864 bp, Pseudomonas aeruginosa
atgggaacgtcaacatcaagcaaaggtggtggctcccgctccccatttgatcctgagtggctgtcgccgcccgaaggcggcaatggcggagacagtcctgcgcctggtgatggcgaaggccctcctacagctgatgccaacgacgccaacgctgacgggcagggcgacgcggctggcggtgaagaaggtgatgtgaccgggcctgcactagcacctgatcgccgttttgcacccgcacgttctggcatgtcggcattccttggtggcggggggcgcgaagctttgcgcagtgcgaccaagagcatggtcagcaagggaatgggcggcccgcgacgagcagcggccaccatgagagcgacggctcagggggccggccaactggggcaatttcttgcgtccgcacgggatgccacggacccacgagttgtcgactgggtccatcgggttcgcgcccagaacctttcagcaaacgacctcgtcctggaggtggtcaaagaagttcttccgaacacaggaagtgtcgacgaagaatccattcggaacgctgcggcagaagcgcttggtcagctgtatgaggtagcccctgaagtcgacatcttcaatctgacagatgcacaaatcggcgacctcatcggctacatcgtcgccaacgacctatgtaatcgcgttgacctgcaactgggtcaaacatacgagaagcttaagttcgacgcgcggcaaatccagctgtatcggaacgacatcaaggaatatgtcaacgcgcaagtcaaggtggttcttgaccgacaaggaccacgcgggattgaccatcaacgacttgccagtgaagtcttggcctcaacccttgaggtatttgtcgaatga

SEQ ID NO: 347691 - DNA, 1263 bp, Pseudomonas aeruginosa
atgaaagttctatgtacaacacctgacttcttgcctgcgcgcctcgatgctggagaactcgcatttacctacttcaagagcgcccgacgccctggggttggcaccatcgcgaaaggatggcgaggttcgttgaagcggcgcgggttcgcaccgagcgctcaggtctgggacttcgttcagttctgcctagcagtttgcgccgccgacttggcctgtcttcgaagcacgagtgcggatggctggacgcgcgtgattgagctcactgtcggcctgcatgagccactgcgctggctgcctttccaagaacaacttgaagcacttctcaaggttctcactggcgactactggaagctccatttcgtagctggcggagcaacgccaccggatggcaggcccgtcgcgactgcgcacgactgcgtgtccctgctatcaggcggcctcgatagcctcatcggggggatagacctcgttgcacaaggtcgccgcccgatgtttgtgtcgcagctggcccatgaggattctcagcgtcagaggaattacgcagcgcagcttggcggggtggggtctcactggcaatggagccatggcatcagctttagcggccaacgtgagacttcaacgcgcgctcggtctctggccttttacgcgttcgcggtgctggctgcctcgcgggttgccgccgatcctgtccaggtgtttgttccagaaaatggattcatttgcatcaatccgcctttggtgccaggacgcgtctctagtttgagcacccggaccacgcacccgcagttcatcgcaatgttgcagagcgtgttggacggattggatgtgcctgttcggcttgaacttccctatcagttcaaaaccaaaggccagatgctcaacgagtgtctcaaccagcctctgcttcagcagttggcggcggactccacgagttgcggccgttttcgcacctacaaccgaaagcactgcggccggtgtgttccttgcatgattcgcaaagccgcttttgtcgcctgggaccctgcccgcgatacaaccgagtacgtacaccgctcgttggccgacgcggacaagactagcggacctgatgacgcgatggctgcagcccttgccgtactcacggcccggcagaagggcttggaccgattcctgggggcctctctggcatttgccgagcccgctgccagattggcatacaggaacgtacttgctaatgggctgaatgagcttgaagccttgctacagagggatggcgtactgtga

SEQ ID NO: 347692 - DNA, 738 bp, Pseudomonas aeruginosa
atggatttccactgccaccttgacctctatccgaacgctcgcgaggtattcaaggaagctgcgcaaaagaatgaattcacatggctggtgactaccagcccaaaggcctttgttgcgactgcgcgtgtgcttaccggcgcagcgaatgtgctcgtcaccccaggacttcatccagagattgcgcacgagcgtgccggcgagctcgaccttctgttgacgcaaatgggcgatgtcacagccgttggcgaagtgggccttgatggctcgtctcgctaccgcaagagctacgatgttcagcgcggcctatttgaggccatcattgaacgtagctcggcactgggcggtcgtgtgctcagcattcattcacgccaagctgtaaatgacgtactggctgttttggatcgacatgccagatttggaaccgcagtaatgcactggttcacagggacggtgaaggagctgcgagctgcggaagagcgtggctgctggttcagcatcgggccggcggcatttgcatcgagtagtggccgggctttggcggcgaagctaccgcggcactttgttgttcccgaaagtgacggcccgtttgcacaggtcgatgacaagccagttccaccctggagcgcagacctcacagctaggcacctaggacaagcatggggcatttccacccaggaagcagcaattttgctgagcgaaaactctcatcgtcttttgagactaatacggcaatactaa

SEQ ID NO: 347693 - DNA, 768 bp, Pseudomonas aeruginosa
gtgaagtcagtagaacacagtgagtacctgcccgacacggaggcaggacgctcactattcagggagcgcctgattgcaaaaattcagcaacatcgcgatttcaaggcgctgccacaagaaactcagtcgagcttctttgaggaattagctgaactcaccctcttcggcaccaacaactgttcggtggagacacatagccctaggatacgcaagctcgaaaaactggccgatagttatcgccgggttgccaatagcattgcactgctttcggaaatagatgaactgctgctcgatgatgcctttcaacacagcatgcctttgcaacagcaaaagaaactgatgcggcagctggctgctgatattaatggcctgataggcgctatgcgtcagacgcccgctggcacatctgagcggtttttgctacgactgcagggcgcgagctttctgaagaaattggaaaagctgggagtcgcctgcaagatcaacaatgattttcagaaaatcgaccaagatgatgtgtcgcaccgcgaggaaagcgagggcgtgcaacactttctgccggatctttcgcaaagtatgactcttgccatgctctgtaccatgctgactatcctcaacaatggccagatcgttgaatggagctattgccgaaggctgctaaaggaaggcaaaaaagcgcttgcttttgaacgtcgactcgctgaatcactaccaagatcagacgagttattagtgttaaaaaaccaaattctccaacatggccagtga

SEQ ID NO: 347694 - DNA, 2208 bp, Pseudomonas aeruginosa
atgggcgctaaaccgaaggcacagacggtcgggttccgctactacttcgacatccatttcgccctgggcaagaaagtcgatgaagtttgtgcaatccgggcgagtggcaaaaccgcgtggaaagggtcgatcaccagcaacggacaggtccgcatcaatgcgcctgagctgttcggtggtgacaagggcgaaggtgggctcgatgggacgctggatgtcctgttcggtgaagaggaccagggcgtcctgccgcgcctggcggcgatgctcggcggcctggtgccggcgttccggggcgttaccacgtgcttctattccggcctggttacctcggttaactggtacccgaaaaagtgggagattttgcgtcgaggcgggaaccggctgtgggacggcaacccctggtatcccgaaaagcaatttatctggctcgcggacggtcagatcaaggcgatgaacccggcacacatcctttatctcgtctacaccggccgggacttccggggactggctcgcacgcggatggacgaggcgagctggcgggccgctgccgacaagctgtatgccgagagtttcgggctgtgctttgaatggaccaggtccgacacgttcgccaacttctgtgagacggtgaaatcgcatatcggagccgaggtctacccgaaccgccagactgggcagatcagcatccggctcctgcgtgacgactacaacgtcgcggacctgccgctgttcgacgaagacagcggcctcctggagatcacccaggagaagaccggctcgacctccctcgcgccgagccagcttatcgtcaagtacatcgaccagatcgacggggcgcagcgccaaatcatcgtcaacaacaacgcgatcgctgcgtcgcaggggcggcgctcgtctgaggaaatcgagttcctgggcttgccgaccggcgagctggccgggcgagtcggtgagcgggaaatgcgtctgaagacaaccggcctgaagcgctataaaggcgtattcgaccgccgcgcccgtagcctgaaccctggtcagccgttccgcatccgttcgacccggcgcggcatccccgaaaccgtcgtccgggtcggccggatcgaggacaacttcctcggcgacggcaagatcaccctgaccgtcgtccaggatcagttcaatctgcctgcgacaactggcgtggcgccgccgccaccgggctggattccgccagaccggacgcctcgggcgatcactgtgcgccgcctgatggaggcaccctatcgcgaactggccggggtgatcgatccggccaacttgcagctcctggacgtgtccgcgtcgtaccttgccgcactggccgaggcgccgaccagcctgtcgcagagctacaccctgaccgaccgcgttggcagctctggcgcgttcgttgatcgcggaaccggcgactggtgcccgaccggcctactcgccgccgagctgccgctggcggccggtccgaacgtcgtcacgttgacgaacgccagccggctggaggacgtcactgtcggtcaggcggccgtggtggatgacgagatagtccgcgtcgatgcggtcaactacgccagcggcactgtcaccctggcgcgcggctgcgccgataccgtaccagccaagcatctggctggggctcgggtctggttctacgacacgttcgaggcggtggacgagacggtctacagccagggcgtgacgctccaggcccggctgctgacgaacaccagcgagggccagttggccccggcgctggccgccactgacagcctcacgctgaccgggcgccagggtaagccgtatccgcccggccagttccgcatcaacggcagcgcgtacccaacgaaagtctacggggcgctgtcggtgagctgggcgaagcgcgaccggatcggccaggccgaccagttgatcgataccacggtcggcaacatcggacccgaagatggggcgacggttacgctcctggtctacagcggcacgacgctgaagcgcacctacgccggcctcaacaccagcagttggtcctatccactcgccgaggacatggcggatggcccgctccaggacgtgcgcctggttctgcgcagcgtccgcgacggcatcaattcttggcagcagcacgacatcacgattgaacgccacggcctcggtttccggctgggcgacgaactaggaggcgtttccgcatga

SEQ ID NO: 347695 - DNA, 660 bp, Pseudomonas aeruginosa
atgaccgagcctgccgtcctgcccgccatcgcggcgctgcgggaagagatggttaccttgcgccgccatatccatgcccacccggagttgggtttcgaggaacggcgaaccgccgcgctggtcgccgaatgcctggaggcctggggctaccaggtcagccgtggggtgggtcgcaccggcgtggtcggcaccctgtgccgcggcgagggcccagcgctgggcctgcgcgccgacatggacgcgctgccgatccaggaagccaccggcctgccctacgccagccaggtggacggcgtgatgcacgcctgcggccacgacggccacaccgcgatgctcctcgccgcggccaggcacctggtcgagtcgccgcactggcgcggcaccctgcaactgatcttccagcctgccgaagagggcctcggcggtgcccgcgcgatgctcgacgacgggctgctggagcgcttcccctgcgacgccatcttcgccatgcacaacgtcccgggataccccgtcggccacctcggcttccatcccggccccttcatggcctcggccgataccgtggtcatccgcgtgatcggcagtggcggccacggcgcggtgccgcagcgcaccgtcgacccggtggtggtctgctccgccatcgtgctggccttgtag

SEQ ID NO: 347696 - DNA, 426 bp, Pseudomonas aeruginosa
atggccgcgggggctgcggccggggccggcgtcgacctgctggtcggcggcgtcaccctgggggccgcggcgctgctcggcgcgctggtcggcggcggcgcacagaccgcgcgccactacggcaatcgcctgctgggcaagctcaagggccagcgcgagctgaccgtcgacgacgccgtgctgcgcctgctcgcgctgcgccagcgccagttgctgcaggccctggccgctcgtggccacgcggcgaccgaggcgatccgcctggacgccgcgcaggacgaaagctggcgccagggcaagctccccgacgcgctgggcaaggcccgcgcccaccccgaatggtcctcgctcaacccgggcgcgcgcctggagcaggccgagcgccaggaacagatcgacgcgctgtcggacggtctgctgaactga

SEQ ID NO: 347697 - DNA, 345 bp, Pseudomonas aeruginosa
gtgcatgccgggctgaacaagggtgaggcccgcaactcactggccagggcggtgttcttcaaccgcttgggcgaaatcagggatcggagcttcgagcagcagcgctaccgggccagcggcctcaacctggtgacggccgccatcgtgctgtggaacacggtgtacctggagcgcgccacccaggcgatgggcgacacgggcaagccggtggacggcgagctgctgcaatacctgtcgccgcttggctgggagcacatcaacctgaccggcgattacgtctggcggcagagccgcaggctggaggacgggaagttccggccgctacggctgcccggaaaaccttag

SEQ ID NO: 347698 - DNA, 252 bp, Pseudomonas aeruginosa
atgcccgccagcaggcgtaaggccattccgatcgattcgctgctgcaactgcggcagcgcctggatcacttgccgaagaagagcccggagcgggcccgtcaggtggcccttgtagctgaactgtacggcgtttcctccagtacggtctatcgtgccctggctctcctgcacagacctcggcagcccaccgctccgaccagggcaagcctcgcgtcctgccccaggcggaactggagcgctactgcgaactga

SEQ ID NO: 347699 - DNA, 1344 bp, Pseudomonas aeruginosa
gtgagtgttctggaactcacgccgccgcactccgtcgaggcggagcaaggggtactcggtggcctgatgctggacaacgcggcatgggacattgtcggcgatcacctgcagaaggaggacttcttccggcatgaacatcggctgatcttcaccgccatcagcgagttggccgcgaaggacgccccgtttgacgtcgtgacggtgtcggaagcgatcgaagaccttccagaagccggcgggctggcctacctcggccagctcgctgacaacacgccctccgtggccaatatcgaggcttacgcgcagatcgttcgcgatcgggcgcacctgcggcagttgatgtctctcgggcatcactgcaccagaaccgcctcgaaccaccaggcgaatccctgtgaggttcaggaggagatcgagcagaagctgttcgccctcggccaagatcagcacaagtccgactttgtcgatatcaacaagggcctcgcgaagatcgtcgacaccatcgattaccgcttcaacaacaacgtgacggtaacgggggtcccgacaggcctgaaggatctcgacgagctctccggcggactacagaagtcggatctcatcatcgtcggtgcccgtccctcgatgggcaaaacgtcgtttgccctcaacttgatcgacgccgcgctacagagcgaccaacagaagtctgtccaggtttacagcatggaaatgccagcagagcagctgctgttcaggcttgctgccctgctcggccacctggaccttggcaagctgatgaagggccaactgcaagaagaggattggcccaggctgaccgtcgcgatccagcgcataaacgactatggcagccgactggtcatcaacgaccagggcaacctgacgccgactgagctgcgcgccaaggttcgccgtgcagccaggaagtacggccaccccgtactgatcctggtcgactacctgcagctgatgcgctgcccaggcctggaaaaccgagccaccgagatctcggaaatctcccgctcgctgaaagcactggccaaggaaatggattgccccgtcgtggccctgtcccagctcaatcgcagcctggagaaccggccgaacaagcgaccgaacaacgcagacctgcgtgagagcggcgcgatcgagcaggacgcggacgtgatcatgttcgtgtaccgcgacgaggtctaccaccccaacaccgaggccaagggcatcgccgaaatcatcatcggcaagtaccgcaacggccctatcggcaccgtccacaccgccttcatcgccaaccagacccgcttcgccgaccttgcaccaacttggcagggagctcttgcatga

SEQ ID NO: 347700 - DNA, 1626 bp, Pseudomonas aeruginosa
atggtgctgacactcgaccaggtcctcccctggcacgataacccccggaccactcgaaacccgaaatacgatgagctgaaagaatcgatccggcatcgaggtctcgatacgccgccaccagtaactcgacgccctggcgaagacaaataccgcattcgcaacggcggaaacactcgcctggaaattctcaacgagctctacaaagagaccggcgacgagcgttacttccgtttcaactgcctgttcaggccctgggacaagcagcgcggcgaaatcatcgcgctgaccggtcacttggccgaaaacgatttgaagggtgacctcaagttcattgagcgagctatcggagtaaaaaaagcgaaagtcctttatgagcaggaaagcggcggtgaaaacatttcccagcgtgagctggcacgtcggctaaaagcggatggctacccagtatctcagtcccacataagcaaaatgctggataccgttgaggtcctgcttccagccattccaagcatgctgtactcgggcctgggagttgatcgtgtctctcgcattctctcactacgaaaggcttccctgggctgctggaaacgcctttactccggcgagggtatcgacttcgagatgctgttccaggacaccctggcgatcttcgacagtagccctgacgagttcattttcgagcgtttccaggacgaactcatcgaccagatgaagcgtcccttgggccttcgctatgatcaaatcctgctcgagatcaccaacggccagcaggagcagcgccgcggcactctggtcgacctgcccgcacctgccgcaccacctggaatcccagccgtagggcaggaaaatcctgctgcgtcgactactggacaagcacaatcacagagccccgctgccggcctccaaacgtccaagaccaatagcctcccgggtaatccctctaccccgccagctccgccactacctgtacaacagcagcaactgaccgacgaggagcgtgctgaactcttggcaggtcatatcgtgagcccggtatccaccaagattcagcagactcgccaacggctggccgctctcgagggtgaacatctacctgtcttcgaggaaacagctctgcaggcaatcccggtgcaagtcggcggcctgcacccgatcaccgacctctggtacatcgagcggtcgatcgacacccccgaaatcctgcgacagcacatcgctgacttggtggaagaaattgcctttatcgtcggcgcccccggaacgatcgagaggattcaaggtggtgtgggctactcgtaccgggagccagcagaagattgcgaactttctgaggcagccctgcacctgatcaccttgtttcagtctctcagtggccaggtccaggtaatcctggacaaggtcgactcgcaaacttgtcgtgatgctctgggtgaattccagttctcagctggcctcgctcagttgctgctgggccaacccaccacaggcgatcagccatccagccaggcaggccgtcttaatgacgaagccctggtgaaactgttccggatcattcgtcttgcccggcgcctggttgaccttgagctgccgccggccacctccgagcaagcagctaccgaccagtga

SEQ ID NO: 347701 - DNA, 297 bp, Pseudomonas aeruginosa; identical to SEQ ID NO: 324251

SEQ ID NO: 347702 - DNA, 1332 bp, Pseudomonas aeruginosa
atgacaatgaggctgtcgcgctttcccatttcgactctgctggactcggcctcgggacatctcgaggcccacttgtttaagaagcggcttgatgccgagagcggcgaaccgctggctcaacaatattccggcatcattttcagcggtaacccgcatgaaaccgttcctcggcgcctgctgctggataaacgcctcaccccgctggagcggaactgctggcaagtgttccgcttgctcatcaacgacgacggactgaccgcgttccctacatacgagcaactacgcccttatctcggcatgcagccgggtaagatcgcctcgcgcgaaaccatcgccaaggcactcaaggtccttcggttgacacgctggctcagtctcggccgtcgcctgcgcaacgacctcaacgggcaagtacagggcaacgtctacatcctccacgacgaaccggtatccccggcagaagccctggagctggaccccgactacatgcagttgctgagccagtccaccggcgacagcaaccgagccatacgcgaaatcggccaggtcacatggcgggagttcagggatgacccggacgtgggtcgccgcctcccaacccatctggagaagctcgagggacgcttgaaccaccagcaatgggctattgatagtcagctcgaagcggatccagcggcagagttcggcatccgaactctgcccgatctacctcattcaaccctgagttcggatgccgaactcagtgaaatcagcggcaagcaatgcgctttaccgctgagttcggatgccgaacccagacagaatccgccgagtacgcccttggttcggatgccgaactcatatagtacgtatacatacaaacaaggttctgtatgtaaaaagccagtacaaccgcgaacacgcgaggaagcacatccgaactggcagggcctcttgcacacactggaggccgagcaacggatccaagccgtaagcgcgctccgacgggtgtccgaggatcttcggcaacccatcatcgagcaatggcagcaccgatgtgccggcggaaccgtcggtaatccgttcggctacctcatgacgctcatccagcgtgcagtccagggcaagttcaacgcctcttgggctccagaggaaccggctgaacgaaccatcccagcagcggaacgccccagtcgtgctctggcaccaccaagccccacaacgcctacacagcctcagcttcagccgaagggggatacccggacagggaacgaggtcctcagccggctcaaggacctcattcggcccaggcacggatcgagcgtgccatccgagcggggtgatgagccatga

SEQ ID NO: 347703 - DNA, 576 bp, Pseudomonas aeruginosa
atggtcaacaaagcgggcggcgccggcgtgcaggtgacggcctacacccagaccatgagcgacatcgaggccaagatcggctcccgcgcgaaggccggtcagatcatcggcaacttcaacaacctgttcatgctgcgggtgcgcgagaccgccacggccgaactcttgaccaaccagctccccaaggtccagatctacaccagcacaccggcgagcggcgccaacgacgcgatcaacaacaagaaggcagccttcacctccagctcgcacgaccaggtgcagatgaccagcgtgccgatgctcgagccggcccacatcgttggtctgcccaaaggacaggcgttcgcgctcctcgagggcggcaatctttggaagatccgaatgccgctgccggcggtcgatcccgacgaggtgatgccgaaaagcctgcaggagctggctgccggtatgcgcaagggccaggccgccaacagcgagtggtgggaggcgccgggatactccgccctgcaggatggtctgccccaggacctggtcgacgatttccgtcacctcggcgccggtgaggatgccgcctga

SEQ ID NO: 347704 - DNA, 156 bp, Pseudomonas aeruginosa
atgaccaggcagttgaccactctcacgctgtgcctgctgctcgccagctgcacgatccacaaggctgagccggcctggcccaccttcgacagcagccgcaatccagacctgctctctctaaatctgtacccgtacggtgtacgtccgaagaagtaa

SEQ ID NO: 347705 - DNA, 579 bp, Pseudomonas aeruginosa
gtgttccgcgtcgtgggtaccgaccgcaaagactaccggggaaggtcctggctcgacttcctcactggcggcaagcgaatgcagcgaaacctgcaggccttgctggacaacccgagctactacctgcagccaacggagcgtaggcccgcgatccactacaacacgctcgatggcttgagcttctacgtcggctccgacggcaaccaccgcacctgtattgctcgattcttcctggccgagcagcagaagagccagctccacgacgtgacgctcaaccactaccaggtcaacgacgccttctaccgcctgtacgggcaactccggcaacaggtcctgctacaagggctgcctgtacaagttcatccggagcgcgtgcagttgggccgggaagatactgctggctggaagatggatacctaccagaccactttgaactggctgaacctcaagactcaggaggaaatatctctgaacgaagcccaggcgcgggagcaactcatcgacctcattcggagaaaaccatctgaagagcaaccgcgaggctggaaggcaaggctgaaatgtctcatctcaggctga

SEQ ID NO: 347706 - DNA, 186 bp, Pseudomonas aeruginosa; identical to SEQ ID NO: 326419

SEQ ID NO: 347707 - DNA, 651 bp, Pseudomonas aeruginosa
atggtgtttctcctgcaggttgagggtgcggagaaaacactggccctggcggggaagtggattccccgctgggttgcggaagggagcttctatcgaccgaggccgaccgaccgcgctaccagaagctatgcggtcttgggttggatcaacacggtgggctgtgctgcagcacttcggatccgagctgcatgggggcatgtcgctgacaacgtcagcagatcacgcgttcatcatcgaagcagggggcgaaagtgtcaaggtcaagcaggaggggagcggatgcaggatacagcgggcggagagcgagggcggaagagcgcggctggtagaaaccctgtcaaaggtttccccagccgtgtctggaaggggagtcaagtgagccacctgtggttgaatcgtcgatccctgggcattgatcgtctcgatcccatcacccggccattatcgtggcttggccagcaaacagtaggcacgcatccgcgtacaaagggagccctgcgtatcaccggcgggccaccggcagggagaaggatcccgatgggtagcctgatggtcctggagcaggagcatcaggctacccatggagaggggaaaaggaggggccgtaacaccagtacgacccttaaatcgaggaaacaccgaacctcttga

SEQ ID NO: 347708 - DNA, 753 bp, Pseudomonas aeruginosa
gtggagctggccgattcgcgtggtgatgtcgccggcgcgctgggcgatgacggccgccgtcttgtagtcgtcggtctggtgcaggaatccgctgcgcggatagaggttcccccacatgtcgccggagaagattccacccacctcgcgcagccctgggatcaacgcttcggggtacacctgctcgggaattccatgccgccagccaatggcgtccagtgtgctgaggaagtagggcaccagcgggaaggtggcgccaggacaaacgtacccagaggcgctggcgaaccggctgaacgtggccccgccaggatggccgatcacatccgcttccttgaagcggccgatgctgttctcggccttgtagttggtggtcgcgtcattgccggcctgggcgaggggattcggtgtgcccagcgccgacacctcggtccaggggttgctcccggtattcgcatagctggagacgactgcgtcaggcacgtagtggcggaccttgaccgacgtcttcaccttgcagccatgtgggccgcagagcagccagtagcagatcccgacgaccttgtattcgaggcactgaggggaaagggtggaggagacgatggcggcgctgttgatcgcggccgcggccgtgaacgagaggctgaaggtggcggccgccgctgccaggcggcggaggttgaggctggtcatcagcgcgtcctcctggccttggcgatcagctcaagagcgcgcggtacgtccggttcgccgtag

SEQ ID NO: 347709 - DNA, 513 bp, Pseudomonas aeruginosa
atgaagcgccgcgggattggtcggccatcctcctacgcctcgatcgtgaagaacatcatcgacaaagggcaggtgcagataaaggggcgaagcctgacccccggcgagctgggcgaggccaccatcgcgctcctggagcacaacttcagcttcctcagcctcgacttcacccgcaacctcgaggtcgccctggaccggatcgccaacagcgaggacacctacatgaacgtggtccagcagttctaccagctcctgcagtcagagctgcagacgctgcgcgcgctccccagcgcacagggcgacccgcgagcaagctctaccgccagcgctccctcggcgccggccagtgacttcctctgcggcaagtgcggtctgcccctggtccaccgaaagaaagccggcaagggcggcttcgacttctggggctgcagcggctaccgcagcgccggctgcaaggtcagctatcccaccaagaacggccaacctgacttcgacaacccgcgcgggctatag

SEQ ID NO: 347710 - DNA, 501 bp, Pseudomonas aeruginosa
atgaagaagatccttgccacgctggcattttgcacggcgttcgcgactcaagcctgggccgccgggctgatcgttgtcgaagacctcggcggcgcctcggcgctcccctactaccagggcctggatccgcagccatccgctgccacaccaggacctggcgacctgggtgtccgtggctcaggtgcgtttccagttcgctcggtacgcctttcgccaggccaggttcaggggcgcgccatcaacgccccaggcctgcaaccgctgttcctggtcggcgacgacacgctgtcacgaacctggctgaaagagcgaggcgacgagctccgaggcctccacgctgtgggcctggcagtgaacgtggccagcgaagcgcgtctgacggaaatccgtgcctgggggaaaggacttcagatattgccggcgcctgcggacgacctggtcgaccggctcggactgcggcactaccccgccctcatcacacccaccgccatccagcagtag

SEQ ID NO: 347711 - DNA, 270 bp, Pseudomonas aeruginosa
atgactactcacctgatcaccctagtcatcaagcagccgagcgacgctcaggcacgccaactcatgtaccaggggttgctcgacctgatctcacgctacggcggtgaggtggcgtccaaggccttagaggacgagtcgaccctctgcgggctgctggagcagatgctgcctgatcatgaggtagagcaagccaggaaacaggtgctcgaacttcatgccaagggccgccgaccgggccgcctgcagccggcggcaagcctgaaggtgtaa

SEQ ID NO: 347712 - DNA, 162 bp, Pseudomonas aeruginosa; identical to SEQ ID NO: 336412

SEQ ID NO: 347713 - DNA, 219 bp, Pseudomonas aeruginosa; identical to SEQ ID NO: 337024

SEQ ID NO: 347714 - DNA, 228 bp, Pseudomonas aeruginosa
atgttcaaacacaaagaagacaccttggaacccgacgaccacgccttgctcaaccctctgcgctgggccgaggtcgtgcgtctgggccaggaaggctgggagctggtgagcgttcagccactcatgcggggcgtaaccgagatcggcaatcaaaacgcccaaggctgggcttggggcgtcgctctgcccgtcagctacctgctgtttttcaagcgcgcaacctcataa

SEQ ID NO: 347715 - DNA, 237 bp, Pseudomonas aeruginosa
atgctcatggtgtgctcctggatcggttcggggaaaaccgcaccgtttcaggggcagggggagggcttcaatcgaaaatacccttactgggtaccgtggatttctgcagtttcgctttactccctattactgaccaccagctccttcagctttctctcgtccacgtaccgctgcatgatcgacagcaccaggctgttgatggcgaggaccttcatcgcgcgggtcactgcgacgtag

SEQ ID NO: 347716 - DNA, 222 bp, Pseudomonas aeruginosa; identical to SEQ ID NO: 346439

SEQ ID NO: 347717 - DNA, 195 bp, Pseudomonas aeruginosa
atgggcttctcgatcaccaccagcaagttgccccaggacgcctgtatcacgctggccaccaagatcgcgaagaacaccttcgagcagaccaagatcaacagcggatccgcgatcactggtgaagtgaccaccgcagccgcgactcaggcctgcagcagcgacagcaacagcattacctggacctacagttcgtga

SEQ ID NO: 347718 - DNA, 204 bp, Pseudomonas aeruginosa
atgatcgagggcggcgtcggcatcggcgtgatcccgcagtccgccgcgcgccgccacagccggacgatgaagctggcgaccatcgaactcgacgagccctgggcgatccgcgagcgcagcctgctggtacgcgacctggaagcactgccgagttgcctgcgggcgttgatcgaggagttgcagagggtgggagacagcctgtag

SEQ ID NO: 347719 - DNA, 1242 bp, Pseudomonas aeruginosa
atgtttttttggcgatcagttctcaaagccttagacaatatgccagcgggccttaagaatacaagtcgtgtatttcgtcaccatagcgccatctcacgtcggcgtattgcgaagtttgacgaaaaagcaaatcttgtcactccgaacgaacgaaagtcgttgctcaatgcggccatcgtagatatccgctacgcattagaatttattcaatttgaatcaggatctgagcctgacattaatctttataactctttagcaaacgcttacttagattttgccaagattgaagctgcgcaaggtgcatctagagatatagttcttgagtatatgcaagcggcaagccaggcaactcgaaaggcatacgaacaaaatccgagcagtccctttgttatggaaacttatgttaagcacttgctggaggaaacatcattagaagctccagataaagcaatcgctcactgcatcgaagtgttgggggtcatattttccgcgctcacatctaatgcgcacactgctcgaaacatgcaatggcaaggccttgccgatgaagcaataaaaaaattatttaacctcacacctctagactccctttcggctgatcccgtaaacagtacagacttactaataaatgcatggaaactcttggccggcggaagcgaaagcggccaattggacttggcgaatgcgagtaccacccaacaaaatgccgcgcttaaaatgttggaccatcctataggaagaggtaacattcaagttttacgattaaagtacgagcttgtatgcattacatctccgtttgatttcaaaaaacaactagagctagttgaggaggtggtcttatctacatatcaagagcctttgcagataaggctagagtatgccattcttttatttcaagaaaatagacctgtcgaagctgataaaatattccgtggcttacggcaactttggagaactactgagcattatgtccaagtgccatcgagactcaggtggctccgtgtaccaggaactgaaaatcttcaagtggtccatgccgtcgcaggatccgattacgagcgtcgcgggctagctactgttaaggaatttgtcaatataggcgtgccttttagggttgaggagttcggatatcggcagctccgccccgggatgcagtttgttgctcaggtatcgtttggacataatggtccgtttttacgtcctgttttggtagcaaactctcaagaagagctcgggatatga

SEQ ID NO: 347720 - DNA, 966 bp, Pseudomonas aeruginosa
atgagcgcatcgccttcctcccgcctgcacctgcaagtcaccgatttccgcgctgttgcgcgcgacgtggtgctggtcgagctggccgccgtggacgacaccgagctgccggccttcacccccggcgcgcatctggagcttcacctgggcaacggcctgatccgccactactccctgctcaacgactgccgcgaacgccagcgctaccaactggcgataggccttggcgacgacagccgtggcggcgcccgcttcatccaccgccaactgcgcacgggcgaccgcctgcacgcggcggcaccgcgcaaccacttcatgctgcgcgaagacgccgcgcgctactgtttcgtcgctggcggcatcggcatcaccccgattctctcgatggttcgctggtgccaggcgcagggcaaggactggcgcctactgtatgcggtccgcgaacgccagcgcgcagccttcctcgccgaactgatgacgctcggtggcgaacggacgcggctgcattgcagcgacgaaggtgacccactcgacagtaccgcgctgatcgccggcctaggtgccgacgaagaactctattgctgcggacccgacgggttgatgcaggccatccgcgacgccgggagcggctgcgcggaacgcctgcacttcgaacgcttcgacgctccagtagcgccggcgtcctcgtccggcggcaccgacgccttccgcctggagttgcgccgcagcgccctgagcctgcgcgtcgaaagccaccagagcatcctcgaagtcctcgaggaacagggcctggagcctccctacgcctgccgcgccgggatatgcaggacctgcgagacacgcgtctgcgccggcgagccggagcacttcgaccatgtgctttccgacaccgagcgggccagcggggaaaccttgctgatctgcgtatcacgctgccgcggcaactacctggaactcgatctctga

SEQ ID NO: 347721 - DNA, 171 bp, Pseudomonas aeruginosa
ttggctgcgctgttggtcatgatcgccaactggcacggcgaccgcggcactctgggttttcacgactatggccggctctggttgctggacggcaatgcgaagggcgcggcggtggaaacgctgctgcgcgatctgtttggcctgaacggcacgccgaagggggctgcatga

SEQ ID NO: 347722 - DNA, 288 bp, Pseudomonas aeruginosa
atgacgaaacgagttctactgaaaggcgagttcttcgcggaatgggatggcacgctggacgaggccgctgcactcgctggcgtccctgtcggcgacttggcgttccacccggatgacgtgctggccgaggtccaggagctgcgccgccaggcctatcgcaccgagtccgacccgctgcgcctggaggccgagtttgacgccatagccgctggtaccgagccggacctggcggcatgggtcgcggccgtgcaggcgatcaaagaacgctatccgctcccccagtcctaa

SEQ ID NO: 347723 - DNA, 375 bp, Pseudomonas aeruginosa
atgaacaatggcgccacgcaaagcctatgcgacctcagcttgagccccttcgctcgggacgtactgacagaacggcagcggcagatccgacaggaaggcttcagccccgaccatgacgccgagcaccgaggcggtgaactggcgcttgctgctacctgctacgccgacgaagccgttacgcagatctgccagccagagcgagagccgtgcctgacgcaactggtgccgggctggtggccgttcgagtcatcgtggtggaaacccagcctggacgctcgaaagaacctggtgaaggccacggcgctgctcctcgcacagggtgacgcgatcgacctgcagattgataccgaactggagggacgtccccatggctga

SEQ ID NO: 347724 - DNA, 201 bp, Pseudomonas aeruginosa
atggctgatgttctggagatcgactgctccgagtgcagcacgccgtaccccgaaatcaccgcgggctctgcagctcatgacccgagcctgatcgagctggtgatcacctgcagcaactgcggacacatcctgaatgcgttcgtctccctggctgagatgagcgttgtaccgaatcccgaagaggaaaactcccatggctga

SEQ ID NO: 347725 - DNA, 618 bp, Pseudomonas aeruginosa
atggctgatactcacatcccggctggctacgtgaagaatgcagcgggccacctggtgcctgagcaccaggtgcgagagcacgacaaactgcgcgaccaggttgcctgcgacctggttgaagaggctctactcctccacgaatctctggctcggttcaaggcgcgtgccttggcagatatcgacgatctgatccggatctgcggtgacaagtacggcgtcacgcttggcgggaagaagggcaacgtctccatcatcacctacgacggacgctacaagatcgagcgagcccacgcggatcgcatcgtcttcagcgaggagattctggcagccaaggaattgatcgatcaatgcatccgcgcctggagcgagggagccaacaaccacctgcggatactggtggatcgcgcttttcgcgccaaccgccaggggcagatcaagaccaacgacgtcctcagcttgctacgtgtggagatcgacgacccggactggaagcgggccatgcaggccctgcgcgattccatccaggtcaacggccaggctgtgtacatccgcgtcttccaacgcgatggcatgactgaccgttatctgccgatcagcctgaatatcgcaggggtgtga

SEQ ID NO: 347726 - DNA, 1305 bp, Pseudomonas aeruginosa
atgtttttcaataaaaacaaacaactgctggacacagaaaataagctctcagaactacagtggcagcttgattcaataaatcgaaatgtcgcggaaatcagattcaggccagacgggagcgtaatctatgcgagcaatatctttctagagatgcttggttacaaactcgaagaaatagcagggcagcaccacagaattttctgcgaaaagaattatgctagcacagctgattattcgcgcttctggcagaaattggctgacggccatcctcaatcaggtttatttaggcggctgcgcaaagacggtaacttagtattgattgaggctacttatattccagttcaaaatcaagatggaaaagttattgaaatcattaagattggctcagatgtcactcagagagaaaacgagttactctcactaagagccgtccatgcagccatctcccgctcgatggcggagatcgagttcacacctaacggtgacatcctgcatgcaaatgagaatttcctccgtgctatgggttatcgcctcagcgatatcaagggtcgacaccaccgaatgttctgtttcgataatttttatcaagaaaatccaaatttttggcagagtttaaagggaggaacttttttaagcgggcaatttgagcgcaagaccgcatcgggagagaccatctatcttgaggccacctacaaccccgtcattgatgaagccggccaggttgtgaaagtgttaaaatttgccaccgacgtcagctcgcagaagcataaggctgatgaaatccgtcaagccgcagagctttccttcaccaccgccgaggagacatctcaaatttccgtgcggggcatggagtcccttgctagttcaattgaattatctcagagcacacttaatttaataaacggtgcggttattttgattacacagctaaatgctcaggctaaagatatcgagaaaattgttaccaccatccaaggcgtggcagaacaaactaacttactagcacttaacgccgcaattgaagctgcccgagcgggtgaaacgggccgaggctttgctgtagtagccgacgaggttcgtcagttggcagctcgaactagcagtgccaccgtggaaatccagaatgtggtaactgctaacggaaagcttactcagcaactgaatatagatatgaacagcatcgctagaagcgccgaagaaaacaacgatcagatcgcaactgtaacaactattatgcgtgaaatcagtgacggtgcagaccatgttgcccgtaccgtatcgacgttgttcaaagacaatagctag

SEQ ID NO: 347727 - DNA, 618 bp, Pseudomonas aeruginosa
atgaagatcactgccgatcagctcgaccgcgctaccggctgcggtgctgctactgcaacgacctgggtcgaacacatcaacggcgccatggcccgattcgagatcaacacgcccgagcgtgtggcgatgtttctcgcccaggtcgggcacgaaagccagagcctcaagcgcctggtggagaatctgaactactccgccgaggggctgctcaagacctggccgaagcggttcgcgccggtagaggctcgccagtatgcccgccagcccgagcgcatcgccaaccgcgtctacgcaaaccggatgggcaacggctcaccggatacgggcgatgggtatcgataccgcggccgtggcctgatcatgattacgggccacgacaactacgccgaagccgcccgcgccctggcgctgccactagtggcgcaaccggagttgctggagcaacggacctgggcagccatcgcagcggggtggttctggcagtcgcgcggtttaaacgatctggccgaccaggggcgctttggaaaaatcaccctccgcataaacggatcgttcaccggggccgaggatcgcaacgcccggctcgaatgggcgcgtgctgcgctcaagggggaatga

SEQ ID NO: 347728 - DNA, 303 bp, Pseudomonas aeruginosa
atgactagcaactactccgatttcatcagccaggaccgccgcctggtgatcctgcgcatccttgcggaaatgccgacctaccaggccaatagctcggtgctgcacaccgtcctcagccagtggggacatgatcccagccgcgaccaggtgaagggcgagttgcgctggctggaggagcagcaactggtgaagatcgaggacgtcagcaacggcgcagtgctggtcgcgaagctgaccgagcgcggcgccgacgtggccgccggccgcgcccgagtggacggcgtgaagcgtccgggagcctga

SEQ ID NO: 347729 - DNA, 321 bp, Pseudomonas aeruginosa
atggacttggacttcgtgctgcgcgccggccagttcgtattcaccgcggcggtgggcctgtactcgctggctgctgcgcgtcgttccagctccaaggccgaggccgagcacctgacgaatcggctctcatcccaggacaaccgacttctcaccctggagcagcagatgctccacctgccggacagccagcagctgtcggagctggccggcgacatgaaagccatgcgcgccgagctgtcggggttggccaaagcgctggaccctttgactcgctcggttgatcgcatcaatgactacctgctcagcgagagacgcccatga

SEQ ID NO: 347730 - DNA, 624 bp, Pseudomonas aeruginosa
atgggcatccttagtctcctgcgctccaactggttctgggttgcgctggttgcagtgctgtacagcgtagctgtagtgatccacggctccgcaagctacgaccgtgggtacgccaccgctcgtgctgaaggcgacgcagcgctgctcaacctgcaactgcagcattccaacgagctggccaagatcgctgaggacaacctcctgcagttccaacagcaggtcactcgcgcgaatcaggcggaagcgcgattcctgtcagcccaggaccagttcactgcccttcagcaacagctatcggagcgtatcgcccatgtctcgactcaataccggccggcaccaggtgcttcccctgtgcctgctcctcgcttcgttgtcacttgcggctggctgcgggactacaaccacgccctcggcgccgatctgccctccccagcagcctgcagaactgccgccagccctcaagaaacggcctggcccgcctccggcgctgacgccgaactactggaaagcggtgtcagcgcggctgacatcctggcccatgcccgcgattacgggaaatggtctctcaccaacctggcgcaactgaatgcgctgctcgatgtaaacgacaaggaaactcactga

SEQ ID NO: 347731 - DNA, 630 bp, Pseudomonas aeruginosa
atgaagcgcctgctcaccctcggcctgctgggcctgctgagcgcctgccagccggccttcgcgacggatcgcatccccactgccgccgagcagtaccggcgcaccctggtgcgcagcgcccatgctgaatggggcctgtcggcaccgatcgccacctttgccgcacaggttcaccaagaaagccgttggcgtgctgatgcccgctcgcctgttggtgcccagggtctggcgcagttcatgcccggaaccgcggagtggatcgccggcctgtatccggccgccctcggcaccaatcagccgttcaatcctggctgggcactgcgcgcgctggtcacctacgaccgttggctctacgaccgaaaccaggcctccagcgagtgtgatcgctgggcattcgtactgtccgcttacaacggcggccaggggtgggtaaatcgcgaccgtaggctggcctcggcatccggcgccgaccagctggcctggttcgattccgtcgagcgcttcaacgccgggcgctcggccgccaacttccgcgagaaccgcaactacccgcgcctcatcctgcttcgctatgagcggatctatctgcagtggggcgacggcgtgtgcggagagaggtacaccctgtga

SEQ ID NO: 347732 - DNA, 159 bp, Pseudomonas aeruginosa; identical to SEQ ID NO: 324252

SEQ ID NO: 347733 - DNA, 390 bp, Pseudomonas aeruginosa
atgagctgtcgcgagatcgacttggagcaggccaaggttcagggcttcctgagccatgtacgcgaagagagcgagttcgacggacgctcggtgctgtctttcctgggcgacttcgggatcggcaacctgatggagaaggacgcagcagtcgacagtgccaatcagcgcctgacccagttggcaggtgccaagatgcagcgcggctgcacctatgcctatgaggctgaggccccagctcagcagccgtacgcgccaccacgcgcctatgccccagacgggcccgcatcagcttctgcgcgttctgtcgacgcccagctcgacgagctgaaccgtatgcaattgccctacgaggagtaccagcggcgataccgagaaattacggggcaataa

SEQ ID NO: 347734 - DNA, 261 bp, Pseudomonas aeruginosa; identical to SEQ ID NO: 324247

SEQ ID NO: 347735 - DNA, 435 bp, Pseudomonas aeruginosa
atgaacatgtttgcaacccaaggcggcgtcgtcgaactgtgggtcaccaagaccgacacctatacctcgaccaagaccggggagatttacgcctcggtccagtccatcgccccgatcccggaaggtgcccgtggcaacgccaagggcttcgagatcagcgaatacaacatcgagccgaccctgctggacgccatcgtcttcgaaggccagccggtgctctgcaagttcgccagcgtggtccgtccgacccaagaccgtttcggccggatcaccaatacccaggtcctcgtggatctgctggccgtgggcggcaagccggtggcgccgaccgcccaagccccggcccgcccgcaagcacaggtccaagccccgcgcccggcccagcagccgcagggccaggacaaacaagacaagtccccggacgccaaggcctaa

SEQ ID NO: 347736 - DNA, 1539 bp, Pseudomonas aeruginosa
atgcttttaaccgccgaactcgccgccctgaatctcgatcctgcccagcaggaaggcgtcgttgccgccgtcttaccgctgcatgccgaggccgaaaagctacgggcccaggccaagctcgacaccttgaaaatccaggcgctgaccctcgaactggcacacctgcgacgtattcgtttcggcgtcaaaaacgaggccctgtcaccggaacagcgtgacctgttccgcgagacggctgacgccgacagcgccgccatcgaggccgaggtcgagcagcagctgcccgagctgcgcagccagcgccagcgtgccggtcgccagcccttgccggagcatctgccgcgcatcgaacaccgccacgaacccgagacctgcagctgcggccagtgcggcggcgagctggtcaagatcggcgaagacattagcgagcagcttgacgttacgccggccaagttcttcgtgcaccggcacattcgtccgcaatacgcctgccgtccgtgcgaacgcatcaccgccgcgccggttccgccggcagtgatcgacggtggcatggccgcccctggcctgatcgcctgggtactgatcagcaagttcctcgatcacctgccgctctaccgcctcgaacagatcgccgcccgtgacggcatcaccctggctcgttcgaccctggccgagtgggtcgggcgctacggtgttgccttgcagcccctggtggatcggctgcgcgagttattgctacaacgacccgtgctgcatgctgatgaaacgcccatgcagcaactcgatcccggccagggcaaaaccaaacgcgcctacctctgggcctaccgcagcaacgacctggacgaagggccgcgcctcgccgtgttcgactatcaatgcgggcgcagcggcgagcatgcacgcacctttctgggcgactggaaagggcacctggtggtggacgactatgccggctacaaggcgctgttcgccctgggcgtcaccgaggtcggctgcatggcccatgcccggcgcaagttcttcgagctgcatgcggccaaccagagtccggtggctgccgaggccttgcggcgtatcgccgaactctatgccatcgaagcgcgcggccgcactctcgacgctgccgcacggcaggtgctgcgcgaacaagaagccctgcccaaactgcaggccatgcacgactggctgcagctgacgcggcaaagcgtggccaacggtggcagcctggccaaggccatggactacagcctgaaacgctggacggcgctgtcgcgctacgcgcacaacgccaccctgccgatcgacaacaatccggtcgagaacatcatccgaccgatcgcggtgggtaagaagaattggttgtttaccggttcggagcgcgccggccgccgcgccgccgccatccagagcctgctggccaccgccaaactgaacggcgtcgagcccgccgcctggctcaaggatacgctggaaaaactgcccacctggcccaacagccggatcgatgagctgttacccctcagccccgcaaactga

SEQ ID NO: 347737 - DNA, 339 bp, Pseudomonas aeruginosa
atgctcacgccggcccaggtttggctggtggtcgagccagtcgatatgcgtctggggatcgacgggctgtcggcgcacatccagcaggcactcggccggccaccctgcgacggcacggcctatgcctttcgtaatcggcgcggctcgcggctcaagctgctgcagtgggacggcaccggtgtgtggctgagccagcgccgtctgcatcaaggctgtttccgctggccgaatgccgacgacaggctgctcaccttgacccaggcgcagtggcaatggctgatcgccggcgtcgattggcagcgcctcgaggcgcgtccgccggagcattggcaggtgtga

SEQ ID NO: 347738 - DNA, 297 bp, Pseudomonas aeruginosa
atggaaacgatgcacgcgcggcgccaggcctgggctcagcacgtccaggcctggcgggacagcgggctgactcaggtcgcttactgccagcagcatgagctcaaacccaaggcgctggcctactggatcaggcgcagcaagcagactgccacgccgctgaccctggtgcccctggcgctgcaggggccgtccgccggcggcgagttgctgctgcagcacgccagcggctggcggttggcgttgccggctggcatcgatgcaacctggttggccgggttgctgcgggggatagcctga

SEQ ID NO: 347739 - DNA, 234 bp, Pseudomonas aeruginosa
gtggtcaaacaactgcgtgattcgttcgggaagttcccgctcaaagcgctgtcgttcgtcacccgcgaaaccgagggacgccgctacctgggcgatttcgacggcgccttctacgtgccgacgctcaactccggcgccgaagacgtgatcgtcgaggacggtgtggaccacgtcgttttccaaaccgcttggcgtagcggtaacccttggctctacgcgatcaggaaggactga

SEQ ID NO: 347740 - DNA, 411 bp, Pseudomonas aeruginosa; identical to SEQ ID NO: 327122

SEQ ID NO: 347741 - DNA, 1122 bp, Pseudomonas aeruginosa; identical to SEQ ID NO: 170798

SEQ ID NO: 347742 - DNA, 660 bp, Pseudomonas aeruginosa
atggtgacgggagctgctgctgtcacctccgccgcaggagcgctttccaccgcaggcggaactctggtggctggtgcggctgccattcagggagcagcagccagtcttgcggccgcgaatgggctcgcaggtgctggtgccgctgccagtggtgccggtgcggcaggtgcggcaggtgcggctgccggtggtagcgggtggtggtcctcgatcacaagcatgttcgggttcgccgagggcggccaggtccgcggccccgggactccaacaagcgacagcatcccagcctggctttcgaatcaggaagtcgtcatcagggccgcggccgcaacccagccgggcatgaccccgctgctcctggacatcaacaagcgtggttgggcggcgctacatgactggtccggcgctgtgcggcacgcgacgggcggcatagccagcattcccgcacccgcaatgcctgctccgggcctggctgcttcgcgcctacaagagcctgcgaaaaacctcggaaccaccctgaaaaacagcgtgaacctccacgtctatgacgatccgcaacggatcgtcgatggcgcctggagtaaggctgggcaggaaaacttctggctgacactaagccgcgatcctcaacgagcacgacaactactgggaatcaactga

SEQ ID NO: 347743 - DNA, 423 bp, Pseudomonas aeruginosa
gtgcgcttctactccacggtcgatctggtcaatctgctggagcgcgaaaagcacgacggcaaagccgggcggatcgcccaggcactgctgcgcatggatctggtcatcctcgacgaactgggttatctgcccttcagccaggccggcggtgcgttgctgtttcacctgctatccaagctgtacgaacacaccagcgtggtgatcaccaccaacctgagcttcgccgaatggtcgagcgtgttcggcgacgccaagatgaccaccgccctgctggatcggctgacccaccactgccacatcgtcgaaaccggtaacgagtcctatcgcctgcaacacagtagcttggcggcccaggccaagatcaaatcacgggagcgaaagcgtaagggcggccaggaaccggaggacgatgagtcgttctga

SEQ ID NO: 347744 - DNA, 501 bp, Pseudomonas aeruginosa
atgggcaggatcgacgaggtgaactggccggccgacagccgggtgcagatcaagtgccggctgctcggcaccgaaccgcgtacatcgatcagcctcgcatggggacgtgagtgcccttacacggtgttcgatcacaactgccgggcagaccgcgagcaataccgcgtgccgttcacggtcgagttgcgtgatggcaacagcgtgacgggggccggcaacgcgatcggcggctaccccgatgcttggttccgcggaggctacgtcgagtgggacagcggccagggagtgatcgagcagcgtggtatccagctgcacaccggcaaccgcctggtcctggtgggtggcacctcgctgttggctcctggtactcgggctgtcgcgttccctggctgtgaccagctcattcagacctgcaacgacaagttcgacaacacgcccaactgcggtgcagtgccgtttcttccgggcaagtcgccgttcgacggcgatccctggtggtag

SEQ ID NO: 347745 - DNA, 282 bp, Pseudomonas aeruginosa; identical to SEQ ID NO: 344326

SEQ ID NO: 347746 - DNA, 732 bp, Pseudomonas aeruginosa
atgatcctcgcttcaattactacgccgaaaaatgtcttcagctgttcttatgcttggaagctccgtaagcaccccacccgccgcaacctcaatgcggcccacagccgctaccgcacgatttgctgccgcctgaagctgatgacgaacgtcatcgtcatactcttcaggaaaatcgccaccgacatcggtccaagtaagtatgtcgcgtatggcgtgtcgcaactcaacccagccaaatgctgcttcaggcaaaggaacatcaacaaactgaatggaccgacctatttcagcaacctctttaaggttttcctgaagacctatcaactgagagttagagagactccttacatttgctaccaaggcgagctttcctgcgtacttcgccatcccaacaatcttccggagtcggtcagactcttcttcttggacaagctttcgttggctcatcgcttggtaatgtccgacaccaaccgcgaccaatattgcagcaatagaaccaattgcctgaatccaggcgggcatgtcgatcgaacaccccaccgatgcaatagcgatgtgaagcccccaccccaacacacccagcgaaaggaatccccatacaacccaaatgctggccaacttcatgttttccggcattttaaagctacgcatcgtcaatgcccttttgctatcactcgcgccgagaggatgccagcgatacgtcccgcatgcaaagggagacgctatgaatga

SEQ ID NO: 347747 - DNA, 1188 bp, Pseudomonas aeruginosa
atgagagttggagtttctgggtttgtccctgctcgcctaacacaggcaagagtgttggcgtcgatgacaaaactcgaattaagcgagaggctggggaagtcttcatcctctgtctctcggtgggaaaaaggtgagagcgctccagagtctgaggctttggaagcaatttcttttgtgcttggatttccagtctcttggtttatgttgccggtttcggaaaaaccgtcttctgtaattttttataggacgcttgcaagcactagtagcgacctccgaggtaaggctggtgcaaggatggcctggcttcaagatatagtgaagtacttttcaacatggttggattggcctgaagtaaatcttccacaactcaacgtaacggaccatcgtcaacttgactcttcagatattgcgcgtgctgcacaggattgtagggatcgatggggactaggcgaagctcctatccccgatttggctctggccgctgaaggcgcaggtattatttgtgctcgaatccatcaagggaacaccaagatggacggcctttctcagtgggatgaactacagaagctaccatttgtactattgtctagtgacaagatgaactacttcaggtcgcgatttgatcttgctcacgagatagggcatttagtgcttcatcggtgtattaagacttttgatgttaagcacttaaaggaaattgaggcgcaggcgaactattttgcaagctgtctgctcctgccggaagagtcattgtcaattgagcttccaagatatccgtctcttgagaatctgcttagtctaaaaaaacgttggcgtgtgtctgttgcggccataatttatcgcgctgataagctggggcttgtcggtgagcaagaaacactacgtctaagaaaaagttactctgcacgtggttgggctaaaggtgagcctttcgatgagcgggcggaggtggagcaagtcagactattgtctagagcagttcatacattgatcgattcaagaattaagacgagagaagctattggccgagatttgatgctgccttgtaatgctatagagcagctttgcggtctttctccggggttctttgaacctaaggttgaaccgggtctaaaccctcttcccacattgaaagtagatgtgggcggtggttcaggtaagattgtagagtttaaaaaacggacttga

SEQ ID NO: 347748 - DNA, 708 bp, Pseudomonas aeruginosa
atgaacaaagtggatgtgcgagaagaagtagagcgcctgttgaaatcccacttcccacgggatttttgggttcgtgcgactgacgagcttcatgcggcctacggtatggcctaccacgcgctctcgagcccgctacagccgctgcagatgcatcggcacgaaatggtacgagctctgccgcaggtacggcattacaagctaagttcgagcgttcgaactattgcagaatcgatggaccttgaggtgctggatctgaaggctgatcactccggtgagaactacgttgttattcggtctggtccacttcagcttgggcgcattggcgttaaccaaggagcctctctacccaggggcgctaagcatcgggccctgatcgctgccctcaacgcgcgactggagggagtgacccatgacctctttgctccaacggtccatatgatgccgtcaagtacgcttgggttgttgctcgttaacatcaatccgaagccgaatctgtcccaagataggatgatcgacctgcaggtgggtgtaccctacaccgatctgtctgggtggcattatctccagccttgctctgaggttcttgccatgtatgcagatgctacaaatgaaacggtgatggatgtcgtacaatcagataaagcggttgtaagacttaaagagttcatcgctgaagttgagttgaatgatgctagagacaggaaatga

SEQ ID NO: 347749 - DNA, 219 bp, Pseudomonas aeruginosa
ttgtgcgagatcgaggaagccccgggaaacctggccgagtggatcgacgctgtagtcctggccctggacggcgcatggtgcaccagcgccacgcccgcgcagatcatcgacgccccgctggccaagcaagcgaagaacgaggcggtcgaagagaacacctacttcgtcatgcgcaacggcggtggcgccgtgttcatgaaacacggcccattctgctga

SEQ ID NO: 347750 - DNA, 354 bp, Pseudomonas aeruginosa
atgcaacccctcccccatgactatctgcaactgatccacgacttccagaccaggcagcaggagagcgaggtagccggcctcaccgcgttgaaacacctgctgccgatcgcccagcgcgacagcggccagagcggcgtgatcggtcggttcctgctcggcctgtacaacggcccagcccaccgcttcgacctcaccgagctgcgcagactcgacccagcgctgttcgatgcgtgcctgtccgtgctgcgtatggactacgccccgaaacaggaagtgcatgagtacttcgaagacggcgacgcgatctggcaggacctgagcagacgctgggccgcagcgacactgccggcataa

SEQ ID NO: 347751 - DNA, 285 bp, Pseudomonas aeruginosa
atgcaagcgaatcagcctcaaggcggcggcgccaaggctagcacaaccacgtcgtcggcccgcactcgtccagcgatggccagcaagcggctggaccttccgagcatctgtgatatctgcggcaacgcacgttccaccggcaagcatcagcgctgcagccggattcgccaacaggccaaggcggtcgagtgggccagctacatggccaaccttgcggccaggaaagcgcagggaggcatcgcccttttggagcggagctctgcccagacggagacgcatcagtga

SEQ ID NO: 347752 - DNA, 1257 bp, Pseudomonas aeruginosa
atgatcacggcatgcccccgcccgtgcgcctggcgcagctatgcgcttggcctcggcctcctgcccctcgccgcgcaagcggaattcctcgcggacagcagcgcccacctcgacctccgcaacttctaccagttgcgcgactaccgccagcacgatgcgccccaatcgcaggccggcaactggtcgcagggcttcgtcctgcgcctgcaatccggtttcaccgacggcccgctcggcttcggcctggatgctaccgggctgctcggcgtcaagctcgactcgggacgcgggcgtagcaacgatggcacgctgccgttcggagcgaattcgaaggagccggtggacgactacagtcacctcggcctgaccgccaagctgcgctattcgcagacccagctacaggtcggcatcctcatgccgcaactgccggtggcgttccgcgacgacgtgcgcctgttgccgcagaccttcgacggcgcgctgctgacctccagcgagatcgagggtctcaccctcaccgcggggcaattgtggaagtcgcgcactcgcgagtcggccggcagcgacgacatgtacatcatgggccgcgacaaggcccacgccagcgacgagttcaatctcgccggcgcgacctacgccttcacccctcggctcagcgccagctattactacggccagctcaaggacatctaccggcagcactatctcggcctgctgcacaccctgccgctgggcgaagggctgtcgctgcgcagcgacctgcgctacttcgacagcggcgaagacggcgcggcgatctccgggccggtggacaatcgcaacctcaacgccatgctcaccctgcgcgccggcgcccacgccttcggcatcggtgtccagaagatgatcggcaacgacgcctttccggtgctcaacggctacaccacgccctacgtggccaacctcatggcctaccagaccttcacccgaccgcaggagaaatcctggcaactgcgctacgactacgacttcgccggcctcggcctgcccggcctgaacctcatgacccgctatgtacagggccgcgacatcgaccgcggcgccggccgtgccgacgacagcgaatgggagcgcaacaccgacctgtcctacgtgatccagagcggaccgctgaagagcgtcgccttgaaatggcgcaacatcacctaccgcagccgctacggtgcggacctggacgagaaccgcttcatcgtcaattacacgctaaagctctggtga

SEQ ID NO: 347753 - DNA, 612 bp, Pseudomonas aeruginosa
atgagccatctcgccgagaacatcttgtctgccgcccgggccctgcccgagggcggcctgttgtcgcccaaggagttcctgcatcttggctcgcgggcggccatcgacaaagccttgtcccggctggctcaggaaggaaagttgctgcgcgtgagtcgtggtgcctatgtcgcgccccatcagggccggtttggttcccgcccgccgtccaccgagtccgtggtgcaggccatcgaggccagctgcggtgaaacggtcgtggccaacggcgcggccgaagccaatgcgctgggcctgaccacgcaggtgccgacccgcgaggtttttctcacctccggcgcatcccgcaccctgcatcttggcaaccggtgcgtggaactcaagcggggcaaccgctggcaactgctgctgggcaagcgtcctgcaggcaaggtaatccgtgcgctgtcctggctggggccggagggcgcaccggcggcgctgaagcaactgcgcgccaaactgcccgagtccgagtgggaggccgtgcgtggcgcgcgggccgcactgcccagctggatggccaaagtggtcagcgaggccttgcaaagtgaggtcgtggcgcatggctga

SEQ ID NO: 347754 - DNA, 1023 bp, Pseudomonas aeruginosa
atggctgagtcctggttttcgctcaaccgggaagatcaggctgaagccttggagtttgctgcggcccgcaccgggcggcctgcgcacctgctcgaaaaagacatctgggtggtctgggtgctgtccaccatctacgaatccgacctggccagcaagctcactttcaagggcggcacctcgctgtccaaggtctatcgcatcatcgaccggttttccgaggacgtggatctcacctatgacatccgcgagctggccgccgacctcttgaagcaaggcaaccccattcccgattccgccagtcaagagaaaaagatcagcagcgcggttcgccaccgcctgcccgactggatcaaagcgacggtcaggccggtcattgctgcggcattgcagaaagccgggctggaagcgaacctgacgctggcaggcaaagatcaggacaagctgatcctggcctacccggcggtcaaaacgggaaccggctattcagcgcccacgatccaactggagtttggtgcccgcgccaccggcgagccgcaccatgttcagcctgtggcttgcgacattgcgccagaaattgaaggcgttactttccctgttgcccaacccttggtgatggcggcagagcgcaccttctgggaaaaagccaccgctgcccatgtgtattgcttgcaggggcggttgcgtggtgagcgctattcgcgtcactggtacgacttggctgccatcgcaaaaacgccgcactttgcagcggcctgcgctgaccatgatcttgcccgagccgtcgcagaacacaaatcggtgttcttcgtcgagaaagatgtgaccggcaacaagatcgattacttcgccgccaccagcggccagctacaactcatccccgcaggcgaatcattggcggcgctggaagccgattacgccgcaatgctggaagatggtctgttggcgctgaatcagccgagcttcgccgacatcatcgagcagtgccgcgtcattcaggacgaggccaaccggcaggcccattaa

SEQ ID NO: 347755 - DNA, 438 bp, Pseudomonas aeruginosa
atgtccaaccccctctgcgcctgctgcggccagcccttcgagccgcgtcctcaagtacccaaccagacctactgctcctcacctgactgccagcgcacccgcaagttgcgctggcagcaggacaagctgcataccgatccagactaccgtgacaaccagcgtgatgcccagcgcgcatggttcgaccgacatcccggctactggcgcgattaccgatccgcgaataccggcattgtggaaccagagccgccgccgtccgccgacgacacgggcagtgatcttgcaaaaatggacgtgtcaatcctgccaccgggcctgtaccagcttcagcggatcggtgcggaatctgccgaggaagctgaggtttggctggtcgagatcaggcccgtggcacccatctgttcttgcaaaaaggacgtgtgcaaagagatgacttga

SEQ ID NO: 347756 - DNA, 900 bp, Pseudomonas aeruginosa
atgagcaggcaacatcaaaccgccgacctgcaaatgatcccggtcgatcagatcgccgtgctcaatccgcgcgaccgcaatggccgtgtgttcgaggagatcgtcggcaacatcaagaacatcggcctgaaaaagccggtcacggtcacgccgcgcgacggcctggaggatggcaagcgctacctgctgatctgcggcgagggacggctcaaagccttcaagtcgcttggcgagaaggaaattccggcgctggtgatcgcggtcaacgacgaggacgccttcatcatgagcctgaccgagaacatcgcccgccggaaatacagtgcgctggaactgctgatcagcatcgagcagttgagcgaacagggctacgacaagcgcgtcatcgcccagaagaccggcctgagcctcgattacatccggggcatcctgcttctttttgagaaaggcgaagaacgcctgctggccgccgtggagtccggacgggttcctctcagcgtggctatcaccattgcgggcgcgagcgatgaggaagccgtgcaggccgcattgcaggatgcctacgagaacggccagttgcgcggcgggcaactgatgcaaacgcggcgcgtgcttcaacggcgcaacacccttggcaagacgctgaaacaccggcccgggcgcaagggggcggctgtcacgaccaccagcctggtgcgcaactaccagaacgaggtcgagcggcaaaagctgaccatcaagaaagctgaattcacgcagcaacgcctgctgttcgtgatcgaggcgctgcgccagttgctggccgacgagcacttttccaacctgctgcgcgccgaaggtctggacaccttgcccaaacaactggccgagcgtgtctggggtggaggccatacggcatga

SEQ ID NO: 347757 - DNA, 885 bp, Pseudomonas aeruginosa
atgagcaagccaccattgggattcatcccagagccgatcacattggcgctggatcggattctgccctcgcgcaaggcgccggaggggctgcatacctcgcgcaagttcaagcagatcatggcttcgatggaagcggtcggcatgatcgagcccctgagcgtgggcaaggccgacaagaaaaccggccagcacattctgctcgatggccacatgcgtctgctggcgctgcaccagctcggctataccgacgcgccgtgcctgatcgccaccgacgatgaaagctacacctacaacaaccggatcaaccgcatcacgtccattcaggagcaccacatgctccggcgcgccgtcgagcgtggcgtcacgcaagaccggctggccaaggcgctgaacgtggacatcagccagatccacaaaaaggtgagtctgcttgaaggcatctgcccggaagcggtcgagatgctgaaagaacaacatttttcagccaacctcggctcggtactgcgcaagatgaagcccacgcggcaggtcgagtgcgtggaactgatgttgaccgccaacaacatgaccgtcgcttacgccgaagcattgctcgccgccaccccgccgaatctgctggtcagcgaaaagcggccccgcaaactctctggtgtgacagcagaacagatggtcaagatggagcgcgaaatggggaacatccagacccagttgaagctggtcgaaaaatcctacggtcaggacgtgctgcttctggtgctggcgcgcggctacctcggcaagctggtcggcaacaaagccgtgttccgctacctgtcgcaacgccagccggacgtgttggccgagtttgaagccatcgtccagactgtggcgctggacggcaaatga

SEQ ID NO: 347758 - DNA, 1365 bp, Pseudomonas aeruginosa
atgcaccagatcgtcgatgtcaccccggcatctcacgccgcctcaccgctggacgccaacgatgatgacgacggtgcagccgtggccacccatcgcaatgcgccgggcgctgatccagcctgcctctatggcctgattggtgatgttgcccgcgcgggcagtgaaggcacggagaccaacgcctgcgccatcgccgccaacttcatggcctacctgtcctgcgcggtcgggcgcggcgtgtatctgcccatcggcaacacccggcaccacgcgcggctgttctgcctgcacatcgggcgttcgggccgtggccgcaagggcgacgctgtgtcattggtgctgcgcatcgatcaagcgctgcgcgaaatgaacgaggccttcgcgccgcaggttcatcgcggcggcctgtccacacgcgaaggactggtggcgctgatgcacgatggctaccggcagggtcggcaggacgtgcctgccatcgaagacaagcgcctgtgggtggtcgaatcggaatttgccaacgtgctgcatcaggggcggcgcgacggcaacaccttgtcggcggccctgcgcgactgctgggatggcgtcgatctcaagcccgccaccaagtccaaccggctctacgccagcgatccgcacgtctgcctgagcggcgcgatctcgcccagcgaactgacgggcctgatgagcgctcgcgaactcaccaacggcttcgccaaccgtttcctgatgatctgggcagagcggtcgcagatgctgccgtttccgaaagaaaccccgcaggccgtggtcgagcatctggcgcaccagacgctggaggtgttagcttttgtccgcgccgaccggtacggcgagtgcgaccacctgcggatggaactgtcgccgcaggcgcagtggcgctacgcccagctctaccggggcgagctgaacgacgatcccggcgacggcacggtcggcgcgctgctggagcgacgcgccccgatgctcttgcggctggcgatgttgatggcgctggccgacctgcaaacccggatcgacgccccgcacatcgatgcggcgatggcgtggattcggcacgccacggcgtccgtgcgtttcgtgttcgtcagtgccgccgaggaagcgaagctggcgcaggtgctggaactgtcgagccgggtgctggccttcttgcgtgagcgtggtcaggccacgcgcagccagatcagcgtcgaatgcttcaaaggcaaggtgccgaaggcgcggatcgacgcctgtctggagcacctgctggcctgcacgccgccgaagatcagcgtgcaaacggtcgaacgccccaccgatgcgccgggcacgccgacgcgcgtataccggctcgcatag

SEQ ID NO: 347759 - DNA, 690 bp, Pseudomonas aeruginosa
atgtccactctcaaatccatgaccgggacttcgctggaacattcggcgctcaagcagcgccatcgactggtgcgcgaaggacatccgaccagcctgacgttgcgaatccaccgagccttgagctggttgaatcgcgccgagcaggcggaagacgtggacggcaaattcatcttcctgtggatcgccttcaatgccgcctacgcgcaggaactcgacgacagcgatcgcgcatccgacaaggccactttcacagcattcctccagaagctctgcgacctcgacaccggcaagcgcatcgatgacctgatctggaaagagttctccagcagcatccgcaccctgctcgacaacccctacgtttttcacctgttttgggagttccagcgtggccggatcgatgagggtgaatggaaggatcggttcgccagcgcgaagaagtcggcgcagatcgcactggccagcggcaacacgcccgtgctgctctcggtaatgttcaaccgcctttacacgctgcgcaatcaattgatccacggcggcgcaacgtgggacggcaaggtcaaccgcgaccagttgcgtgattgcacccggctgttgggcaagctcgttccagtgatcatcgcgctgatgatggacaacccgaacgcgctgtggggcgaggccgtctatcccgtcgtcgatcaggacgcctga

SEQ ID NO: 347760 - DNA, 3300 bp, Pseudomonas aeruginosa
gtgggatcgaattacgaggcgatttgcgaggagaaccgggagagctacggcaccaagggcgcacagaagtccggcaagctggccgctggcttgtacgacaaccgcacgcacttcatcttcgagctgctacagaacgccgaggacgccctcggtcggcgcggcgagtggaagggatcacgcaaagttgccttcaacctgaacccggcctgcctgacgctttcgcatttcggcaagccgttcgacgaggccgatgtccgaagcgtttgcgacatcgctgagagcaccaagaacgagtcgtccatcggacgcttcggcctcggcttcaagtccgtctacaccgtcaccgatcttccggaaattcactccggcgacgaggacttcgccatcgagaactacgtcttcccgaagcgaatggcgcgttcggcgcgtgcggcggacgagacgcagatcgttctgcccctgaaaccggaggacgcgagcgcagcgcaggacatcacggcgggattccgccacttggggcccggcgcgctgctgttcttgcggaacatcgaagagatcaactggagcgtcgaaggtggcgcgtcagggttctacctgcgcaacgctcccgagtctcttggcgacaacgtccaccgcgtcaccgtgatcggccaagaaaccggcaaagccgacgtcgatcagaattggctggtgttccaccgcgacgtgttttctgccgaggggctgaaggtcgggcgggtggagattgccttctcactggttgcggtgaaggacccccccggtcgctgggcggtgctgccgctggccaagtcgccgctggtggtgttctttccgacggtggttgagagccaccttggctttctcgtgcaggggccgtaccgcaccacgccaagccgcgacaacatcccgcccgacgatccgtggaaccagcatctggtcaaggaaacgtccggcctgctggtagaggcgatgcgctggatgcgagacaacgcgatgctggatgtcgctgcgctgcgctgcctgccgcttgaccacgagaagttcccgaaagattcgcggtttgcgccgatgttcgatgccgtccggcaggcgtttcaggacgaggagctgcttccgacgttcgacgatgggcatgtcactgcccaacaggccaagctggcgcgaacgcaagagttgcgcgagctgttcagcccggaacaggtggcggcgctgttcggttcggatgtcgccgcttggctttctgatgacatcaccgaggtaaggacgcctgagattcgcagatatctgatgcgcgaactcgacatcgatgagatcacgccgacaaagctggtgccgagcctgaccaagccgtttcttgaggcgcagtccgatgagtgggtgtcacgtctgtacgaattcctgagcggccaggagaaggcgctgcgtcgtcacctggacaccgttccactcatccgcctcgatgacggtacacacgtcgttgctcgcgaaaacggaaaggccaaggccttcctgcccagcaccatcgccaccagcttcccgacgatgcgccgcgcggtgtgtgcgacgcccgaggtgcgtttgttcctgctttcgctgggcatcaccgaacctgatcctgtggacgatgtcgtctggaacctcctgccgaagtaccagcagcaagaggtggatgtggacgacgacacctacgcggccgatatcgagcgcatccgggcggccttcaacactgactcaacggcgcagaaggaaaagctccggtcagccctgcgcgacaccacctttgtgatggtggtcgacaccggcgatggcaaaggctacgtcgccaagcccggcgagatctacatcgccacggatcgtctgcagcagctcttcgccggtgtgcccgacatcttgatcgtggacaacgaatacgactgcctgcgcggggaagacatccgtgacctactggtgtcgtgcggcgcaagccgctacctcataccgcaagcaacgccgtcggggcttgggccttccgagaaagcgcagattcgcagagaagcaggccttgagcgtgcgagctgggaaagccagccagaggacttcacccttcgcgggctgacacagttgctggagttcttgccgacgctgaattccgaggaggccgcagccagagcgaaggtgctgtgggaggcgctggctgatctggagacgcgcggcacagccgccttctacggctcctacaagtggggctacttccacgaggcaaaggccgcccggttcgacgccgccttcgtgcggacgctcaatcaggtcgcgtgggtgccgaacgccaacggagaacttgtgcggccggggctcgtcgtgttcgacacgcttggctggaagcccaacccattcctgctgaccaagattaccttcaagccgccaatcatcgaccaactcgccaaagaggcaggcatcgacccggcgattctcgatctgctgcgaagagacccgaccatcgttgctgaactgacgtcccgactgagcgcgaatccaccacctcagcccgatccatcgccagcacctgagccggaggccgacgagacatccgatggcgacgtgtacgacggcgcgaaagatctgtacggcgacgacatgccggacattcctcccggcacacctgacccggatggcggcgacggcgcgacaggtggcgcagggcgcggcggtcagggggaaactggcaccgggacgccacgcggtggcggtcagggcaacggcggggcgcacggtggctcgggcggcggtcacaccggtggaggtggcaagagcggtggcaccaacagcggagggcaaggaaagcggtcgcctggctcggctggtggacgaccgttcatttcctacatcggcactcaccctgatgacgaggaggccgatccagatggcctcgatcaggcagcacggatgaagattgaggatcaggccatcgccctgatcatctcgctcgaacctggactgaagcggacgcccgagggcaaccccggcttcgacctcttcgaggtcaacggcagcggccagcaagttcgatgggtcgaggtcaaatcgatgaccggcagcctggaaaaccggcccgtagggttgtcacacacgcagttcgactacgcccgcacgaagggagatgcgttctggctgtatgtggtcgagcacgcgaccgacctcgaaaaggctcgggtgctccggattcagaaccccgtggcacacgcgcggacgtttacgttcgaccacggctggagccagatcgcccaaaccgagccgccaacctcgtctgaaccgaaagcctga

SEQ ID NO: 347761 - DNA, 213 bp, Pseudomonas aeruginosa
atgagccaccagccggacgaaatcctcacgattgacgaggttgccgcctatttgaaggcaggcaagcgcacggtctatcgccttgcggcgaacggcaagctgcctgctttcaagctcggcggcacgtggcgcttccggcgcggcgacctggatcagtggatcgccagccgcatcggcaagacgatggccgatgacgacgagggagcggaatga

SEQ ID NO: 347762 - DNA, 2922 bp, Pseudomonas aeruginosa
atgaccagcagcgccaccgcccttcaatccaaggccaacccgcagcagctcgaagccatcctcgccaccgatggcccggtgctcatcatcgcgggccccggctccggcaagaccttcacgctggtcgagcgcatcgtctatctcatcacgcagaaaggcgtcgcgccggagtcgctgttcgtcgttaccttcaccgacaaggccgcgcgcgagctgaccacgcgcatttccaaccggctgaccgatctgggcatcaagttcaatctcaacgagatgtacctcggcaccttccactccatctgcctgcggctgctggaggactaccgcgagttcacccgcctcaagcgcagcttcacgctgttcgaccagttcgaccagcaatacttcctgtaccagcgcatcaaggagttccgcgaactgccggacgcccagctcgtcatgggcgacgaccagtcgggccgctgggcgcagtcggaaaacctgctcaagtggctcaacaaggtcggcgaagaagcgctcgacgttgccacgctggccaccgcccctgacgtagaaatccgcgcgctggccgcgtgctttgccaagtatcaggagctactgcacgagaacaactcgctcgacttctccggcatccagtacgaggcgctgcagctgctggaaaagcgtcccgaggtgctggcgcaggtgcgcgaaaagctctcctacctgatggtggacgagtaccaggacaccaacaccattcaggaacgcatccttctgctgctggcgggcgagaagaagaatctgtgcgtggtgggcgacgacgatcagggcttgtaccgctttcgcggcgcgaccatccgcaacattctggagttccccgcgctgttcgacgagggccagtgcaagcaggtcaagctgaccgtcaactaccgctcgcacccggacatcatccgcttctacaacgagtggatgaaggaacaggtgtgggacgacggcacacgatccttccgtttcgacaagcaaatcctgccgcgcgaggacgacttccccagcgtgcccacggcagtgcggctggccgccagcgacgacaagggcgaaaccaccaactggcacgccgaggtgctggccttcctgcacagcctgaaggcgtctggcaagctgacggactggaatcaggtggccttcttgttccgctcggtgaagaacgacaaggtggtggcgctcgcacgcttcctcgaatccgatggtgtgcccgtcttctcgccccgctcgaatatgttcttcgagcgcgaggaaatccgcctgatgatcggcgcgctgatcttcctgttcccgcagttcccgaaggtgcgcgcgtgggtagaaggcgtgcatctggacatctgggactactacgaccagcactgcttcaagcccttcaccgacgagctgcgcaaaccggaaaacaagccgctgctggattgggcgcgtccgcaggccaagcgccacgccgtgctcacgcagaacaccgactacgccttctccggcctgttctaccaactgctccagttcccgctgttctcacgcttcctcaccgaggaggcagcgcaaggcgtggacaagggtcgcgcggcgcgcaacctcggcaccttctccaagctgctcaccaagttcgagtacctgcatttcgtcagcgtgttgaacccgcagtggctggagaagaacatccgcgacctgttcaaccagttcctgcgcttccttcaggacggcggcattggcgagtacgaggacgaagccgagtacgcgcccaagggctgcgtgtccttcctgaccatccaccagtccaaggggctggagttcccggtcgtcgtctgcggctcgctggaggctgtgccgcgcaagcagtacggtgaactggacgtgctgctggaggacggcggctacctctctaaggagcgcttcgagccgctcgaccacatcaagaatttcgacttctggcggctgttctacacagccttctcgcgtgcgcagaacctgctggtgctggcggcgcaagagcgccaaggccgaggcctcggcaagtcgccgtccaagtacttcgagcgcctgttctacgagctgccgagctggcgcgacgttgatctgtcggcgctgaccttcgaggcggtcaaactgatcaacctcaagcgcgaatactcgttcacttcgcacatcaccgtgttcgaaaactgcgccgagcagtaccgcttcttcaaggaactcgagttcgcgcccatccgcgagagcccgatgctcttcggtacgctggtgcatcaaaccatcgaggacatccacaagaccgtactgcgcggcgaggaaagcacgatctccttcgacgccatcaagggctggttctcggtcaactacgccatgctctccaagaaggagcgtgtctaccttgcgcccagctcgcagcaggcggcactgctgcacgtgatgcgctactacgagcgcgagaacggccactgggatcgcatcaaggaggccgaggtcgagatttccctcatcaaggatcagtacatcttgaagggcagcgtcgacctgatccggggcgagcacgacacggtcgagatcatcgacttcaagtcggagaagaagcccgacatggaaaaagatcgggatcggctgcgccagtaccagcaccagttggaggtgtacgcccatctggtcgaggagcgcaccggccagaaagtcagccggatgcacctgtactacaccggcgaagacggcggcaacccctacgtctccttccacaaggacgaccgcgccatcggcaagaccatcgcgcgcttcgacgacatcgtggcccgcatcgagcggcaggactatgggattgcgacacgcccggccaagctgtgcctgagctgcgacatgcgcgcctactgcgacaacaagaactggaaattcaggaagagcaactga

SEQ ID NO: 347763 - DNA, 1938 bp, Pseudomonas aeruginosa
atgagcaagaacacccccgcgcaggacagcctgcaactggccacgcccgatggcggcaccaccaacgtcgagaagtacgagttcgcgccgatcaagggctacccgatgctgaactggcgcggcaagcgtccgttcacctcgacgcagtactacccggcgcagttgaaggaagtccacggcgaggaagtggacggctggcgcaacaagattttctggggggacaaccttcaggtgatgagccacttactgaaggagttccgtggcaaggttgacctgatctatatcgatccgccgtttgattcgaaggcggactacaaaagactaatcgagctcaagtccggcaaggcgagcaccgatatgggggcctttgaggagaagcaatacaccgacatttggaataacgatgaatatctccaattcatgtatgagcgtctcgtcatgcttcgcgagctactcaacgatcaggggctattgtttctacattgcgactggcacaaaagccactatttgcgctgcatcctagaggaaattttcggttcggaaaatttcgtcaatgaggttatttggcagaaatgcaattcaaagaatttcaccagctcctcgctaagcaatgtccacgacaacatctttctttactcaaagaagcgcgaatacgtcttcaatgaaattttcgaggagctcagagaggagtatgtagaaggcgcataccgacatcaagatagtgatggccgtaaatatcgcttgctccccttgcatgccccaggcgagagaaatggttccaccggagaaccctggcaaggggttcgcccacccgctggcgcacactggaggttcgttccgagcactcttgacgatatgtacgaaaaggggctaattgagaaaagcgagaacggagttcttgcctacaggaaatatcttgaggattcgctgggcgctcgcatcggcaccatctggcttgatgcaaagcagctccccggtacagagaaaactggatacccaacccaaaaaccagaatcaatcatcgaaaaaatcattcagatcggtagccagcccggcgggcttgtctttgattgttttatggggtctggcacgacacaggcggtagcgatgaggcttggacgtcggtttgtcggcgcagacattaacctcggagcaatccagacgacggccaagcggttgactacagttgctgacgatttgcgccagcagccactcgatagcgagcgcaagcactacaccgggttcgaactgtataacgtcaaccactatgacattttccgtaatccgattcaggccaaggatctgttgatcgaggcgctggaaatccagaagctggaattcagcaccgtgtttgacggcgagaaggacgggcgcatggtcaagatcatgcccgtcaaccgcatcgccacccgcgccgatctgaacgagctgatcgcaggcttcgactacaaggcctgggagcgcaagcagcacgaaagcccgaaccgaccggtcgagaagatcaccctcgtctgcatgggccacgagccgaccttgcgcgcggaactggagctggccgccaagcccttcaagatcgacgtggaggtggtggacatcctgcgcgacaaggccgacctggagttcaagcgcgactcgcaggccaaggtgtccatcaagaagggcgaactggtcatcgagaagttctacccgatgaacctgctgcaaaagctctcgctgcagaaagaagcggtcgaggattggaaggagctggccgagtcggtgctgatcgactggaactacgacggtgcggtgctgcaaccggcagtagtggacatccccggcaagaacgagatggtcaagggcgcgtacaaggtgcccgacgatgcgggcaccatccgcgtgaagatcaccgacctgctgtcggagtcgtgggaagggagcgtggccaatggcgactaa

SEQ ID NO: 347764 - DNA, 2685 bp, Pseudomonas aeruginosa
atggcgactaagcgcccagtcaaggccgtcagcgcgtcgctcgacttcgccttcttccagtttctctggcagttctatcaggccaaccgaggcaccatccgccagcactacaaggagctgacgcgcaagttcctcgacttcaacaacccggatcgcaacccgaaggccttcctgcgccagccgcaattcgaggcgcttgaaacctacgtcttcctcaaagagttcctcggcaacgccaaggtcgaagaaatcttccagcagtggttcgagaagcaaggccgctttgccgaccgtgccgagggcggcgtggtgtcgggcagcgcgggccaggtcggcctgttcgacaagatcacgcaggatcagtacaaggccgtgttcgcggccatgcgcaataattcgcgcgcctatccgaactacatcttcgcgctgacgatgggtacgggcaaaaccatcctgatggcgacctgcatcttctacgagttcctgctgggcaacaaattcgagaaggacgcacgctactgccacaacgcgctggttttcgcacccgacaagacggtgctgcaatcgctgaaggagatcgaggcgttcgacctcacccgcgtggtgccgccagagtacgtcaacttcctgaccacgcacctgcgcttccactacctcgaagaagcgggcacctcgctggatacgctggatcgctcgcgtttcaacatcatcgtctccaacacgcagaagatcatcctcaagcgccagcacaaggagaaaacctccgttgacaagctgttcgtcgcgaccggcagaaccctctcagccactggcgtctatgccgatgccgccgatctctacaacttcgaccagccggaagaagaaggtgaactgaccaccaaccagcgcttcgagaagctgcgccgcctggagcagttgggcatctacgtggacgaggcccaccacgccttcggcaaggcactggccaaagacatgggcgtgggcgcaaaggaaaccgacaccagcctgcgcaccaccattgacatcctggccgccagcctgaacgcggcgggcacgcgcgtggtggcctgctacaactacaccggcacgccctacgtcgggcgcgaggtgttgccagaagtggtctacgcctacggcctgaaggaggccatcgacaaaggcttcctcaaaaaggtgacgctgcacggctacgccaacacgcgcaccgacgagtttgtggacatcgccatcgagagcttcctgaaaggatcgggcaacctgcgcccggaaggaatgctgcccaagctggcgtttttcgcggccaccgtggaagagctgactgaagagctgaagcctgccgtcgagcgtgcgctactcaaacacggcatccccatctctcgcattctggtgaacgtgggtgacagcaagatcaccaccaacgacgacatccgcgagttcaaccgcctagacaccgaaggctcggagaagcagttcatcctgctggtcaacaaggggcgtgagggctggaactgccgctcgctgttcggcgtgggcctgttccgagaaccgaagtcgaaggtgtttgtgctgcaagccaccatgcgctgcctgcgcgccatcggcgaggcccagcacaccggccacgtcttcctctcggacggcaacctcaacaccctgaacgacgagttgcagcagaacttccgcatcagcgccgacgagctgcaacagaccggcaaggacaaggagcgcgtggaagtgcgcgtggtcgagccgccggtcaagatcaagctggtgcgcgtgcgcaagcagtaccagatgcgcgaaaagcagttggtgaccgggcaagcgttgatgcctgagcgggccgatgcgcagaagtggggcgagctagttgagaagtatcgcctgatcgaaacgcagcaggacggcctgaccgccgctgacgcggctcgcgcctcgggcagccgcacctttgacctgacctcgcgccgggagaagcgaaccttctcacagctctctctggtggccgaggtgtcgcgctacctcaatcgcaccccgctggagatcgaggaactgttggacgcgacaaaggaaggctccgctgaactggtggccatcaccaacgagttcaacgagctgctctacgacgagatcatcccgcgcctgttccgccagctctacgacctcgacgagtcgcagcaaaccgaggagcacgaggtcgatctgatcaagctgcccccgaacggctactacgaggtgtcggcggcgaaggacaagatcgtccgcatgggagacacgcagatcaaggacgacgagcgcgccaagagcttccacctcgacacctactgcttcgactccggctcggaaaactggctgttctgggatctgctgcgcgagcagcgcgtgaagaaaatctacttcaccggcatgctgacccacggccagtccgacttcttcatccagtacatcgacccggattcgcgcaccgtgcgcagctactaccccgatttcatcttccagcgtgaagaaccggacggcagcctgaagtacgtgatcgtcgaggtgaaggccgacaaccagatcgaggacgccgtggtgcaggccaagaaagactttgcccagcagatcgcggtggcgagcggaatggagtaccgcatccttaagtcgtccgatgcggacaagcggcatttccgggtgttgttgtga

SEQ ID NO: 347765 - DNA, 2403 bp, Pseudomonas aeruginosa
atgaagctagcagaaatttccgttcgcttgcccttgtatcgcattgaatccgatgtgacctatcacaccgagcgcaaacccacggtgtttgaacggatggtattgcgactgtgtgatcctgggctccatttgcccgacaaacagaacttgtctttgctgggtgttttccgcgatcaactgggcgcaggcgatgtgcgtgaactgctggaagactgcgtatctgaactttccgctttgggagcactgcccaaacgttacgctcaggataggcttgagatgcctctaactgagcttgaattgactgccgacggcttgcaattcttgcgcagcgacagcctgccggtgcgctcgcgcacggttaaggtctggcaccgctatgaccccatcagcgacgagattaaacccacacaatatgatggggcgcgtctcagccaaagtgatttcagtcgcgtcagcgtcgctgatcaggctttaaggccgcaaaatccgttgccgcaagtcgaacgcgccatagcgcaggaaacgtatgactggaaaaaccctgcgacagttatagaccgcatcgcgcccatggtgcagccagcgggatggggcgagcgccgactcgagttctcgtgcagcgaggatggcgcactttctgcgagcgctccgcgtgatgcagcgttgcagcgttggctggagcaagcgcaaccagaactggtatgggaaattttgcttgctgatgctctgacaagcgagccggattccttgctgcccagcgttgactcttctgttttacgagatgcccgcactgcccgccctattgccgcaactaaagggggggcaaccaaggcgcggttctgcatcgttgcgcaagggattgcagcagcggatgcaatcacccccactatcgttttatcgtctgaagtgagcgcaccagctgtggttgccaatggcaaacaaccgaccgcattcacactgctcgtgcccgccccagcaggaattatgacgggatttcgtagcttgtctctgccccagatcgacggagcgagcattcaagtagaagtggccggtaacctccgcctctattgggccggacaaccgcgctcgtgcggcctggcggttactttgaacgaccaggctgcaaccgcgttttgggccgagctacgcagagatttggagagcacttgcgagcactcggatgacccacgcattgccttcatgtctttagcatggcgaaatgccgatgcgttgggcgaaaagctgtggcaatggcttgtcactcgtgcagaacagtctctggatgatctaatggcgttggtcgaacccactacacaagcaattggattgtggcggcctgataggaaagactggaaatctgcttgggaagaatctctgtcgaaagctatcgatgagtcgttgagacatacgcccaagcagcttgatccggaaaaagtcgtttctctattaatccagatagctcagttcttgtctgccgacaaggcagccgcgcggcaagccgcgctgctgggtcacgtggcgcccatttgcaccgtggactcattggcaaagttgcgatctgctttgccttcattcactgaaattccagaagaattgctttccattgaattgcgacaagtgtggctggagaacgcattgcagcgcaaagagttgaagctgtatggcccacacgccttacagcaaccaatgcaatttattgagaaagcaatccaggatatttaccggagtattggcgatcaggcgttgaaggcggcgggtaatggccaaatggatgtgcgcaccctgaccccaggtgcattaaatgccgtgcgcgcttggcgcaaagcagctgagcatttccacgctttaaatacatcatcgcccctctgggatgcgttgaataaaacagtggaaagttggaatcttctggcgcaggacaagctggccccggttgagaatgggcaccgcgttgtagtgttcgacaccagcgctctgatggaaagccctgaacttttgcaagatcttcgttcagatgatattccggttgttccccatcgggtcctgagcgaattggatggtttgaaggccagtgaagatgatactcgtgcggtcaaggcccgcgcagccattcgccagttggatgcgacctcatctcgcatccgccatgaaacagaatatacggccttgctgcctgcagagtgggatgccaagcagcctgaccatgcaattctttcaactgcattattcttccgactgaatgaagttttgtttgtaagtaatgacatcaacctacgcaacaaggcgcagtcgcttggcattcacacacaagactccaagacatatgcgccttcgcgacttgtacccgctgcttcgccaagtatgcatacacggaagcaagacaacagaaaaaacaaaaggggatga

SEQ ID NO: 347766 - DNA, 1146 bp, Pseudomonas aeruginosa
atgagtcgggcagacgagtatcgctaccaaattcaacggcaacgtaagcaagagcttgatcgacagcgtgtgcgcgaaacaacgcgtccatttcttgagcgctaccgcagcgtattgaatgatgtcatcggtcaaggactagatgccgtagttccggaagagtttcgtgagttgagcatcgctcttgaccgaatggagactttgttggactccgatccgtttgctgccagagatatgagccgttccctaggggggcgatttcatggattaccaagatttgcgcgtgagcagcgccgttcccgtcaagatgcggagctagccgccgccgaagcattccgcaaagcgcagcaagctgaggcagaacgacagttgcagatgaggtctgaacttgaggcagcatggcgcgagggcttgagcggctggagcactcctgtcgcactcaacgccgcgtttgctgagttgcagcaattacgtgcgcgactacttggtgatgtcgccagcaacatgacatcagcgcaaatttcagccgccttgcgcgaagttcggctgcgctatgaaggggatgctgaacgtcagttgcaggaaatgaaaaatcgtgcccagcgtgaagctgttaccgatgtacttacgctgcaaagagagcagttggagcaggaagcgaaaaagaacggcggcgagcgcgccgccaagttgcgagaggcgttggctcatgcgacaggacttgctcctgaagagcaagctgaagccttgaaccaaatggcgaaagagcaggatgaagccgccgtagacgaaagccagcgtcgtgaagttgtgcgggcggtttatctgtcactgcaacaagctggttttgtcgtggatggacccgaacatctcacatcacaagggcaagatgaggtactgattcgcgcccgtcgtcctgctggcgcacaggcggatttccgcgtcaacctgagcgggcacctcagctacaaatttcatcaatacaaaggcaaaacgtgcgagaaggatgtcgcccccgtcatggcaacgctgcaagatgcttacgggattagtctgagcgacaagcgcgtgatttgggtcaatcccgatgatcaagatcaggatgctcgcccttaccctgatgccacacaggagagaagcaaatga

SEQ ID NO: 347767 - DNA, 906 bp, Pseudomonas aeruginosa
atgagtgtagacaccgattccctccttcaattcctgctgggcgatatgccggcgccacacttttttagcgaggcttatggcaggtgcccgctgcatatccccggttcgccagataagtttacgcatctatttgcgctgagtgatctcaatgccatcctcaacttttcgtcgctactgtacccccgagtccgagtcacagatcatcgcaacacgatccacaaatatgatctgatcgacgacaaggatcggtacagcaacaacctaaacaacgaactgaatcgaaagaagattctgttggccatcgcccgtggcggcaccctcgtctacgatcgcatccaggagtgtcacccaccgctcgagacatttgttgaccagctcagcgaggagattaacacccgcgtgagcatcaacggttactacactgcgcggcgcacgcagggggtcaacgttcatttcgaccggcacgatgtttttgcactccagatccacggcagcaagcgttggttttaccgcgaggactcgcatgtattgtcacgcgcgatgcgtcaccaatcggtaccgccggtggatgaaaatttcacaggttggcagtccgtactcttgaagcagggcgacgtgttctattgcccgcgggggctctggcactttacgcagacagaggaaaatcattccgcccatctggcgctcggctggtatccattgacgctcggagattggatcaagaaattagagtcgcatccggagattggggagctgctggaggagtatgtgcagcagccaggcatgaatagcacttcaatgaaaaacgttgccgcgctcgacaacctgattgttgcgttgcgtacggaagccagccgcccctttccccggatcacgcggcctcgcccatacctcgagctggaatga

SEQ ID NO: 347768 - DNA, 1212 bp, Pseudomonas aeruginosa
atgcgtgaatccctgcaactcgtctcggggctgcccagggagaccgagggggaagctttactcgtcgaggctctgagcgctcagggtgccagacctcatcttagccggctctccgatcatgagcttgcaacgcgcgatggtgctagccatccggttgttgtgctgctgttgccgatttttggcgacaacgacctgacggatgaagtacgtattcgcctcgcccatttcgcgtcatgtgatagttaccgagaatgcgccattgtggtggtcgcgcacggcgaccgtcatgtgtcagacgagctcgtcacacccgatacgccgttcagcatcaaagttcgtcgtctcttcagcggcgtcggagccttcgagatgttggaaacaaagctcgatcggttcacggctgtcgcgctggcccacgagatggtggatctcgtcgatgcgaccaagtttagcgatatcctagaactgaactgcattgcccgcctcttgccgcgtgcgcccaagtggaatgcgcgtaagcgtcagctcgacttttacgatccctgcaccgggcatagcctgttcaagactgtcgatcgtgcagtgcagaagcgtatcgcaaatcatgttcaagtaatcacgccccgcatcttgaagatgactcacgcgggcctcagtgacgatgcactagccgacctgggacatgcacttcacgttgaagtgatcgatctcggcagtaatgatctttcttgggagaggcttgcgccgcaactggatgcttgtcggtggctcggtctggcggcgaacggcctagcgcaggtgtgcctctcgcaactgcccggagagatcgagcatctttatttacataagaatgctcttcatgagttttcagcacggcgaacggaagtggctcgactcaagtcgcttagcctttatcgtaatcgggtgactaccttcgattggccagcaggacaatcgacgctcactcgcctcaaccttggcgccaatccaatctcatccctacccgagacattgagcaactgcgctgcattggagtttctcggcttggctagaacgcagatctcgtgtttgcctgaatgggtcttttccattcagaagctgcgcgaactagatatcagctacatcgaagaccggattccgccagcacagatcgcgcatctgcgcgcacgacgcgtatcgttaattacacggccaggcttggtaatcccatga

SEQ ID NO: 347769 - DNA, 174 bp, Pseudomonas aeruginosa
atgcagctggttgaatcgaataacactgcgatgctgaaaggcgactcaactgagaatgtattgcgtcgggaagtgttgaaactgagtgatctggatgctgaagcggtgtccgatctgtcgggcatgttcggcatgtggaaagaggccgaccactgcgacaaggactttagctga

SEQ ID NO: 347770 - DNA, 498 bp, Pseudomonas aeruginosa
atgaccctgatcccgtggccgtaccgctggctggccatggctgcgttggccgctgccctgatcggcttcggctggatcaagggcgcgggccacgttcaggcgcagtgggacgccgccgtccagaagcagaccttgcaggccgccgctgtccgcgagcgacaagcgcaagccaccgtcaaggtcgtcacccagtacgtcgatcgcgtccgcgtcgttcgcgagaagggcgaaaccatcatcaaggaggttcccgtctatgtgcccgttcaagccgatgctgcttgctctatcaaccgtggctttgtgcgcctgcacgacgctgccgccgccggtgagctgcccgagcccgcccgagatgctgatgaggccgccgcaggcattgcactctctgccgtcgcaggaaccgtcgccgccaactatcagacctgccacgagaacgtcgagcaattgaaggcgttgcaggtgtgggtcagggggatggctacgggcatcaagtag

SEQ ID NO: 347771 - DNA, 222 bp, Pseudomonas aeruginosa
atgaagacccgcatctgcctgctcgatgactggcggcgcgtgctgcgccgtgcctggagcatccgattctcgctgctggccgctgtctttacggcggcggaagtggtggtgccgatcttcggcgacgtgttgccgcgcggtctgttcgtgctgttggccttcgccgccagcatcggcgcgaccgtggcgcgcatcgttgcacagccggagatgcaccgatga

SEQ ID NO: 347772 - DNA, 291 bp, Pseudomonas aeruginosa
atgattaaagaaaccaaacctgaagacacgctgctcctgcgccgcgaggactttgaagacctgctcgaccgcgccgccgagcgcggagccgagcgctgcctcgcccatctcgggctagaaaacggccatgctgccaaggacatccgcgaactgcgcgatctgctggaggcgtggcgtgatgcccgtcgcaccgcgtggcagaccaccatcaaggtggtgaccaccggcatcctggccgcgctgctggtcggtgctgccatcaagttgaagctgatgggaggcgcgcaatga

SEQ ID NO: 347773 - DNA, 351 bp, Pseudomonas aeruginosa
atgtcatcgaccgatccgaaccttggactcacctacggctggacgctgggcgaaagcggctgggacaccggcatggacgccaacttgaagcgcttgggcgcaaccgtgggcctgtccgtcaaagaccgcgacctgaccacgccaccggccagccccatcaatggcgaccgctacatcgtgcctgccgccgccaccggcgcgtgggcgggcaaaacccaccagatcgctgtgcgcatcgatggtatgtgggaataccacacgcccaaggtgggatggctgtgctacatcgaggacgaggccaagctctcggcctacaaacccgcaggctggagtgcaggcatcgccatctga

SEQ ID NO: 347774 - DNA, 597 bp, Pseudomonas aeruginosa
atggaaccgcgcatcgatgttcacctgctgacgttgaacgaacctaccgaatggtgcgaggactgcatcgccagccttgagggcgcgccgatccagttgcacgtcgtgccgggcattgcgggtcacattggcgaagcgcgcgccgctggttttgctgcgggcagcttgccactggtgtctttcgtcgatcccgacgatctctacgaagcgagcgccttcacgcaactggcggatgcactcgatgcctgcccgcgagccgtgatggcctacaccgacgaggcattgatggatgaaacgggccgcgacatcgcggtacgtcgcttggcctacagccgctggcaacacgcgaacagcgccaaccacgtccacgggctgatcgtcatgcgccggtctgccgtcgaagctgcgcttgcggaaaccaccgatctcaacaacttcgccgactggctgctgaccctgatggtggccaagcgtggcggtgtgctgcacctacccatcgtcgggcggcattggcggcaacacccgcagcaaagccaccgcactggcgatccggaagccgttcggcgcatccggcaagccgcacccctctggagataa

SEQ ID NO: 347775 - DNA, 2274 bp, Pseudomonas aeruginosa
atgggtggcagcagcaagaagcaaaccgtcggctatcgctaccgcatgggcctgcatctggtgctgtgccaggggccggtcgatgccgtgcaggaaatccagatgggcgagcgcaccgcgtggggcgatgccgaccgtgggccgctgtccagcgggcacggcctcaccagcctgtccatcaacaagccgacgctgtttggcggcgatgagcgcgaaggcggtgtggtcggcaccatcgacgtgttgcccggtggccccagccaagggcgcaatgactacctgatggcgcgcctcggcagcgccatcccggccttccggggcgtgctgtctctggtggcgcggcaaatcctgttcgccgccaacaacccctacatcaagccgtgggcggtgcgtgtgcgccgtttcactgccggttggcacgatgccccgtggatggaatggaacgccgaggtgcgcacctgggatgacgatgccggtcaggaaatcagcgttggcatgaacccggcgcacatcctggtgcagtgcctcaccgatccgcactggggcatgggctatccgcccgactgcatcggtgacagtttctgggatgcggcgtggaagctctcagacgagggctttggcctgaacttgatctggacgcgccagcagcccatcgagagttttatcgcgcaggtgctcgaccacgtcggcggcattctctacaccgacccagaacaggggcgtttcgagctgaaactgctgcgcgacgattactggatcgagagcctgccgcaattggggccggacgagatcgtgcggctggaacgcttcgagcgcgcccagtggggcgagctgcccaacgagctgacggtggtctacaccgactggcaaaccggcggcgacgccaccgtcaccgtcgaaaacctcgccgccatccagttgcagggcggcgtgatcaaccagcgccgcgactatcccggcgtgaactacgggccactggccgcgcgactggccttgcgtgacctgcgcgccttgggttcgcccttggcgcgaatgaccctgacggtggcgcgcgacaccctggaacgtgcgccgctgccgggcgatgtgttcctgctcaactggccgcgtctgggcatcgaccagatggtggtgcgcgtgaccggcatcgacaccggcacgctgggcacattggagtggcgcatcgaagcgatggaggacgtgttcgggctggacaacgtcgtgctcgccccacctccgcccatcatcgaggagccgacgctggagccgctgccgcccgcgctggtgctggcgctggagattccgtattgggaactggcgcgcagcttgtcgcgggccgaactcgattacctcaccgacaccgataccgccgtcggcgcactggccgctgccggtggtgcagggcaattgaactggcaactcgccacgggcgcgtccgcaggcgacatcgacagcgtggccagcgaggactacgcaccgctgctcacgctggatgctgccttgcccgccagcgaagccgatgccgtcagcgtgccggtgaccgccatcagccagccggagcgactggccgtgggcgactacgcctatctggtcgatgccgctggtgacatccgcgaagccgtggcggtgctggccttcgatgcggcaaacgcgagcattgatttggcgcgcggggtgctcgacaccacgccgcaatctcacgccagtggcactcacttgatcggcgtcggcgaatggatcgcgtccgaaggcgcagagcgtgcgccgggtgagtcggtgttcgttggcgcgatcccgcgcacctccaccgatcagggcgatgcgctgctggccagtaacggccaaccgctggtgctgaccggtcggcaggccttgccgtatccgcccggatgcatccgcctcaatggccagaccgagcctgccgtggtggccggtgatctcaccgtcgcgtgggcccaccgcgaccgcacgcagcaaaccgcctacctcgtgcagcaggacgaaggcgacatcggcccggaatccggcgtgagctacacggtgcgcatccgggatcgcagtggcgcactggtgcataccgaaaccggcatcaccggcagcagttttgtctgggacgtggccagcgccgtcgccgatgccggtgcgctgggtgatcgcgtcacgctggaaattaccgccgagcgcgatgggctggagagctggcagccgcaggtacgtgaagtggatcgcgcggggtacggcctgcgctggggacagtattggggaggtgtctga

SEQ ID NO: 347776 - DNA, 207 bp, Pseudomonas aeruginosa
gtgagcgcggacgtgaccgtcaccatcgacgacgtgcgcgccgctggcctgtgcgtgaacggcacgcgcgtctggttcgcccgtcacgatctggacttccgcgcttttctgcgtgagggctgcacagctgaaaccttgctggccacgggtgacgcgatggcgttgcgggtggtcgagcacgcgcgcattcggttggaggtgcgctga

SEQ ID NO: 347777 - DNA, 789 bp, Pseudomonas aeruginosa
atgagccagaaccctttgcaggaggtggagctgtacgccttttccagcaacaccgcccagttcttcctgaccccgcacgaattcgacgtcgatctcgacggcaatcgttatcagagccttgccatcgaacgcaacgaattggcgctgggggccgaggcggccaagtcggcgctggaactgaagctgccaccgaacagcgaactggtgcggcatctgctggccactacgctgaccggcgaaaccacctccgtcaccttgcgcatcggtcagcgcgatagctggggcgactactggcggctgtcgggcacgcgctggatggggcgggtgctgggtgtggagattgccgacgatcaggcgcgcatccgctgtgaatcggcgcaggtcagcttgaagcgcatcggcttgcgcaggctctacagccgcaagtgttcgcacgtcctgtactccaatgcctgcggtgcatcgccgatcaccgacagcgcctttgtcctggaggtttatggccgcagtgtcgaactcgacggcggcgtgccgggcggcgtcagcggcggcctggccggtggctggttgcaaacgcccgatggcgcgcggcacatgatcatcagcgacaccggcagcggtgtggagctgctctatccggtggccatcgaaccgggcaccgaagtgctgctgacggtcggctgcgatcacagcacggccacctgcgccggacgcttcggcaacctcgacaactacggcggctttcccgccatcccgagcaagaacccgttttcgacgggcgtgttctga

SEQ ID NO: 347778 - DNA, 1563 bp, Pseudomonas aeruginosa
gtgaccgaccggcgcatcacccgacaggtcacggagacgtccagccagccgcttcccggcaatgcgctgacggaactgcgcggtgaggtgctgtcgcgcgccgccgcaggcagcctgaccgctgaactggccgccgaaaccgccagcgcgccgtggccaccagatcgtgctgcgatgtggctggccgaagtgctggccaagccctggccgccgctggtcgggccggtgttcgtggttgaggtattgcgccgggatacagccgccagcgccatcgtcgccaccggcatggacgcctttggtgatacgccgtggccacaagcgcaacgcggcgtgtttgcctgccgccacgactgggccgagccgctggtcgaacggctggcgtggcagaccagcgtgacgcggctggccagcggcaacgaatcgcgccaagcccgccgcaaggtgccgcgtcgcaccttgacctatcaagtcggcaacgcgcgtccgggcgatgcgctggtggccgactggctggccgaccatctgggccaacgcgcgtggtggccactgccgcagtacgccgtgccgctgaccgcgcacgccgaagccggtgcgctggccctcgatgtgcaggaggccgattggcgatatttcgtgcccgcgagcgctgatttgtggctcgactggaactgcgtgcagggctggcaaggcgatgaaatctgggcgctgctcatcgcgcctgacggttggcagcaggtgcagttgagtcaggtcgagccggacaccctgtggctcaccgagcccttggcccgccacgcgccaccgggcagcagcgtgctgccgctggtgtggggtcgcgcgctcgatcctgccgatctgacccaatgggtgccgggcatggtcggtggcaacgtggtggcccagatcgaaccagcaccgccgcccgataccgatctgctcgacgacccgtggctggacaatctgccggtctggcccgatggcaactggcgggacgatccgaccgccgtggcctcgaccaccatcacccggcaggatttctcgcccgccgatgcgtgggtgcgccgcgacgatccgtgggcaaccacgaccttccagcggcgttatctggcgaacggcccggatgagattgaaatctggcgcgcgcgcctgtgggaaacgcaggggaagctcaacgccttctggctgcccgatggcttggctccgatcctctgggtgacggcagatgccgatccggacgacggtttcatccgcgtggatggcaaagacgcctcggccttctggcatcgccccgccgcctgcctgatcgtgcatccggatggctatcagcagtacgccctgacggcgacctgccatctggacggcgatgcggtactggtgctgcgctccggcctcgacgattgggtgcccgaaggcagccgaatcattcgtcttgcccgttgccgcctcgaccacgacaccatcgacctgtactggcacagcccgacgctggtggagatcaccctgaccgcgcgccagttgcccgaaccacgcggcaacgaccgcatcacctacgagcctgcctga

SEQ ID NO: 347779 - DNA, 1059 bp, Pseudomonas aeruginosa
atggcactgctgttcatcgacggcttcgatcactacgacccgcaggcgctggacgacttcggcgagccgtggcttgcgcgcggcaaggctgcgtacctgtcgccgcaggccacccgcgtgcaggggcggcgtccgtcctcctatgcgctacgtctgccggaaggttcgggcggcggctatgtcaagaacctggacagcaccaagaccagcctgatcatcggtgcgtcgatccgcgtcgtgccctacgagaacacctacaccgaacccttgctgctgggcgtgcgcgatgccaacgcgcaggtcgcgcatctggtgaaggtcggcgaggacggacggctcaagctctaccgctggcagtacggctacgagcagttgatcaccacgtcagtgaccacggctccggcgcgcggctggcactacattgagttgcaagtcacgcaaggcaccagcaacggggtgctgtcggtgcgcatcaacggggtgctggcaatccagatgaccgcgcagaacacgattcagggcggcggccagttgctcaccgccttcctcggcgcgattcccggtcaatcatgcccgttgaccctcgatgtcgatgacttctacatcgcggatgccaccggcacgatcaacaacacctttctgggcgacgtgcgcgtcgatgccttgcaggcacaggccgatggcagcctgaaccagtggacggtgacgccctccggcactgctgcgtgggaggcggtcagcgacaaggatgaaaccacccacatcagcgcgcccagcgccggactgcgccagagcttcgatgtcgcgccactgccggtgatggccacgcctgcggtgttcggcgtgcaactgacgatgctcgcgcgcaagaccgatgcgggtttgggcaagttgaagggcctcgtggtcagcggcgcgcaaaccgccgttagccccgaggtgatcctgcaggaacagcaggcgtggcagtgcgcgctgttcgagcgcaatccgaacggcaatgtgcagtggacggaagccgccttcaacgccgctgagttcgggatggaatcggcgtga

SEQ ID NO: 347780 - DNA, 3396 bp, Pseudomonas aeruginosa
atggcgaacaaccgcgcccagatcctcatcaccgctgtcgatcagacgcgacgggccttccagtcgatcaatggcagtctgacgcaactgcgcgaccaggccggtcaggtcggtgccgtcctgtctcgtattggtggagccatcggcatcgggctgggtgtgcgcgaactggtggcggtcgcggatcagtacaagaacctgcaggcccgcctcaagctcgccgtcacctcccaagaggagttcaatcgcgccgacgcggccctctttgacattgcccagcgcaaccgcgcaccactggcggaaaccatcacgctttatgcgcggctggcaccatcggtgcaggcactggggcgttcgcaggcggacgtgctggcggccaccgatgccatcgggcaggcggtgtcgctctccggcgcatccagcgaggcggcagcaggcgcattgatgcagctcgggcaggccttcgcctcggggcaactgcgcggtgaggaattcaattccgtcgtcgaacagacaccgcgactggcgcaggccatcgccgacgggatgggcgtgccgctgggctcgctgcgggcactggcgcaggaaggcaagatcacctcggcggcggtgctcgatgctttgctcaatcagcgcgaacgcctcaccgaggaatacgcgagcctgcccgatacggtcgcgggcgcgttcacccgcctgaagaacgccttccagcgcgctttcggcgagcgcgatgccagttccggcctgacggcaggactcgcgcaagccattcagctcgtcgccaagcatctggagctgctgatcaatctggcgggtgtcgtgctggtcgccgcctttggccggatggcgggtgccttcgccaccagcatcgccgctgcgcgcgccgaagcagcggcgcgactggccaacctgcgcaccctccaagccgaggcgctggcacgggtacgtgtagccgatgccgccttggcgcaggcgcgggcgcaaggcctcgccagcagcgcactggtcgccgacgcggcgaaggcccgactgcaagcgaccggcgccagtagcgccgtgacgcaggctgttgcatccaccacgctgctggggcgggcggcagggttgttgcgcggggcgctggcactgctgggcggccccatcggcctcatcgtcaccacggtgacgctgctggcgggtgcgctctattcggcacgcaacgccgtggtcgagttcggcggcaagagcgcgtcaatcaagcagatcgccgtcgccatctgggaactggtggtcgagaaggttcttgcggtcgtcgacgccttggggcaactggtcggtgtcaacgatctctcctgggctcgcgtgcgcgaggtgatgatcggcgcgctcaccaccatcggcacggcgatccgcgcgatggtcaatggcgtcatcggcgcgttcaacgcggtcggcagtgtcgcgggtatcacggcagccttcttcgtcgagcgcttccgcaatgccttctccgacattggggcactggcgcaggccttgggccaggacgtggccgccgcgttcagcggtgatttctccatgtcatcgctacgcaccgtcctcggtcgccgactcgaggagatgcatgactttggcgaggcgctcgcagacaccgtgcgcgacgcggtaacgcgcgactacgtcggggaagctgctcaggccatcgctggccgcatccgggctgaacaagagcagccgggcgtattcggtcgcgcacaaccgccgacgccacccacttccggcaagagcgcacaggccgacaaactggccctggtacgggcgcaggccgaggcggaattcaagctcctcaaggatgccttggagcgtcaatcgcgggcgctggatgccgcgctcgaagatcggttgatttcgctgaaggattactacgccgccaagacgcggattgagcagcaggaaattgacgcggaaatccgccgcgtacaggcatcgctcgcggaacagcaacggctggtcaatacgggcaaggacgaatccgcccgcctcaaggcgaaggccgaagtcgccaaggcggaagccgagctgatcgtactcaacaaccggcgcagcgacatcgagcaggccaatgcccgcgcagcggcgcaggccgaacgcgaactggctgatgccttggcgcaaacgcgtgaggaactggcgcagatcaccggcaccgccaccgatgccgaccggcaggcggcgattgcccgcagctaccgcgatctgcgcgcgcgtctgaccgctgaaagcgatgccgacggcgtgtcgctggtggatcggctgatcgacgtcaaagccgcgcaagccaatctggcagcgctcgaagcccagtggcagcaagtcaccgaacgcctacgcaatgcgcaggaagccatcggcatccagcagcaggcgggcctgctgaccgaagcgcaggcgcgtcagcagatcgtcgccttgcagcagcaatcggccagcgagatggaacgtctgttgccgaccatgcagcaggccgcgcaggccatcggcccggacgcggtgatccgcgtgcaggcgtggcgcaacgaactggagcgcacccgtctcacggtcgatgaaatggctccactgtggaaccgcatcggcgagagtttcggctcggccctcaacggcatgatcaccggtgcgcagacctggcgcagcgccttggcgagcatcttccagcaggtggccgacgccttcctgcagcagatcgtgatccagccgtttcagcagtggatggcgatgcaggtgcggatgctggcgatgaagctcggcttcatccagcaggaacaaaccgccgacgtggccgccagtaccgccaaggtcgcccagaaaaccaccgagaccaccgccgtggtgtcgatggatgcggccaaggccggagccggtgcggccgcgtcgcaggcatccattcctgtcgtcggcccggggttggccattgccgcaatggtggcgatggtcgcggcggtgatggcgctgttgggcggcatcaagaaattcgcaggcggcggtctggtgtccggccccggcagcgccacatcggattcgattccggcgcgactgtcagcaggcgaatacgtggtgcgcgccgctgccgtgcggcaagtgggcgtggcctttctcgactcgatcaacggcctgtccagctgggcgcaggggccacgtttccgtggcggtgagctggcctttgcggcaggcgggctggtgccggaagtgaaggtgccgcccgcgcagccgcagatgaatcaggcggtgcgcatcgtcaacgccatcgatccgggtgtcacccacgaccacctgcaaacgcctgccggagagcgggtcatcgtcaacatcatcgggcgcaacgcgcgggccatccgctcggcgctgaatggctga

SEQ ID NO: 347781 - DNA, 648 bp, Pseudomonas aeruginosa
atgaagattgatctggttgccgagggtctactggatcggcggcgcttcaacgtctggcaagccgatacccacaaggccatccacgccgctgttgcccgtgcaatgcgcgacagcggcaaagacatggccgcacaggtacgcggcgagatgcgcgccagcttccgcgccgccagccccaagttcctgcgctcgatacacgccaaggtgttcgaccgcaaagccaatgcgtttccggccctctacctcggctcgaaggtgccgtggctggggcttcatgagcgcggcggaacgattcagggacggatgctgatcccgctgttgccgcagcaccagcgcatcgggcgcaaggccttcgcccgggtcattgatgcgctgatgcgatccggcaacgcgtggttcatcgagaaaaacggccagaagattctgatggccgagaacatcagcgagaacgcgcgcccactggcccggtttcgtcgagccgagcgcgagcgcagtggcgcgaaacgccttcggcgcggacaggagattcccattgccgtgctggtgcagcgcgtgaacctgaaaaaacgcttcgacctcaaccgtgcggtgcgggtcgagcttccccgcctgacgtcggccatccgcaaggcaatgtccaagagttaa

SEQ ID NO: 347782 - DNA, 414 bp, Pseudomonas aeruginosa
atggatgacttcaaaacctttccgccggcaccggtggtcgtgaccttgtccggcacggcgctggagctgacgccgatccggctgggtgaattgccacggctgctggccgtggtgcgcccgctggccgaagacatcggcaccgacccggactggatggcgctgctgggtcggcacggcgacgccgtgctcgatctgctggccatcaccacacggcgcgaacgcgcatggatcaacgacctgtcgttggaggatgcggtgcaactggtcgctgccgtgttcgaggtgaatgcggattttttcgtggcgcaggtcgtgccgagcattcagggcgcagccgagcgactcgcgccaacgctgcgcacactgacgaacgcggttggcagtcctcttgggatagcgccgtcgcccgcctga

SEQ ID NO: 347783 - DNA, 378 bp, Pseudomonas aeruginosa
atgaccgccattgcacaaccgcagacgctgggcgacctgctcaagtacgaagcgccgaatctgtactcgcgcgaaaccgataccgtggccgccgggcaaaagctcgcgctgggcaccgtgctcgggcgcgataccaccagcagcaaactcaaagccttcgatccggacgccaccgacggcagcgaaatcgccatcggcgtcctggctagcgatgtggatgccacgctgatcgaccgcgacgacgcgctggtgatcgcgcgccacgccatcgtcgcgcgcggcgcactggtctggccgaccggcatcagcaccgtgcagaaggccgccgccatcgcccagctcaccttcttgggcgtgctggtgcgcgacagcgcctga

SEQ ID NO: 347784 - DNA, 1335 bp, Pseudomonas aeruginosa
atgcccctcatccatctggcgtcccgcatcctcgggacgccgctgctcattgcgcgcccgaaactcgacgtgatcctctccgtgctgggttcacgcatcggcttgcccgaccgggacatggcctttcccatcccagaacccaagcaggcccgggcgtttgcgcaatcgggcatcgccgtcattccggtgttcggcaccctggtcaaacgctcgctgggcctcgatgccgcctcgggcctcatggcctacgacgaactggaatcccggctggagactgcgctggccgatccgcaggtggcgggcatcctgctcgatctggattctcccggcggcgaagcgggcggcgtgttcgagttggccgagcgcatccgcgccgccagccggatcaagccgatctgggcgcacgccaacgatgccgcgtactcggcggcctacgccattgccgccgcctgccagcgtttgacgctgtcgcaaaccgccggagtgggttccgtcggtgtgatcgcgctgcacgtcgatcaggccgtcaagaatgccaaggacggactgcactacaccgctgtttttgccggtggccacaagaacgatctctcgccgcacgaacctttgagcccgcaggcggcgggcacgctgcaaagcgaagttgaccggctctacgggatcttcacggcgcaggttgccgcgatgcgccaactggatgtggacacggtgcgcgccaccgaagccgctgtgtacttcggcgagaacgcggtggccgcagggctggccgacgcggtgatgcccttcgatcaggtgctggccgaattcgccgaggcgttggccgcccagcgcacgcaggccacgccacaagcccggtcatctgccttgccgcgcgcttcgcctcccacgcttcaccacgcccctcgatccacctctttcactttggagaacaccatgaccgaacacccggacgaacacgtcgccctcgacgatcttcacgatccacacgaaccacacgatccgaccgaccccgcccagcaggccgagcagccgcaagacgaaggcgatccgcaaccggcacctgtcgccagcaccgcactggcgcagtccttcgccagcgggcgcgttcaggcgcaggccattgccgagatgtgcctgatcgcgggccagtcgcaacgcacggcggaattcctcgccgcaggattttccgaagcgcaggtgcgccgggccttgctcgatgcccgtgccgaccagcccgaaatcgcctcgcgcatcaccgccgataccggcatcagccagcgcccggaaaacagtcccgtggtcgctgccgtcaagaaactcaccgccaaggagtaa

SEQ ID NO: 347785 - DNA, 393 bp, Pseudomonas aeruginosa
atgggcctcgcatcgcgcatcacggcgctggccagccgtatcggtctggaggtcaagaccaagatcgacgccacccatcccggcttggcccgggcgtgggtgtgcttcggctacgtcggcagccagatcgtcgtgcgctcctcgcacaacgtggccagcgtgacccgccttggcaccgggcgctaccgcgtgaccttcgccaatgcgatggccgatgccgattactgctgggtggcttccgtggtcaagaacccgaccattctgggtttgcagcgtgtggccctggtgcgagccagtggtgacaccaaaaccgcgcagcaactcgatgtcagctgcgcgtcctccacgttggcgaccgatgccgacgaaatcaacctcacggtgtaccgctga

SEQ ID NO: 347786 - DNA, 567 bp, Pseudomonas aeruginosa
atgggactctcgattcgcgcctacgcgcgccaccgtggcgtgtcgcacgtggccgtgaagaaggccatcgacacggggcggatcaccgcactgccagacggcacgattgatccggatgcggcggatgcgcagtgggcacaaaacacattgcagccacgccgagcggttgcgcaggagcaggccagcagcccgaaggcccgccgtgcgcccgcgactgccgatgcaacgccgcaacgcgatgcacccgaacccggcaacccgccgctgtcagcgggcggcacgtcgctgttacaggcacgtaccgtcaacgaagtgctcaaggcccagctcaacaaggtggagctggcgcaccgcaagaaggaactggtggatcgggcgcaggccgtggcccacgtgttcaagctcgcgcgcatcgaacgcgacgcgtggttgaactggcctgcacgcatctccgggcagatggcatccgcgctcggcgtcgacgcgcaccagatgcatgtcgcactggaagctgccgtgcgtgagcacctgattgagttgggcgaactgcgcccgcgtgtggattga

SEQ ID NO: 347787 - DNA, 207 bp, Pseudomonas aeruginosa
atgagcctgatcgacaccatcctcaccctgatcgcccagaagcacctgggcatcgacaccttggaaacccgccacgccgacagcctggacttccacgacacggcggtgtggtgcatccgggacgcgctggaagcggccttcaaggcgggcgtcgaggttgggatttctttgccggaacccacggaagcggagatcgccaaggactga

SEQ ID NO: 347788 - DNA, 597 bp, Pseudomonas aeruginosa
atgaccaccacccaactcaccccggcccagcacgccatcctcgccaaggccatcaacaccagcgcgggcaagatcgaatggttccccgacaacatcaaaggcggcgcacgcaagaaggtgctcgacggcctgttcaaccgcgccctgatcacgcccgatggcgagggctggtgcgtcgccgccgagggctacgacgccttgggcatgaagcgcccgcgcatctccaaattcgaggcaaacctcgacgcgatcatcgccaacgccgaatcggcgcaggacgcgccggaggccaccgcagcagcgcagaccaccgacgccgagttggaggccgacgtggccgcgtgtgaggccgagtgggccaagaattcgacgcccgcacaggccaagccccgcactcgggacaacagcaagcaggccgaagtgatccggatgctgcaacgccccgagggcgcaaccatcggccagatctgcaccgccaccggctggcaggcgcacacggtgcgcggcacctttgccggagccttcaagaaaaaactcggcctgaccatcacgtcggacaagccacagggcggcgagcgggtctaccgcatcgcctaa

SEQ ID NO: 347789 - DNA, 288 bp, Pseudomonas aeruginosa
atgaaatcccaagccgattacgagatcgaatacgccacccgcagcggccacgacgcgctggccaacgcccgcgccacgctggccaacgcccgcgccacgctggagcgcgccctggccgaactcgaccactacatcgcccgctacgagggcgcggaggacatcaaggacaaggccaacgtgctcaactgggcgctcgggcacctcgccacctacgtcccgagcaacgtgcgtctggacatgatcgccaccgcgcaagccgagctgatgcgcgtccgcgccgcccaatga

SEQ ID NO: 347790 - DNA, 366 bp, Pseudomonas aeruginosa
atgaccaccaaccacatccccgccacccaaaacaccgactggggattttggggcacgatgaacgaacacgccgaaaccgcgtggccgcaggccataaccgccatctcgaacgccaccggccagcccctcgaatcggtgcgcatcttcctcgacagccgccacggccgccactttgccgacgacgtgcagaacgggctctttgaaggcaagaccctgcaggacgccatcgacgcagccaccaccaagtggatgtgctggacgattggccgccagaccagcaaggactacggcatcccgcgcggactgccttacctcacgggctacgtgatccattgcggcatcgtcgaagagcaagaagccgcctga

SEQ ID NO: 347791 - DNA, 225 bp, Pseudomonas aeruginosa
atgaacacgcccgccgccgaacgcgaacaggcgctgcgttggctgattgccaaccggcgtcaggatgtctccatcgaacaggccgtgcgcgtgatgtgcttggcgctgccgcgcgatctcgccacgatgcaaatcctgcggcgcattgccgaggaagaagaagccaatcaaccccgccagccattcaactggcgcacacctcctggtctgccgcctcgcggatag

SEQ ID NO: 347792 - DNA, 1422 bp, Pseudomonas aeruginosa
ttgaacacgctcaacgtcgaataccgcaaggtcgaggcgctgattccctacgcccgcaacccgcgcacgcacgctgaaggccagatcgccaaaatcgcggccagcatcgtcgagtacggctggacgaacccgatcctggtcgatggcgacaacggcatcattgccgggcacggccgtttggccgctgcccgcaagctggggctggatcaggtaccggtgatcgaactggcgcatctcaccgtcgcgcagaagcgcgcgctggtgatcgccgacaaccggctggcgctcgatgcgggctgggacgaggagatgctggcgctggaactggccgacctgtccgaggccgggtacgaccttacgctgaccggcttcgaggatgccgagatcgaggcgctgctcgctggcgacgtgatcaatgccgatcctgataccgaggcagaaccggatgccgacgagccggacgcagcggacgacgtgccagatgcacccgtcgtggcagtgtcccgccccggtgatgtctgggccatcggccagcaccgtctgatctgcggcgatgccaccgaccgggccgtggtcgctgcgttgatgaacggcgataccgcacggctgtgcttcacctcgccaccctacggcaaccagcgcgactacacctcgggcggcatcaccgattgggatggcctgatgcgtggcgtgtttgcgcacttgccgatgacagacgacggtcaggtgctggtcaacctggggctgatccaccgcgacaacgaagtgatcccgtattgggatgcgtggctcggctggatgcgccagcagggttggcggcgcttcgcgtggtacgtctgggatcaggggccggggatgccgggcgactgggcaggacgcttcgccccaagcttcgagttcgttttccacttcaaccgtgaaagccgcaagcccaacaagatcgtgccctgcaagcacgcgggccaggaatcgcatctgcgcgccgatggctcgtccacggcgatgcgcggcaggaatggcgaagtcggcggctggacgcacaagggccagcccacgcaggacacgcgcattcccgacagcgtgatccgcgtgatgcgccacaagggcaagatcggtcaggacatcgaccaccctgccgtattcccggtcgcactgccggagttcgtgattgaggcctacacggtcgtgggcgacatcgtgttcgaacccttcggcggcagcggcacgacgatgctggctgccgagcgcacgggccgcatctgccgcagcgtggaaatcgccccggaatacgtggacgtcgcgctcaagcgcttccagcagaaccatcccggtgtgccggtcacgctgatcgccaccggccagtccttcgagcaggtcgccgccgggcgcgccaccaccgttgatgatgaggtgctggcatga

SEQ ID NO: 347793 - DNA, 429 bp, Pseudomonas aeruginosa
atggctgaccatcgcaacacctggacgattgaggacgtggctgcgcgtttcgaagatgcggccagcaccggacgacgcctgcctccggtacgcgtgcagggctatttcaattgctggcccgccttcgtccgcacggagtgggaagcgtttgctgcggatgagaaggtgtaccgccccttcccaccgagccccgaggccatcgaccggatgctggaggtgatgcgttgggtgcaatggctggagatcgagcagcgccacctcgtatggatgcgggccaagcgatacggctggcgggacatcacgatccgcttcgcctgcgaccgcacgacggcgtggcggaggtggcagcgtgcgctggagatcgtggcgacgaagctcaacggcgaaggcgcgcggctcccgtccaaaaacgtgggcaatttagggtaa

SEQ ID NO: 347794 - DNA, 210 bp, Pseudomonas aeruginosa
atgaaggtgccgacaccccaataccgctgcccgctgggcaggttgcagccggaagttcaggacgtggatgtcatcaagcaacgcggctggcgcgaccagcacatcctcgtcgtcaatgctgacgacgagcgtctggactggatggagcgcgagttggtgcgccagatcggcgaacgtctctacggcacgggaggacgacgtcatggctga

SEQ ID NO: 347795 - DNA, 2298 bp, Pseudomonas aeruginosa
atgatcgacttcaacgacaccgccgcccccaccgaaagccaagcacgcatcgtcaacgatgccgagagggaggaactgcgcgcagaacttctcgcccggctggaatcggtgctgttcactctgttcccggcaggcaagaagcgccggggcaacttcctgatcggtgatgtgctgggtagccctggcgacagccttgaggtggtgcttgagggcgaaaaggcaggcctatggacggatcgtgccgacaactccggcggcgatgtgtacgcgctgatcggcaatcacttcggcatcgatgtgacccgcgactttctgcgcgtgctcgatgccgccgccgatctgctcggtcgtacgcgttccacgccggtgcgcaaggccaacaagaaggacgtgccggtagacgaactcggccccgccaccgcgaagtgggactatctcgacgcccaaggccatctcatcgccgtcgtttaccgctacgacccgcccggacagaagaagcagttccggccctgggatgcgaagcggcgcaagatggcaccgcccgacccgcgtccgctctacaaccagccaggcatgaccagtaccgcgcaggtggtgctggtcgaaggcgagaaatgcgcgcaggccctgatcgacgcgggcatcgtggccaccacggcgatgcacggcgcgaacgctccggtcgacaagaccgactggtcgccattggccggaaaggccgtgctgatctggcccgaccgcgataagccgggctgggagtacgccacgcaggcggcacaggccatcttgtcggcgggggccaaatcctgccacgtcctctatccgcccgaagaggcggcagaaggctgggacgtggcagatgccatcgccgagggctttgatgtcgccaccttcctcacccacggcccacgtttgcagatgcacgacgtcgccgatgacgttgatccggtggtcagcagcgacgaatccgtctggggtacggaggacgcgctggcgctgtccttcacgcgccgctaccaccgcgactggcgctacgtggctggctggggaaagtggctggtgtgggacggacaacgctggcgcaccgaagacacgctggcggccacggacctgattcgcagcgtttgtcgccagacggctgtacgcgccgacaaccccaaggtcgccgccaaattggccagcgcaggaacggtcggcggtgtggaacgcctagcgcgtgctgaccgcaggcacgcggccaccaccgacgaatgggatgcagatccgtggctgctcaacacgccgggcggcgtggtcgatctcaagacaggccggatgcgcccgcacgagcgcgccgaccggatgaccaagatcaccacagccacgcccagcggcgactgcccgacctggaggcagttcatcgacgaggtcacgggtggcgacaaggaacttgagtcctacctgcaacggatggtcggttacgcgctgaccgggtcgacgcaagagcacgcgctgtttttcctgtacggcacgggcgcgaacggcaagtcggtgttcgtcaacacgttggccacgatcctgggcgactacgcgaccaacgcgccgatggacaccttcatggagacgcgcaccgaccggcacccgaccgatatggcgggactgcgcggtgcgcgcttcgtggcggccatcgaaactgaacagggaaaacggtgggccgagtccaagctcaagaacctcaccggtggcgacaagatttcagcgcgcttcatgcgccaggacttctttgagttcttcccgcagttcaagttgttcgtggcgggcaaccacaagcccgctattcgcaatatcgacgaggcgatgaaacgcaggctgcacctgatccctttcacgatcaccgtgccgcccgagcgccgcgacaagagcctgcaacagaagctcctggccgaacgtgacggcatcctcgcgtgggccgtgcagggttgtctcgactggcagcgccacggacgactcagcccgccacaacgcgtggtggacgccaccgaggagtatttcgaagccgaggacgccctgggccgctggctcgatgagcgctgcgtgcgcgagcccaacgccaagtcgctgaccgccgagttgttcaacgactggaagctgtgggctgaggctgccggggaattcacgggctcccaaaagcgctttgccgatctgctgctcacccgtggcatggacaaatggcgcaacggcatgggtctgcgcgggtttcagggcgtgggcctcaagtacccgcccgcaccgtcctacaccccttacgccgatgactga

SEQ ID NO: 347796 - DNA, 255 bp, Pseudomonas aeruginosa
atgaccgacaacaccctttcatctaccggcatcgaaccgatgatcgacgccaagcaggcagctgccgcgctgcgcctgccgtattactggttcgccgaccacgcgatgcgcagcaagtaccggattcctcactacctgatgggtgggctggtgcgctatcgcctgtcagagctttctacttgggcggcacgtaatgcggcagcgcaaagccgcttcgcgggagatacggataccgccgtcgaggaggccgaatga

SEQ ID NO: 347797 - DNA, 762 bp, Pseudomonas aeruginosa
atgagtgcaatcattcccttccagtttgaagcgcacgctgtgcgcgttcaggtcgacgacgcgggccagccgtggttcaacgccgccgacgtctgcgcggctttggaactctcgaatccgcgcgatgctctcaccaaacacgtcgattcggatgatgtcgcaaaacgcgacgtcatcgacaaccttggacgcacccagcgcgccaaccacgtcaacgagtcgggcctctacgccctgatcctcggcagcaccaaggatgccgctaagcgcttcaaacgttgggtgaccagcgaggtgctgcccgcgatccgcaagaccggcagctatgccgttcccgctgcgctggcggccttgcctgcaccgacccatgaccgtgtatccgcgattctgctgatcggcgaggctgtggcgaaggtgccgggcgtcaagccgggcatcgcagcggcggcaacgctcacctgcattcaggagaacacgggcatcaccaccgaggtgctgcgccgcgcgctgccgtcggccaacgaaccgatctgcgcgctcaacgccacccagctcggcaagctgctcaaccgctcggccaaagccacgaaccagatgctggcagcggctggcctgcagttccggaacgaccgtgacgaatgggaactgtccgaggctggtgaagcatgggccgaggccatgccgtactcgcgcaacggccacagcggctaccagatcctctggaatcccgccgtcgccgatgaactgaaggaggccgcgtaa

SEQ ID NO: 347798 - DNA, 477 bp, Pseudomonas aeruginosa
atgagcgatctaaccatcttccccgccgacatcgccgagatgtccgtcagccaactggccgcactgccgcccgagcagaagcgcgagatcgacaagaacctcgacgcggctatcgactggctcaagaaggcccgcaccaagttcgacgcggcgctggatcattgctacggcgagcaggcccgcgccgcgctgcgtgaatccggccgcgatttcggcaccgcccacatcagcgatggcccgctgcggctcaagttcgagttgcccaagaaggtcagctggaaccagcagcaattgaccgaaatcgccgaacgcatcgtggcgtcaggcgagaaggtcgagggctacctcgacatcaagttgtccgtctccgaatcccgcttcacgaactggccgcctgccttgcagcagcagttcgccgccgctcgcaccgtggattccggcaagccgtctttcactctttcccttgattcggagtaa

SEQ ID NO: 347799 - DNA, 264 bp, Pseudomonas aeruginosa
atgcaaacccaagttccagcaacccaaaccggtcgggattccttccgacccaaccccggcggtgccgtgtgcatcgccctcgacgaaaacgagctcgccatccgctgggggctctccgtcaagaccctgcgccgctggcgtcaggaacagctcggaccgatctactgcaagctcggccgccgggtcacctacctcctgcacgaaatcgaagcctttgagcggcgcgtctcgcgttactccagcttcactcgtgcgtatcagtga

SEQ ID NO: 347800 - DNA, 930 bp, Pseudomonas aeruginosa
atgtcattgcatctacgcttcttcaccgccatcgacaggctatcgagcctggatacaccagtgctggccacaacgttcggacgtgaccgttctcagctcctgcagcggggctggatcaccgacgagggtcatctcacgcatgtcatggccccgttcctcgactctgaatgcgaggtcgagatcgaggccgatcccgatgcgggctgctaccgctatcgcagtccgctggatgggcgcactgtggtgcagcccttgaacgagatcgcactgtgcggtatccagatcgaacgatggctgaccgatctggcacgcatggtgggcatcgaagatcggcgacgtgccagccgcccatgccgcacgccacagcatctctggcatctcggcgacctgcgcgtcgccgggacgcatgattttgccccggtgtttgttgggcgcgcgtgggcacgtgcgccagccgtcaatacatcttctgttctggctgatcctgcatggtcacgcggcggtgtgattttgcaggcccgccaagttcaggcagatctgccccgtgatcatgtgatccgggcgctcgatgagttcgttcgcctggacaatgggcaggatgttttcgatgcaagcgcattcgaccgcgtgctgcgcggctacgtcacgcccagcggtgagtccgagccattgcagtacctgcagggcacccgcgtgaaattgcctcactttgcttcatcacgattggtgagtgatacgcgcgcagcaattctgaaagtgatgtggggcgtggaaggcaagacacctccggccatgaagtgggcagacgtcaagacgcaagttcactctgctgcccggtcatttgatgaggcctttggtgacaaggaaacaagggaggacttcctcgttctcgtgaagtctggcggctactaccaagtgcgccgccagtag

SEQ ID NO: 347801 - DNA, 1425 bp, Pseudomonas aeruginosa
atgcctaccggtcacaccaccaccgcccagcaggagaaagcggtcaacccgaagtcgtcaccgaagcgggcgcgcgagcaacggtcagatgatggccctgccatcctccccggaatggagcatttcgtcgatctgctgcgcaaggtcaagcgtccggcgctggtggtgcgcctgcttgaactggccagcggcgacgcgttgccggaacttcaggcattggccgatgcctccaaaggaaaactgccggtcgaatcccgtcaggcatttttccactgcgtggccaaactggatgctgccatccgccagcgcctcgaggatgccgtcgaacgagtgatcctgctcagcgatgactacggcgctcaagctgttcaggcggtgctcgacgcccggcgcgaagacgatgccaccgtgctcgcaatgcccagcgaccgccatagccgcgcattgcacctgtatctcctgcaggagtttcccgaggctggagcacgccgcgaagcgcgcttcgatcacgcggagcacgaacaggtgatgcaccgccagtggaaaagcgagcacttctccagccactaccttggccccaagggcgtggagccgaaaaatggcgatgacatccaggaagcacttcgcacacggattgcagagctgttcccgcatgtgccgaaagagcaaatcctgatcgagcagtttgtgcggtgcggcttgtcccacgcacagcgcgatgacgatgaagatgccgacgacgagccgctgacacagctgcacacgctgtgcgcaaccttcaatggttctacggcgcattaccggcaggtgcaagacggccaggtggtcgaccacgaggaaccagctgccatgtcggcacgcttttcctgggaaccggcaaccggggcgctgacagtgttctgcgaagaccgggaaaagcgccgggagcttgccaccatcttccgcgacgtggcgctggcgcacgagggcgcgattgacgacatgccgatgcgtcaattcgatctgctcgggttctcgacctcggccatgctcaagcggctggagcaggatcgcatcgcggacatcgagcgcatcgacattcttcagatcaaggtagccaagccctttgaacagttgctcgaacttggcggcaagaccgtcgctcggcagctggcgagcaagatggagatcacccgcgatcggcgtgacagccgcaacgtctatcaggtcgcctacgaggattacagcgccgaagatctgagccagtacgcactggtacaggtgaagctggtgatgcgcatggccacacagccccaccgcaaggcacacaacgtcgccgtccagatcacagcccccaacggcctgaacgacaagagtaagaccgaggacgaccgcaagcgcgtactggagcagttgattcgcctcggcgtcttgagcgaattctga

SEQ ID NO: 347802 - DNA, 813 bp, Pseudomonas aeruginosa
atgccggttctgaccctcgactaccggcattgcgaccgcaagcgccccaaattcatcaagcacgttgagatcgaagccatcgcagcactcgcccgccagcagctggtgggaagcggtgttgatgccattgccttcgacacgctgcgccagatcgaccgtttgaagatcaacggtatcgacttcgcgctcgaggtcagcactgattgcgaggtgcatgacgaggatggcaaccacgttttcggcatctgcgagtatgacccctacgcaccagacaccgcgatggtgtgcgtgtcgcccgtcggcgaaaaactcagtgagctgctggctctgagcacgctggcacatgaactcggccacgctgtgttcgatgccccaggctggatcatggacggcagcaaaggcccaggactgttcgatgccctggagccagtcgtgcagcgcgcctaccgcaccaccacgccggacagcgagcacttggcaaaagtacctacagccccatcagcagcactggcgacggaagtgcattttgccgagctgcgtgccaacgagttcatgggctcgctgctggtgccgcgcaagctcttgagcacggcagctgaggagctggcatcggaatacaacgtcagcattcatcgtggcccgtcgcttgatccggagattcccggcaccagcatgcaactcgccgccagcgacgccgccgacatggaattgatgcaacgtgcgctggccctgcgttttggcgtcaatccacgctttgtgcaggtgcgcctgcaacgctacggcctgatccgcccggagaacgccgtgcgctga

SEQ ID NO: 347803 - DNA, 279 bp, Pseudomonas aeruginosa
atgcctttcggagccttcattcgcaaaaagcgcgaagagaagaacatccagatgaacgagttcgcgcgtcagcttgagatttcgcctgcctactggtcgcgcatcgaacgcgatatggaaaaaccgcccaaggacgagctgatccgcaaggcagcagagatcttgggcatcgacccggacgacgcctttgtcgaagccagtcgcctgccgccggatatgcgtgaggatgtgggcaacgtggtgcggatgtaccgccgggaagtcacggagaaaaagtga

SEQ ID NO: 347804 - DNA, 276 bp, Pseudomonas aeruginosa
atgaacgcgctggtcgggcaggaagccaaggcctccccttgtcgaattggctctctgttttggctcatccgcgacgagggtgcggactatggcagccgcaaggatggcggcgatttcgccagcacgggcgctggcgctcatctccgtgggagatgcgagttcgatgttcttcatgacggctccgaggaattgcaaccgtcagaaatagtgagcctgatcgtccgaagcggatggcaattccgggtaatcggcggcaaaaactttcgcgttaactaa

SEQ ID NO: 347805 - DNA, 450 bp, Pseudomonas aeruginosa
atgaacgagaaacaagcttccgtcgccgcacggatcgcggagctggcctgcctgccgatgtccgagctttggaccgtatgggatcggtatttcccgcgccgaccggactaccccaaccgcacgcacgtcgagtcccggatcgcctacaagctgcaggaggaggccttcggtggccttgcgcccgagaccaagcagcgcctagaagccatcggcgcaaaacactccaagatcaagctgcgggccaagccgcgcgagttcgatttcgcgccgggcacgatcctgctgcgcgaatggggcgagcgcgagcaccgggtgacggtcaccgccgaggggctgttcgagtaccaggggcgcaactttaagagcctgacggcggtggcccgccacatcacgggcgcacactggtctgggccgctgttctttggcctgagcaagggaggtgcgcgatga

SEQ ID NO: 347806 - DNA, 1380 bp, Pseudomonas aeruginosa
atgagcgagatcgccagcaccaaggcccgcaagcgttgcgccgtctactgccgggtgtcctcggatgaacggcttgaccaggagttcaactccatcgacgcccagaaggaggcgggccacgcctacgtcgccagccagcgatccgagggttggattccggtggccgacgactacgacgaccctggcttctccggtggcaacacggatcggcccgggctgaaacgcctgatggcggacattgagcgcggccagatcgacatcgtcgtggtctacaagatcgaccgcctgacgcgcagcttggccgacttctccaagatggtcgaagtgttcgagcgtcacgaggtgtccttcgtatcggtcacccagcagttcaacactaccacctcgatgggtcggctgatgctcaacgtgctgctgtcctttgcccagtttgagcgggaagtcaccggcgagcgcatccgcgacaagattgccgccgccaagcggaagggaatgtggatgggcggtgtcccgcccctgggctacgacgtcgacaaccgcctcctggtcatcaacgaggcggaggcggctgtggtgcgccgtatcttcgaggagatgctgaccatcggctctccgacccagatcgccgtcaatctcaccgccgacggcatcacaaccaaagcctggacgacgcaggagggccaggcccgcaacggcacgcgcatcgacaaaaagtacctgcacaagctgctgcgcaaccgcatctacctgggcgagttgtcgcacaaggggaactggtaccccggcgctcacctgccgatcatcgaccgggaactgtgggacaaggttcacgcggtgctggccagggatgggcacgcccggtcggtggaaaccaagatccggtcgcgcaccgacgccttgctgcgtggcttgctgtacgccccctcgggcgaacggatgtacccaacctactcacgcaagaacgggcgcaagtaccactactacgtgtccaagtcggaaagccgattcggagcgccgggcaagagctacgagcggctgcccgcaccggagattgaggcggcagtggtggcccaaatccgcacggtgctgaccagcccagaatccatcgcatcggtggtgcgccacatccagcgcaacggcggacaggtcgatgaagccaccacggtgatggcgatgggacggctcaacgacgtgtgggatcagttgttcccggtcgagcgccatcgcatcgccaacctgatgatcgagcgcatcgacctcgtccacgtcggcgaggtgcagggtatcaaggtgaagtggcgggaactggggtgggacgccctgatcggtgaattcgccccgagagggatcggcgcagaactggtggaggtcgaggcctga

SEQ ID NO: 347807 - DNA, 372 bp, Pseudomonas aeruginosa
atggacgacacaatggaaaccttcgtgccactgacattccgccgccggggcgcgcggcgcgtggccgccgatgaccgccacgtccacgatgtgacgctgttggagggggtggcacgcggtttctactggcagcacctcgtggacaccggcgagatgaagagtggctcggagatcgcccgggccgaaggcttacacccctcggtcaccaacgaactgatgcgcctgagcctgctcgcgcccgacatcctcgagctgctgatgaccggacggcagccgcgccggatgaacctgatttggttccagcgcaacccgctgccggtggattgggaggcgcaacgccagatcgtgaaacgctttgaggaggacgcatga

SEQ ID NO: 347808 - DNA, 474 bp, Pseudomonas aeruginosa
atgagcaagaagcaccggggccggttcaagggtgatccagtcacttatcaactgccgagtccggctggcggagtacaacttgaaaccttcgtgccctggacactggtgaagcggggcttgaagaagcaggtcatcacgcccttggacgcaccacaggaattcctctccgaggccacccgggagcgggaagcccggtcggccgcgcaggacaccgcgttgatgcgagcgcttggactggcccaccactggcaacgcctgctggacgagcagcgggcggcgtcggtggccgagattgccgaggccgaaggcatggacgtgacgcaggtgcgccgggtcatgcggctgacgctcctggccccggaggtcgtggaacggctggcgggttcgcccgacgccgtgctggagaaggtgatgcgccgcccctggcctaacgcgtggggcgaccagatgcgggtgctcgcgccacccggatga

SEQ ID NO: 347809 - DNA, 1974 bp, Pseudomonas aeruginosa
atgctgcggaaaaaccagaagatcgatggcgagccggtctacaacggcgaccgcgcgacactcaccaggatcgagcgcgtgcagaccggcacagacgataacggcgagccgatctacgacaccaagctcactgcgcgccttgatcgcaccaaggaggaggtgagctggagcctgtccgactacgcctcgatcgatcacgcctacgcgatgaccgtgcacaagagccagggtctcacagtcgaccgcgcgttctacgtgacctccgagtccacggatcgccgcctcgcttacgtggcatttacgcgatcgcgctatgcctgcgcgttctacaccgcgaatgaccaggattcgctcgacaccctcgcgcgcaacaccgaaggctttaagagcaaacgctgcgccctggacgccgataaagagttccgcgccctgatccgcgccaacgctgaagccggactttacgaagatcggccgatcaaggcccagcagccgagcaccaaggatctactggagaaagccggcgagcgtttcgagtacccgaccgagccgaaagccgagcccaaaaagtcgccagagatccaggtcatgccagccacgcaggccgaccatgacctttccgtcgcccggggtttcctggtgaccgggctgatcgatctgccaaacgacacccgccagaagccgggcaaaccctatgagctgccggccgacgccaagcgcgttgcgctgttggccgagccagtccctctactcccaaccccaaagcaggaaaacgaaaatgagcgagctgaacgatctgttgccgccgaccaaggccaagtaggttccgatatggctaagcctcgtcgcgtctggacgaaagccgagcagcaacgggagacgcaggcgatccgtgacggcgtagaccttcgcgcccacgccgagcggttggggtacgtccaggtgagcggggcgggcgcgaaactgcgtctcgaaaacaagaccctcgacaaggcggatcccatgcgcgaaatcaccttgcgcatcaacgcacgcggcgaggaaagttggatcgccgtcaagggcggctcaggctccggcctcggcggcgatgtgttccatctgcatcagcacgccaccggggcgagcttcctcgaaacccgtgacgaactgcggaagatcgcctttggacgtgacttcgaatccgggatcaagcaccaggggacgccgactgcagagcgtgccgccctggccgagcagcgtcgcgagcaggaggcgctgaaggccgagtttcgccgcgcagcggcatataaacagtacacgcaggccagcgaccagcccaatgctttcctcgtctcgcgtggaatctctgagcagaccctcgccgaaacgaaatggcgcactgaccggcacggcaacgccgtttttccgcatgtgcgcgaagacgggaaattcactggtttcgaacgcaagcaggatgggcctgcgcttttctcgaagagcgagcgaggcctctacatcaccaacccaagctgcgagaacccgaagcgaatcaaagttgcagaaggcggtctcgatgcgctgagtctttaccagctcgatacaccagaacagcgcgcttgcacgctctacgtcagctcaggcggaaacccggccgatgacaccgcccgtgcactgcgcggtctggccaaccgtactggtgcccggcaggtcgatctcgtttatgaccgggacgatgcaggcacccggcataccgaagcattgacgcaactgctcgccgagcaagctcccgacctgctggtcgctgaccgccgtgacgactacaaaatggctgagggcgaagaccctaacgatctcctcaagcgtcaacagagcaagccggcgcaggtcacatcggatcgggatcaacaggcgaaaacccaacagccggtggccgctcaacagcctgtcgcgcaagaggtagtcgaggagatcagagaacaggggaggtcaatgtga

SEQ ID NO: 347810 - DNA, 171 bp, Pseudomonas aeruginosa
atgatcatgtccgtgaccgtgaccgtgaccgtgaccgtgaccgtgaccgtgaccgtgaccgtgaccgtgaccgtgaccgtgaccgtgaccgtgacagcaagtgtcggcgtgttcgtggctcatggaaacaattcccgtttgacgtgttgggtgcgattgcacaccctgtag

SEQ ID NO: 347811 - DNA, 738 bp, Pseudomonas aeruginosa
atgcggaaggccgccgtgtctgacgcattcctcgctctgccgaacatcgacgccgccttgttccagcagccggacatgggacggctgttagccgccgagcgggcgacgcacgcgccgcgcttcctgctgctttacggctcgctgcgcgaacgctcgttcagccgcctcgtggcggaagaagccgcccgcatcctgcgggcgctgggcggcgaggcgcggctgttcaacccatcgggcctgccactggtggatgacgccagcgaggatcacccgaaggtcaaggaactgcgcgaactggcgcaatgggccgaaggcatggtgtggagttcgccagaacgccacggcgcgatgaccggcctgatgaagacgcaaatcgactggattccgctgtcggccggcgcggtgcgcccgacccagggcaagacgctggcggtgatgcaggtgtcgggcggctcgcagtccttcaacgcggtcaaccagatgcgcgtgctgggccgctggatgcggatgctgaccattccgaaccagtcttcggtcgccaaggcatatcgggagttcgacgaggccggacgcatgaagccctcggcctactacgaccgcgtggtggacgtgatggaagaactgatgaagttcacgttgctgacgcgcgacgtggcaccgtatctgctggatcgctatagcgagcgcaaggaaagcgccgaggtattgagccggcgcgtcaaccaggcttccatctga

SEQ ID NO: 347812 - DNA, 423 bp, Pseudomonas aeruginosa
atgagcaccatcacgatctaccacaacccggcctgcggcacctcgcgcaacgtgctgggcctgatccgcaacagcggcgaggaaccggccatcatcgagtacctgaaaacgccgcccgaccgcgaaaccctgaaagcattgattgccgcagcgcacatgccggtgcgcgcggtgctgcgcgagaaaggcacgccctatgccgaactcggcctggacgatccgaagtggagcgacgaacagttgatcgacttcatgctccagcatcccatcctcatcaatcggcccatcgtggtcacgccgctggccacgcgcctgtgccggccatcggaagctgtgctcgacctcctgccgcagccgcagcgaggcgcgttcaacaaggaagacggcgagcccgtcgtggatgcggaaggccgccgtgtctga

SEQ ID NO: 347813 - DNA, 498 bp, Pseudomonas aeruginosa
atgaccaccgacaccacctacaacgcgctgttcatctgcacaggcaattcggcacgttccatccttgccgaaggcatcctcaacgaattgggccaaggccgcttccacgcctactcggcgggtagccatccgaagggcgaagtgcatccgttggcgctcgccacactggaacgcctacgcctgccgacgactggctaccgcagcaagagctgggacgagttcgtggcccccggtgcgccggtgttcgatttcatcttcaccgtctgcgacaacgccgccggcgaggcttgcccgctgtggcccggcaagccggtatcggcacattggggcgtgcctgatcctgctgcggtcgaaggcgccgaggaacagcagcgcaaggcgttcatggacgcggcgatcacgctgcgtcggcgcatcgaactgttcctgtccttgccgctccagcgcctcgatgccatgtccttgcagcgcgagctgcgcgacattggccgccagtga

SEQ ID NO: 347814 - DNA, 777 bp, Pseudomonas aeruginosa
atggtcgatcctcatcacgtcgcgcattggtatccaactgcggcatacctatacgtcttgtggctggatgcgctcgcgctggcttgggagtacctgcgccggcatcccgactaccggctcgactggctgcgccaccaccgccggccgcaagcggcacagcaggcggcgcatcgctggggcctgcgcctgctggaagacccggccctagatgggcgcgacgcgcatccggcctggctcccagggcatgccgccgtggtgcagctctaccccgatgccgacccgccaatggatgcggcgaccttcacgttctggtgcatccccggtcacaagcaactgcttcacgatggcaaggggctgacgctgatcgcgcgcagtccaggccattgtgcgcgcttcgcactggcgcccggcctggaggacggcatggctgtcgcctatgcccaccgcggcggcgctgtcgcgcctgcacgcgggcatgtgccgagcacggacctggccgacgccaagccccggccgtcacccgctgcgctgctggagctgcacaccttgcaggcgctggacgcgaccctggcgggcgcgtccttgcgcgaggtggccgaagggctgttcggcgccgatgccgtggccgcccattggtatagcgacggtgggctgcgcgccaagacacgccgcctggtacggcgtggcgacgaactgatgcgcagcggctaccgccgcctagcagaactgccaccgcttgagaagggccgttctgcaaccgatgcaagacggccctga

SEQ ID NO: 347815 - DNA, 564 bp, Pseudomonas aeruginosa
atgaccgccgtttccaacgtcggcactgcgccgcgtcctcgctcccgcctgcgcgctcgcatcgtgctcgtgggcttcgccgcctgcggcctcgctgcgctggcctgggcgtccttcgtgcatccgaggccgcgtctgatctacaacccgtccgacagcatttcggtgggctggtatcgcatcgcgccacccgatgcgccgcgcgtcggctccatcgtgttgaccatgctgccgccggacgccgccgcgctggccgcgcagcgcggctacctgccggcgcgcgtgccactgctcaagcgcgtgggtgcggtcgcaccgcaggaggtgtgcgtcgccagcgggatcgtccgcatcgacggcgtgccttcggccgccgtgctgcccgccgaccgctggggccgtccgctgccatcctggcagcagtgccgccgcctcgaacccggcgaacttttcctgttgagcgtgaccaacccggcgtcattcgacagtcggtatttcgggccggtcagcacgtccgccgtgatcggcgtcgcgcgcccggtctggctggaggcccgtccatga

SEQ ID NO: 347816 - DNA, 270 bp, Pseudomonas aeruginosa; identical to SEQ ID NO: 117517

SEQ ID NO: 347817 - DNA, 630 bp, Pseudomonas aeruginosa
atgcccatcaccgagcagaaactgctgcatatcctcccgaacgccggccctcgagccggcgtttttgttggtgcgctgaaccgcgggatgacgcgcttcggtatcacgtcgcctgtgcgcgcggcggcgttcctcgcccaagttggccacgaaagcggccagttgacccggctggtggagaacctcaattacagcgcccaaggcttggctgcgacctggccgagccgatacctcggcgccgacggccagcccaacgccctggcgcagcgcctggcgcgcaacccccgagccatcgccaacaacgcctacgcctcgcgcaacggcaatggcgacgaggcctccggcgacggctggcggtatcgcgggcgcggcctgctgcagatcaccggccggtcgaactaccgcgccgccggcaccgggctgggccagccgctggagcaggaacccgaactactcgagcaaccggagtgggcggcgatctcggcggcctggtggtggtcgacgcacggcctgaacgaactggccgaccggggcgagttcgccgccatcactcggcgcatcaacggcgggctcaacggccaggcggagcgcctggcgctgtgggagcgggcgaagagggtgctgtcgtga

SEQ ID NO: 347818 - DNA, 600 bp, Pseudomonas aeruginosa
  misc_feature (589)..(589): n is a, c, g, or t
atgcatgtcaatcagaagccgcgccgtcggcacagcgagcaattcaaagcgcaagtgatgaccgcatgcggcgagccgggcgcgtcggtgtcggcggtggcgctgtcgttcgggctgaacaccaacatggttcgccagtggcagcgcgggcgcgggtacaagccgaatcggccggccatcgcctcgcaggccgcgggccaagtgcaaccgcagttcgttgccctgtcgttgccgtcgccgaatgtgcaagctgcgccggtggcggatgtcgcgccgcaggtgatcgtcggcgttgtggccttgccttcggacgtcaccgccaactggcccttcgcatcggcccgcacccagttcgtcaggctcgccttgggcatgcccagtgtcgccgccacgagtgacgctgcacgaccagccttgacctgtcgcacagcctcctgcttgaactccggcgtgtacttcgctctcgtttgcttctcgttcaattcatgctcccgtcccggcattctccgggttggggctatgcactccagggttcaggggcaacctcagtgggtcgtgagcgtccagtccgcccatcttgaaagcctgnccggggcatag

SEQ ID NO: 347819 - DNA, 579 bp, Pseudomonas aeruginosa
atggccgctaccgagcagacccccgtcaggccggccaaggcagacatcgcaaacggcgaagtcgtcttcaatgcaaagtcctgcgccgcgtgccataacgctgatggcaactcggccattcccgccaatccaaagctggcgcagcagcatcccgaatacctgctcaaacaacttcaggagttcaagtccggcaagcgcaagagccctgtcatggctggcatggccgcgatgctttccgagcaggaaatgcgcgatgtcgcctcgttccttgggtccaagcccatcaagcccgggtttgcgaaagagaaggacctcgtggcactgggcgagaaaatctaccgtggcggcattggtgaccgcgccgtaccggcctgcgcaggctgtcacagtcccaacggcgctggcatcccgatccagtacccgcgactgggcgggcagcacgccgaatacatcgccgcgcaactgacagcgtttcgcgatgggatgcgactcaatagcgtgccgatgagcggcgttgcagcgaagctcaacgatcgcgaaatcaaggcagtgtccgacttcatcgcaggcctgcgctaa

SEQ ID NO: 347820 - DNA, 423 bp, Pseudomonas aeruginosa
atgccgcagtttgctttcgatatgacgaaggtgaaacaccccatcatcggtatggtgcgtcctgtagcaacaagaattcttggcgtggcagtctccaccggtctgtcgggctgcgccggtttctaccagcagtatcgcgatttccaggacggttggcgtacgggcgaaattgtccagatcagccgcgcgagcgagattcagcgcagcggtcgcacgtactgcaggaagacagccagctccaacgagttggaactgcatcgctttgccatcctggtcgatcgttccacggggcaacgccacgcgcacatcgtgatgctgaatccggcgacatccgtcgagctgggcgacatcgtttcgaccaacgtcgtcaagtgcggcacgcccattcgcgtcttgtcgcatgcacaagcaccgcgcgagtga

SEQ ID NO: 347821 - DNA, 852 bp, Pseudomonas aeruginosa
atggctgactccgatgcggcacaggtcctgcggcgaatcctggaggggccgctcacgcggccggcgttgcaacgctggcggcgcagacggttcttttccgtaacggggttcgccggttactttggcgtgttcgaggactttgcgcaagcccgggcctggcttcccgacagtccggagttcgaccatgcggccctggcggccgagtacgtggacatccgcacgaagaaggtttttgcctacgactatccggtgatgtggtggctcgaccgtgcattcagagacggtgccaccaaggtgctcgacattggcggctcggtcggtgtccattactacgcctaccgccgctatttggagatgccgcacaacttgtcgtggcacgtcgttgaagtgcctgcgatcgcctccatcggcagagaaatggctttccacgcagaggtcggtgtactgggattttcagacacggccgccctggctcaggcgctggatggcaatgacatctggatctctgccggagctctgcactatctggagaatgagcaccctgccgacctgcttgcagagggtggaaatcgtccgcagcatatcttgctgaacaagctgcccttgtacgatggcgacgactacgtcacgacgcagaacatcggcgacggatgcttctcaccgatgtacgtctacaaccgccagcgctttatcagcgatatcgaggcgcagggctatgtcttgcgcgacgaatggcaagttcacgagcgcgctatctatcttccaggttttcctgagcgctgcgtgccggtgttcagcggtctctactttcgcaagctggaaagcgctagccaaagcggcgatgcgccctag

SEQ ID NO: 347822 - DNA, 375 bp, Pseudomonas aeruginosa
atgtcgaacattcgcatcgcactcttggcattcgttgccgcagtctcgtttgctggcgcggccagcgcgcagtcgtccaaatccatggcagatatgccgggcatgagcgagaaagcgccggaggccagcggctcggatgctgccgcatcctcggatctgagcgaaggcgagatccgcaaggtggacaaggacaacaagaagctcacgatcaaacacgggcccttgaagaacctcgacatgccgggcatgacgatggtgtttggcgtcaaggacgacgccatgctcgacaaggtcgaggccggagccaaggtccggttccaggcggaaaaggtcgacggaaagatcgttgtcaccaagatcgaatcggcccgctaa

SEQ ID NO: 347823 - DNA, 492 bp, Pseudomonas aeruginosa
atgaaacacatcttccgcaataccgcgcttgccgctttgacggcactggctgccgccggcgcttccgcatcaggcacccatgcaggtggccacggtcatgaggccgacgaagcgatcggcaaacccggcgtggccgccaaggccacccggacgatcaacgtcgacatggcagacagcatgcgcttcacgcccgccgacatcagcgtcaagcagggcgagaccgtgcgcttcgtgatcaagaactccggccaactgaagcacgaactcgtgatcgggaccgagaaggagctcaaggagcactacgaagtcatgaagaagaacccggagatggaacatgccgacccgaacatggtgacgttggcaggcggtaagactggtgagatcgtctggcagttcaccaaggctggcaaggtcgacttcgcgtgcctgcagcctggtcactacgacgccggcatgaggggcgccgtgaacgtcaccaaaacaggaaagtaa

SEQ ID NO: 347824 - DNA, 1416 bp, Pseudomonas aeruginosa
atgaccagcagacgcaacttcatcaccggtgccggtgccatcaccggggccgtcgccgcagccagtgtgagcaaggtggccatggccgctttgccagagcccgtgctccagacttctgcaaacacgatgccgccactcgcaccctcgagcggccggccctataaccccgtggtcacgctcaatggctggaccctgccttggcgcatgaacaacggcgtcaaggaatttcacctggtggccgaaccggtggtgcgcgagatggcaccgggcttcaaggccaatctgtggggatacaacggccaatcgcccgggcctaccatcgaagtggtcgagggcgaccgggtcaggattttcgtgaccaacaagctacccgagcacacgagcattcattggcacggccagcgtttacctaacggcatggatggcgtagctggcctgaaccagcctccgatccggccgggcaagaccttcgtctatgaattcgtggcgcgacgccccggcaccttcatgtaccacccgcacgcggacgaaatgacacagatggcgatggggatgatgggcttctgggtcacacacccgagggccgatcacccgctcatagagaaggtcgaccgcgacttcgtgttcttgcttaacgcctacgacgtggagcccggaagcgcgacgcccaagatcatgacgatgctggatttcaacctctggtcctggaacagccgaatcttcccgggcatcgactcgctgaatgtgcggctcaacgacaaggtgcgcatccgcatcggcaacctgacgatgacgaaccacccgatccatttgcacgggcacgagtttctggtcacaggtactgatggaggaccgactttcaagtcgtcgcgccagtacgaagtgaccaccgacgtggccgtcggacagatgcgacagatcgagttcttggcagatgaggaaggtgattgggctttccattgccacaagagccatcacacgatgaatgccatgggccatgacgtaccgaccatgatcggcctcgaccacaaggacgtggcccagcagatctcgagcttggtgccggattacatggtcatgggggagcggggcatggccgacatggccgagatggagatgccgattcccgacaacaccgcacgaatgatgacgggcgaaggcccattcggttcggtcgagatgggcggcatgttcagcgtggtcaaggtgcgcaaaaaccagaagccgggggactactcgaatcccggctggttcaagcaccccaggggcacggtggcctacgagttgaatggcccggcacccgaaacctcgcgccagcgaggtgccggtgcggccgcgatgcctgctcagaacatgcctgccaagaacatcgaagtccagatccgcaaaccgggcagcggccacaccgggcactga

SEQ ID NO: 347825 - DNA, 1422 bp, Pseudomonas aeruginosa
  misc_feature (940)..(940): n is a, c, g, or t
atgaagcgcgctttgcgtttgacggtcatcgccgtcgcggctgccttcctggccgggtgcgcctcggtcagtatcgacgacgccctgaaggaaacaaacaccaatgcccagcagttcacaggcggcaagctcgagctcagcaggacccaggagcagcgcgaccgccgcgccgcgttgacacaggatctgctggccaagccactgtcgcagagcgacgcggttcagctcgcgctggccaacagcccgtccgtccaggcgctgatcgcgcagagctggggtgacattgccgcgaccaaccagagcagccggctgccgaacccgatcctgtcgttcgcacgaacccgactgaacagcgaactcgagcttgaacgtctgctgtccttcggactggtggacctcatcctgctgccgcaacgcttgtcgatctccagaagccaggccagccaggccaaggtccaactgaccagtgccgtcgtcgaccaagtcacgcaggtcaagcaagcctgggtccgtgcggttgccgcacaacagtcgctgcagtacgccgaacaggtcaacaagtcggcccaggccagcgccgagctcgcgcgccggatgcagctcattgggaatttctccaagctgcagcgtgcacgccagcaggtgttctatgcggacgcgacgacccagctggcctcggctcaacacgcgactaccgctgcgcgcgaagagttgattcgtgttctgggactgaacgacgagcaggctgccaagttgacgctgcccgaacgtctgcctgacttgccaaagacccctcgcgaggcgaaggaagtcgcggcgaccgcgaccgagcagcgtctggacgtccaactcgcccgtgcccagttggacgtggcgggcaagtcgcaaggcatcaacctgctgtcgaccttcatcgatgtcgaggttggcggtcggcgtnacaccgtgttcgataacgcggaaaacacaaagagcacccgtcggggcttcgagctcgacatccggctgccgctgttcgactgggggtcagcgcagcgcgacatgctgaatgcgcagtctctggctgcggcgaaccgctacgacgccaccgtacgcgacgcggcctcgcaactgcgcgagggctattcggcctaccggaccgcctacgacatcgcgcgccactatcgcgacgagatcgttccactgcgccaggccatggccgacgaaaacgtgcttcgttacaacgggatgctgatcggcgtctttgaattgctggccgaggcccgcgaccaaatcaccagcgtgaccaacgccatcaacgcccagcagcagttctggctggccgacgccgccctggccgcgtcggtgatgggtaaacctaccgcgacgggcggctcgatggccggcggcggcggcgaggcctccgctgccgccgcgcactga

SEQ ID NO: 347826 - DNA, 396 bp, Pseudomonas aeruginosa
atgaagaaccgtcaaatcctctcgttcgcactcgccgccggcgtgggcgctgccttcgtcgcgccgttcgcggcctatgcggaaggtccgtcccactttgcgcccaacgaagctggcgtgatctatcacccgggtgcagcggggccggccaagtcccgggcccaggtgtcggctgaactcgcggatgcgcagaaaactccagccggcgccagcatgctgcgctggggcgtgatgaacacgccgaagatgggggccgcgaagtcgcgcgcggaagtcttagccgagctggaagcggcgcagaagcagtccaactgggatgccgcttcgcggctgggtgcccctctgtcagcgcccaaggaggattcgagcaaggcgcgcgcgcaagcacagccttga

SEQ ID NO: 347827 - DNA, 687 bp, Pseudomonas aeruginosa
atgatgcgaattcttgtcgttgaagacgaacacaaactgggcgagtatctcgtcaaaggcctgaccgagagcggctttgtggtagacctcgcacgttctggactggaaggtcgcagtctcgccctcgccggcgaatacgacctgctggtgctggacgtgatgttgccgggcatcgatggtttcgccgtcctagaggccctgcgcaaatccaagtcgatgcctgtgctaatgcttactgcccgagacgaagtggcggaccgcgtccgaggcctccaaagcggcgcggacgactatctggccaagcctttcgcgttctccgaactgctggcacgaatccaggcgctactgcggcgtggcagactccatgagatatccaactacacgctcaaggatctgaacctcgatgtagtggcgcgcaaggcaacacgcaacggccaccgcctagagctgactgccaaggaattcgcactgttggcgctgctcatgcgccgccagggcaacgtgttgtcgcgcacccagttagccgagcaggtatgggacatgaatttcgacagcgacacgaatcttgtggaggtggccatccggcgactgcgtagcaagatcgacgatcccttcgatgaaaagctgcttcacacggtgcgcggcatgggatatgtcttggagagccggcagggcagaggaccgtga

SEQ ID NO: 347828 - DNA, 954 bp, Pseudomonas aeruginosa
atgcagttgcaaatggggatcgacgttcaggaggattcccgactccttgcgcggcttgcatggacgctggtgggcgccgtcgtactgggctccttgctgattgcctggaccggggcattgctggtgcgccggggtctgagatctttgaagaagctgatccaacagaccgccgccacggggcccgcgcaccccggactgcgcatcgatccttctccgtatgcgtccgaaatcaccccctgggttgtacagttcaacgccgtgctcgaccgggcggagcaggcgtatcagcagttggaatcgttcaatgcggacgttgcgcatgaattgcgcacgccgctagccaatctgatcgggatggtagaagtcgagttggcgcgaccgaggtcgatcgaggagttgcgcgatgccttgctgtcggcgctggaagaggcaagacgcgtctctgcgatcgtaatcgacatgcttttcctgtcccaggctgaccgtggcgctgtcgcccgtcgctcggcaccagtaagcctggccaatcaggtccgcacggtggtggaattccacgaagccacgctagaagacgtggggttgaaagtgcatgtcagcggcgatgcatacattggtatcgacgccggtctggtgcgcagggccttgtcgaacctgctaagcaacgcgagtcggtatgcggcgcgagactcgaccattgccgttgtgatcgatgcgcagcctgacggcgtctgggtcaaggttgccaaccgcggccaacccgttcctgccgacgtgctacccaatcttttcaagcgctttttccgcgcagagcggtcgcggaccgactcgtcagaccaccatgggctcggtcttgcgatcgtggccgcaatcgcccgaatgcacggaggccagacccgcgccacatccagatcgggcgtcactgagatcagcttttcgatgaagccagaaggctga

SEQ ID NO: 347829 - DNA, 441 bp, Pseudomonas aeruginosa
atgaagacttctctgaagacctccctaactctggcagcgctgctcagcgcgatcgccggccccgcgctcgccggcaactatgcagaaggtgacccccgccccgtcccgctgacctccagtaccagccgcgccaccgtggcctcggacacgcgaaactggctgctgagttcaccggaccagggctaccccgaaggcaatccgcgggctgtcgtgagcgtcggcgccaacagccgcgcaatggttcaggccgacacgttgatctggattcgttctggcttggccgcggccaccaacggcgaagcaggtgctgacgtgtctcgccccgcctacaagcaggccgcggccgagtacgcccgtctgcgcaatggacccgagttcgaagcattggtcgaacgcatcaagcgacagggctcgcagtcgaccgcaaccgccagccgctga

SEQ ID NO: 347830 - DNA, 1530 bp, Pseudomonas aeruginosa
atggacatgattggcagaatccggcggctgcacagccggggcaacaagtcggagcgcgagatcgcgcgcatcacggggctgtcgcgcaacacggtctccaagtggctgcacgggcaggtcgacggtccgccgaaataccagcgcggcgagcaaccgaccaagctcacggcgttccacgaggcgttgcgccaggccttgacggccgatgcccggcgaccgaggcagcagcggcgcaccgcccgcgccctgtacaccgagatcaaggccgccggctacgaaggcggctacagccgcgtgaccgacttcatccgcgcatggcgccagggcgaaggccaaggcgctgcgaccaacgccttcatcccgctgaccttcgcgctcggcgaggcctaccagttcgactggagcgaagagggcctggtggtgggcggcatctactaccgcgtgcaggttgcgcacatgaagctgtgcgcctctcgggcgttctggctggtggcctaccccagccagggccacgagatgctgttcgacgcccacacgcgttcgttcgccgcgctcggcggcgtggcccggcgcggcatctacgacaacatgaagacggcagtggacaaggtccgcaagggcaagggccgtgtcgtcaacgagcgcttcgccaccatgtgcgcgcactacctggtcgatccggacttctgcaacgtggcctcgggctgggagaagggcgtggtggagaagaacgtgcaggacagccgccggcgcatctggatcgaggcggccaagcgcaagttctccagcttcgccgagctgaacgcctggctcgccgagcgctgccgagccctgtgggccgaagtgcgccaccccgagcacgcgcagttcagcgtggccgagatgctggagcatgaacgtgcgcacctgatgcccatgccggcaccgttcgacggctacgtggagaagcccgctcgcgtgtccagcacctgcctggtatcggtggcgcgcaaccggtactcgatgccgtgcgaactgcacgggcagatggtcagcacgcggctgtaccccgccagcgtggtcatcgtgtcgggcgacagcatcgtcgcgcgccacgaccggctgagcaacgccggagagacccgctacgactggcagcactacatcccgctgctgcagcgcaagcctggcgcgttgcgcaacggcgcgccgttcgccgacatgcccgagccgctgcagcgcctgcgccgcgggctgctgcgcaaccccggcggcgaccgcgtgatggcgcaggtgctggccatcgtgccggcggccgggttggatgcggtgctggtcgcggtggagctggcgctggagaccgggccaccgggcaaggtcagcgtggagcacgtggtcaacgtactgggccggctgaacgcggcaccgaccccaccgaccgcgtccacgcacctgaaggccatcaccgcgccgctggccgacaccgcgcgctatgaccgcctgcgtgcgggcaccgaggccgctgccgaggagtccagccatgaagcctga

SEQ ID NO: 347831 - DNA, 822 bp, Pseudomonas aeruginosa
atgaagcctgacgtgctgatcgaactgaaggcgctgcgtctgcacggcatggccggcgcatgggccgatctggtcgagcaaggtggcggtgcgggcgcaggcgccggcatcgagtcctcgcgctggctcatcgaacacctgctgcaggccgaggccacggaccgtgcgatgcgctcggtcagccaccagatgcacgcggcccgcttcccggtgcaccgcgacctggcaggcttcgacttcgaggtctcgccggtggaccgcgcgctcgtgaccacgcttgccacgactgccttcacggacaacgcgcacaacgtcgtgctggtcggtgggccaggcaccggcaagacccatctggccaccgccatcggcgtgtctggcatcacccggcacggcaagcgggtgcggttctattccacggtcgacctggtcaacgcgctggagcaggagaaagcgcagggcaaggccggacgcatcgccgcgagtctcttgcgcatggacctggtgatcctcgatgagctgggctacctgccgttcagccaggccggcggggcactgctgttccacctgctcagcaagctgtacgagcacaccagcgtggcgatcacgaccaacctggacttcgccgaatggtccagcgtgttcggcgacgccaagatgaccacggcgctgctggaccggctcacgcaccactgccacatcgtggagaccggcaacgagtccatccgcttcagccgcagcacggcggacgccaaaaagcgcatcaaggcccgtgagcaggcccgcaagggcgccaaggccgacgccgggatcgaaccgttctga

SEQ ID NO: 347832 - DNA, 1944 bp, Pseudomonas aeruginosa
atgagccgttggaacatttcaagcatcttctttttgggcgagggcggccgcgttcgtattctcgacttgaagcttggcgaggtaaacatcatcaccggtgcgtcgggaaccggtaagtcgacgctgatcaaagccatcgactattgcttgggatcgaaggtctgtgagcttgctgcccatgtgaaacgccacagtatcgctgtgggcgtaaaatgggtattgggtgatgcgcagatgatcacggggcgggtcattccacctctgggacaagacaccagcaccaagatgtttgtcagcagcgggcgtaacctcccaatcccaacgtcgttgacggagtttgaaggcgcgacaacccttcaggcgggcaaatcctttatcgaacgagcgtttggtattggcggggtagcagacgcttcaaacgaaagcagtgcccgaaaatggcggccgacggtgcgccatgcaactgcttacatgttcgtccccaaagacgtgatctacaacgagaccgctttacttcatggtttggatcaggccgacgaagcaccagccattattgagacgatgccatacttcctcggcgtcgttactcaagacacagtgatccaggagcgtcggctacgcgacctgcgcaagcggcttgatcgggaggagcgtcagcttcgggttcgtcaggccgaaggtagcgattacaaaaagcatgcaatgcgcttgctgatggatgcccatcgttgtggtttgtgtgacctcccacccgatgatgcttcagaaactgatcttcaagacgcattattgagggtcaagcggctgaagattgacaggagcgggcagaacccgaacgagagcgaactttctagtctccatacacagcggcgtagcctgctcagcgatatcgaaaatgcgaggcgcagctcgcgagcgacacaagcggcacttcaggaaatgacgggttttgagggggcggtgcggcggcaatacgagaagctgaaaattgcagagcatcttcagccagtggcccacgcttgccctctgtgtgaaacgcctagtgagcgtgggatcgctgcagcccaagccatccgccaatcaatgaagatcgtccgctctgaaagcgtagctgttgagaatgtacgacctcgtcttgtggatcacgaggggtcactgcagttggagctcgcgaggcttaatgaaaagctcaagggcgtcgatgagcgcataaaaacctggattaggcaaagcgacgaagccaaggaaatggatgacctagctcagtatcacgcgcacctgatgggcaaggtttcgcagttcctggaaatgaacccggcgacgccgcttccaggccctgacttggacgtcctgcgcgagcagattgaagagctggaggcgctcatcgataacgatgccaaacatgtgctgctcacacgcgccgaacgaaaagtttcgcaatatctgtctgatgcattcgcatcgttgcccacggtcgaaccatgcattgaggctgatttggagttctcctccaaaccaccggccatcgcgattattgagaaggatactgagacggtattacggctacccgatgctggatcggatgaaaactaccttgctatccacatcgcgctatctttcgccctgcaaaaatatctcgggatgatcaaggcaccggtacctggctttctggtgttcgatcagatcagccggccctactacccacagcggggggaagacgaggcaagcattggagaaaatgaggaagtcctggcgatgcgtcggcacctggattttctattcaaagctaccgctgagcaaaatgacctgcaggttctgctgattgaacatgcgtatttcggtgatgatccccgatatgtggcggctacccgtatgaggtggaacaagctatccggggatgccttgatccctctggactggccgaagagagagagcagcctttga

SEQ ID NO: 347833 - DNA, 957 bp, Pseudomonas aeruginosa
atgcatcgaaacagtacatcaataaaaaacacatcacattttgaagacattaaattccatctaaagaacgaactaagaaaagccaagtcatcaataaagatctgcgtcgcttggataagctggtcagattacacccctgtattcaatgagctatctagaaagggagtgcacattgagattttatacaacgacgacttcataaatagaaaaaattttgtcagccctgacagcgacgtcgagctatacccaatcaagggaaggttctacaaatcaataatgcacaacaaattttgcataatagacagcaagactgttgtcactggaagcttcaattggtcacacagggcgtcctctcactttgaaaacatagtcttcatagagaacgacttcaggctggcaaaaagtttcctgcatgaatttgaagatctaaagaattactttagtgaattttatcggcaggacaaattactctgcgcaagtgcaggctatactgactgcctatctgcctcttataaccttggcatcttaggagctgagtcaggattgtacgacgaatcattggtggatatctggaatgtttgctttaaaagtggacacatgacttttcttggcgaacagtacgagcaccatctacatttgaatttaggcctcaaggatttacctgattgggatgattttgagagcttctacgacatggagacgatgcttgccgagtttcgtcacgaaagagaacaaatacacaagatacagaattatttcaaccataatcgaggcaacaaaatacatgccgtcggcgttatcgcaatggataatccaaatgaacacattgagtggggggaagagccagagtatgtgattaagactctatggagagatatgtattataggaaattaattcctgatgttatctatgatggatacttggatatcgaatgcatagtaagaaggcatgagtag

SEQ ID NO: 347834 - DNA, 633 bp, Pseudomonas aeruginosa
atgaaaagaaaacaaagcgtatatgagtggctaaacaaagacccagacataaagaattggcttatagataccaccttccctaatgcggatgataaatttgcacttatagtagcgcttagcaatctgacagaagaagatcttagaaaaataaaacaacgctggaattcgtattctcacagatcaaaacgaagatctattagttgcgacataacgccagaagcctttagcacgctcaaaaaaatacaaggcaaacgaagcctgaccgagactcttgaagaaataattgctcttaactacgaagcaaaaaaatactacaagaatttttttgaagaaaagatcaaaagcagacgacctaaaaaagaccctggtatttcacagaggttacatcattccagcaacactctcgagaacgcgaccacccatcgatcagagctttctaagctaaacggcagaatagaagaacaagaaggtcagatagccaagcttaagcttatagctatcactctgacagaaaaactactaaacgaaggaatctcattagactcaagcataacaaagcatttaagcgatatcctagaaccatcgagcccaaggactcatgatattcctagcaacaaaaatcagatagaatga

SEQ ID NO: 347835 - DNA, 1299 bp, Pseudomonas aeruginosa
gtggaatttcaggataaaggccttttagaggtgctcccgtttcgagctttcttagcgagtagccacatctcgttgagggcgcggtatctgctttttcggctagtcctggcttattctctagcgcagccagggcaagttgtttcagttggggtgcagcgactagccagagacactggtttcagtaaggacggggctgcaagttgcttatctattctcgtttcgaagcgcattttaattaaggcacaagtacgtacgggcgggcgccccagaaccacctatcggcttgatcatgggtttttggagtctttacagcaacccaggtacgttgatcgtatcgcccacttcgtactcagaattcttaagccggataataatactttcagtgatctatccatatcggagcgagcattattggcttttctttggggcttgactaatggctcgcgctcttgcgtagtggatggccgaagtattacgagcttggctaaggatagcggtgttgatcgttctgatgtgattcggattttagataaactcaatagagggcggttattggtgtcttcgctttcggctttcgctgagagcggctcgaaggataagataaaagcttactttcttcttgggccgaatctgattcaatgctggcctcgtgcatttagctgggtttttgagttgagtggattgctagcatggtttgcagggaatgagggttctttaagaggggataatctggtaagtatagttgagcgaggggcagaaggcatcaatagccagtggtctcccgttcgcgatgagctttccaactgttgggggctcatacaagcgcgttactatgttcttatgcagtgttgtgtcgcattgtcgcatgcgttttccgcgactgaaggggatttttggggtagccgtgttttgttttcaaaaattcagattgccctagcgttagagttgggcctgtcagatgttatgtgcagacctggctatccggttattgaagaggtcgactcgaacgagcttgattcgcgcactcgtgccttactcagctttgtcgagcaggtatcgctgcttttggtcaatgaaatgaggcagctcttgcctgtttcgtttcaggcaagagacttggggagtggggcaaggttgtgttgctacccggtgttagatagcggcctcgcttatatgcggatggatcttgtaacagaggacgaagaggctgggtataagttcggagtaaaaatacttgagagccataagcgctatcggtcggccctgcctgagcagcttaagggggaggtgttgctttaa

SEQ ID NO: 347836 - DNA, 1746 bp, Pseudomonas aeruginosa
atgacacctccatcgaaacggtctatcaagcgacatattcaaaccctcggtttattggctcatcggtataatgccgatgcagctacgctcgtagggacgattttgcacctatggtgcaaaattgagtgtcccgctcttcctaaatcgtccctaccttactcagaggcgttggcttccaggcaggaaatcgtcacattcgtcgcagtgctgagccagctcggcttcctcgacgccacgtactggctcagctcgtcctatgcgatgcttaccgaagaaggctatcgcaagaagctggcaatgttctttacgcctgtgtcgctaacgaaaggactgctcgacgacttagccgaccaaggtaccgattttggacgcctttccttcatggatccagcctgcggaggggcggcgttcctggccccgatcgcacttcgcatgcgagcagcattggtggccgaagggctacctcctctcaggttgctcaagcatgtcgaggagcacctctacggcaccgatttagacaaaacgttgtgcgagctatccaagcactttctgtgtatggctctgcacgccgaaattcaagagacaggctatatcccaacattcaacgttcaaaatgtgaactcactaaccgagctgtccaccaacttaggcaagatcgacgtcgttgtctgcaaccccccataccgtaagatgagggccgaggagcttgaacctttgcgggccacctattcggacgttatcgaagcacaacctaacctttattgcttgtttatcactctctgcgtgcgtcttctgcgtaacggcggacgtgctgcgctcgtcacaccgactagctttctttctggccaatactttagccgattacgccaattcctaatacgcaacaccgacattgaacacattggcatgatcagcgatcgaaaaggcgtatttatcgatgtcgagcaagaaaccgcgatgaccatcttgcatcgacgcgccgaagaggatcgcatgcaggttcgagctaacgtttcggtggtgtctgccacaggccaatatagaagtgttggcgaatgtctgcttccaaacgccggagctgtatggcccattccgcgctctaccgaagacgtaattcttgtaaaaaccatcagctcgttcaagtttcgtctaacggattatggctacagagtgcgtatcggggcctatgtctggaaccgcgacaaacgacctaagttcgagtcgcttcgggatgcgcaggaggcaggtgcttacacagccattccactgctgtggtcaagagatattattgccggaggaattgtccagccagaagttatctccacctacaacggcgagcaccgctttgttgatattggcaataagaagtgcctatcggtgattaaatctccttgtgtggtaatgcagcgagtgacatcgaatgaccaaccccgccgcctcgtcgccgctgctgtatcaccgtctatttttactacatacggcggctttatcggtgaaaatcacgtagtgatcgttgagcaagtaactgataaaccagcgttacctccaacgaagttggcagagctcctaagcacatatgcggtggatcgctatttccggtgtatttctggggccaccaacgtctcagttttcgagctaagccaactttcgctaccagatccgatagtgcttaaagaggctctgattaatgggagcaccttggatcaagctgtgaatgactcctttcaacttatatctaagagttga

SEQ ID NO: 347837 - DNA, 393 bp, Pseudomonas aeruginosa
atgcccaaatacgaggtgatcaagccctggaacggcgtttccaagggtcaggtgctggagctcgaatcacttgccgctgcgctcctgccgaacgtgcgcgaggttggcgcactcaggagcggaagcctgaccttggacgtttcggcccaggtcgacgaagcggccaggcaagctctcgccgaagcgcgtgtatccgtcgatgccatgatcgacgaagccaaggcccaggccggtaccctgaccccggccattccggacggtagcgagcgccgcgagctgatcaaagcgcgcctgaaggagctgaagatcgagttcgatggccgccagggcgaggaagcgcttgccgccctgctgccggagggcgaactggtgaagctgttcccggccaagtga

SEQ ID NO: 347838 - DNA, 1233 bp, Pseudomonas aeruginosa; identical to SEQ ID NO: 325844

SEQ ID NO: 347839 - DNA, 1050 bp, Pseudomonas aeruginosa
atggcttggtattccacaggcacggtcgctgtcacgctgaattcgccgacagtcaccggcgctgggaccgcattctccgccaacgtccgggtcggcgatgctttcaaggggcccgatggtcgttggtacgaggtcacaaacgtcgccagttcgacggtcatttcgatcaagcccaactaccagggcagcacggccagcggccagccctatgcagtggcgccgatcctgggctacgacaaggacctgtcggatcgattcaacctgatcgcgatggactggggggcgacccttgcgggcataaagccgtgggccctgtccaataccggcacgcaagcgcaggcggacatgggaatgacggcagtggggcggggactcaatgccgcagcgactgctgagaatgccctgagctttattggtggcatgccgaagtcgatgtcccatctgcgggctgtcagcgacgccaataatgtcccgaatgaatgcgggttctacggcatcagcgtcggtccttactcgaacttgccgccaggcatcgatgcgctgaaccctatcgggtcgatgctctatcaccagccctacgatgtggcaaccgcggtgcaactgttcgtaccacggacctcaaacatactgtatttccgcaggaaaatagcgggggcgtggcagccttgggttcgcgtgctgtccgatgcgcagttgctgggtacagtggcccagtctgggggcgtcccgcttgggtcgattctcgaacggggcaacaacgcgaacgggcaatactcccggttcgccgacggcacacagacttgcaccgtgagcctgctcggtgcgaatgaccgcctggctggacagggctacacgctgccccttcccgcgacgttcacgacggattggacagtcggggtctcgaccagttgggcgtcgcattcaaccaacccgacggcaagcaatggtatccgggtcgcgtatgccaatggcaacgccctgacgttcatcctcaccgaaaatcttggaacaaaccgtttgatcttttcctgcatagggagatggttctga

SEQ ID NO: 347840 - DNA, 663 bp, Pseudomonas aeruginosa
atgagctatggcgtattaattcggggaggcagcgggcagacaattatcgatgactcaaacccttgtattcacattgcgacatcaggaacatacggcgtacaaacatctagcgaaactatcgtaagttacccatctgcgatccagtccccgtatgagccttatgtgtacttcaggcctgatggcccacatcaggtcttccagttcaggcatcttggcagtccagggaattggactgggttcgccttttggcaagcctacattctgggctcagaaccccctatctacgggggtaagtggaaggcaggcgcggtcatgttgccgaaaaccggtggatgggggatgcaggttttcgactcccagtcgcgggtgatgttcgacagtaaccgggacatcgttcgctatgtcggtggtgcgcaggcttggaataaatatgcgtactacccgaactatgctggtgggccgctgcaagtttggtatttgccgttcccctacggggctgatgcttactttcaaataagtcacttcaatgtaaaaacatttagcactactggcgccccgagtataggtttctttgagagatcaaagagttctatatttgtgtcggcagccgtcggggcggaaagtaataacccgttcaatttcccgctcattgtagtagcgtaa

SEQ ID NO: 347841 - DNA, 1629 bp, Pseudomonas aeruginosa
atggctggcaagctgcttgccgccgggttcgaacgtagcggtccatccgccaccgccttgagcgacccgattgtcgacacgccgatggtcgtgacgttggaccagttgcgtccctacgatcacgatccacgcaagaagcgcaattccgcctacgaggaaatcaaggcttccatccgtgaacgcggcctggatgcggcgccggccatcacgcgccgtccaggcgaagatcattacatcatccgcaacggcggcaacacgcggctggcgatcctgcgtgaactctggtcggagaccaaggacgagcgattcttccgcatatcgtgcttgttccgcccctggcccgcacgtggcgagatcgtcgcattgaccgggcaccttgcggagaacgagctacgcggcggcctgacgttcatcgagcgagccctcggcgtcgagaaagcgcgtgagttctacgaagaggaaagcggcaccacgctgagccagtccgaactggctcgccgcctggccgccgatggctacccggtacagcagtcgcacatcagccgcatggtcgatgcggtccgctatctgctgcccgcgatcccgaccgtgctctatggcggattgggccgccaccaggtcgagcggctatcggtcatgcgcaaggcctgtgagcgcacctgggagcagtacgccaaaggccgctctcttcctctggatttcgacggcttctttcaggaagtgctgtcgcaattcgacacgcaggctgacgagttttcgccgcagcgagtgcaagacgagctgatcggccagatgtccgaattgctgggcatcgactacgacgtcctggcgctggacctgaccgaatcggagagccgtcaccgtgcgttggtcagcgacccgacgccgccatcggcgccgcccgcattgcctgagcctggggccatcgcgcgatcgccggttgaatcagcaccatccactatcacgcctgcaccacgtccaggccatgcagcggccgcgcctacgcggcgcgaggacgacacggccccgagggaggcctccgcggccagccctacggcaggggtcggcgatttgcttcaggagcacatcatctccccggcaccaacgacggagcggctccagtccatccagcgcatggtcgccgatcagttaggcgacgcgctaccgcccgatttctcagccaacgtattgcagtcgattccagtgcaggccggtggcctctatcccatctcggacatctggtatatcgaccctggactggatacgcccgatcggctacgcatccacatcgcgcagttcgcgcgcgagatcgcaggcgaggccgagctggacgagtacgtcgcggatcgtcccgatggcatcgggttcgcgtgccgcgcccaggcacggccttcgtcgcccctgggacgcgccgtgctcgcgctgctggtttctctggccggtcagacgccggccgacgtcggcttggacagcgggcaaatcgtcaccgacctgccggcactgctgcacggccaggacgatgcggccttgcgattgagcgacaccgcgctggtcaagctgttccgactgctgcggttggcccgacgcctcctggacctggaagccggcgctgtcggttctgggacctga

SEQ ID NO: 347842 - DNA, 687 bp, Pseudomonas aeruginosa
atggcaaacaactactacgagggcacgggcgttctcatgctcgatcgtgttacccccgtcatcaaggcgctgttcggcgtcttcgcattggatgaaagctatcccggcaacgggcatgcctacatcgccaggatcgccgagaccaatgatccgcaatggtcgaatgtgctgggcggtctggaagacctcgcaacgcaactcggcatacccatgcccgacgacgaaggcttgtcgattcctccactgctcgaactgctggccgtgcacttcggagccgaccaggatcaggaactgcagaacctgatcgaacaacaccagttcgaggacagcgccgatctggaggccttacttctgatcgcaacctgcttcgacgacggccatgacctgaccgccatccagttcgagggctgctggtattgcagcaagccaaggctgttcgagttcggcggcagcggctgctacctgagccgcgaggtccaggtcttcagaacgtcctcgcaggcactccaactcggcgaccaactgcgcaaagccattaaggccagcgacatcgaagaggcctcggcgttgatcgcactggaggccgccaatctgctcgcgggcatcaacgacgagcatttccgcctgaatgtgcgccatcgcatcgccgaacggctggcccagacgccaacgatcagtgccgactga

SEQ ID NO: 347843 - DNA, 516 bp, Pseudomonas aeruginosa
atgcgcatggacaggccattgatcgcgccacggctgcaactcctgcccgtgtcgctacgggtcgctaatggctttgtacaggaccaccaccgccaccaccgcccggtccaaggggcgaagttcgccctggccgttgccccgcgcggcagcgattgcatctgcggtgtggccatcgtcggtcgcccggtcgcgcggcacttggacgacggctggaccctcgaagtaacgaggctatgtaccgacggtgcgccgaacgcctgcagcaagctctatggcgccgcttggaaggcggccaaggccctcggctacacgcggctgatcacctataccttgcccgaggaaggtggtgccagcctgcgcgccgccggctggcggctggtcggcacgcgcggcggcggcgcttggagccgtcccagccgtccccgcgccgacacccccgaccacctgcgcggccccaagtgcctgtggcaggcatcgggcggcgtggacaaagggaaacgtccgggtgccgattga

SEQ ID NO: 347844 - DNA, 870 bp, Pseudomonas aeruginosa
atgaacacccatatccaagccacgcccgaaaccgtcaatgctcgcctgacgctagacgtgacctatctgctcaacggcgaggccgcgctggaaatgctggcacggctacaacgcatgtgcgaacacgccatcggcgagggtctgctgactggcgagaccgccgcggaagtggacgcctggtcgatcgatgtgtccgaggtgccttcggctgccaaccgcgaaaccctggaagccgagatcgccgctttcatgcaacagcgcatcgaggacggcaacctcggtgccgaggacattcccatgcgcctggcacgctatggcctgatggcccccgaggcattcaccgacgagatgcgcgagcgcatgggcatggacgacgacgccctcacgggccgagccgtcatcccctcgaccgaacctgccgacggcggtgagatcgagatgcaagtcgcggtcgcctgcatcggtgcctccggcagccccgacgtgccggtcttcaaggtcaggatcacccaggaggaatacgacctgggtatccactacgacaaggccaaggacttcgccgaagaagcccgctacgaggggccgttcgtctgcttcgacgctgccgaatatggccccatcctgtcggccgcccgcgaactgggtcttgttccgcaggttgtcgtggtcgatatgaccgacggccagatccactccatccgctgcgacagcggcgagatcaaggtcatctgctacgacacgagtgacaccgaagagtattcggtggcggttgcgaaccggccgctcggcgagaacggccaattcgtgcgctgctggtcgcacacccaactggcacaggtcgatcccggcctgaagctggctcgggattga

SEQ ID NO: 347845 - DNA, 405 bp, Pseudomonas aeruginosa
atggagttggggtactctttcagcatggctattccccgtcctccacgcctcatgcactacaagctcgatggccgtcgctccgtgccgtgcgacagtctcgttgagtggtctatgtggatggcggaaggcgacaggcgtgtggcggaaacatggatagatgacgtccgtatctccacggtttttctcggcctggaccacaaccacgcgctaggcggcgatcccctcttgttcgagacgatggtcttcgtggacggcgagacgcacgagatgcgcaggtacttcatctgggaggaagccgaagccggccacgccgagatgaccgaactgatcagggccgaaatggaggcggcacaggttcgtgctgcaaaggcctgggaacaggtgtacgcacggttgaaggtctga

SEQ ID NO: 347846 - DNA, 384 bp, Pseudomonas aeruginosa
atggtggctttaacctggctgcgcgccgcgcatcgcggcgtgcccacttttctcgtgatggccctcctgctgggccagtccccgatggcgttgggcgagtccccggcgcagcgccaggagttggtcgccgcgctgcgccagctcgacgcgctggagcgcaccgtcgccgacagcgccgcgcatgcctccatccagccgggcgaacgctatcacttcgattacccgcggctgctggctgatctagcgcgtatgcgcgctggcatccaggcccaccttaccccgtcgcgtgcccagccgcgcgacacctccgaactggccggcggctaccgcaccgagcgggccgtcgagggatcgctgccgacgactgtggagaacaagccatga

SEQ ID NO: 347847 - DNA, 447 bp, Pseudomonas aeruginosa
atgccagcttctttttccaggttctcgccgcgctggcgaaccctcggcctggccgttgcgctgccggtggcgttggccgctttttgcccggccaccttcgccgccgacgtgctggtcgtcaccgacagccagcaccccctcaagaccatgggcggcgaacggctgatcgagctggacgaagcgcatcggattgaagcggagctttctgtcgaactccccgccgattctgaacaggctgccgccgtcgtcaagcgtcggctgaatagtggcggtgccgacctccagcgccgcattgcgtccgcataccagggcgtcaccgacgcatggagcctgggcatcaccagcatcccagccgtcgtggtggaccagcgctacgtggtctatggcgagccggacgtggcccgcgccgtcgcgcgcgttcagcagcaccggagggctcagccgtga

SEQ ID NO: 347848 - DNA, 360 bp, Pseudomonas aeruginosa
atgagcccgatgcacgccagttggctgcgtccgcgctggctgttcagccggcgcgcggtgaaaaccttgctgtggcttgtgctggtcgtggccgccgcggtgggggccaacgtcgccggcatctacttggtcggcagtgttgcggcctgggagcattggctggcggcgtccgcagggtatttcttcatctggcggctgtgcctgtacggcgcgacggtctatggatgggtctggatgcgccgtcggctgctggcccgcgaagacaacgcgcaggcgcgacgtcggctgatccgcgccgaggtcgccggcgtcgtcgccatcgtggcgctcgaagccagcctgttgatgcaggccgcttga

SEQ ID NO: 347849 - DNA, 1866 bp, Pseudomonas aeruginosa
atgctctctctgttccagcgaaaacggcccgtggtcgcttctgctccgtcgccagcgccctccaacgacctcccgaaagggcggctgcggcccgagtcggccgcctcgctgctggcgacaccgcgccggcagaagctactggaacacatctggcagcgcacgtcgctgtcgcgcaagcagttcgccaccctctatcgcgcaccgctggagcgctacgccgagctggtccagcggtttcccgcctcggaggcccatcaccatgcgtaccccggcggcatgctggaccacggactggagatcgttgcctacgccctcaagctgcgtcaatcgcacctgctcccggccggcagcaccccggaggaccaggccgcgcaatccgaagcctggaccgccgccgtcgcctacgcggccttgctgcacgacgtcggcaagctcgccgtcgatctccacgtcgagctggccgacggcagcacgtggcacccttggcacggccccctgcgccagccgtaccgcttccgctaccgcgaggaccgcgagtaccgcctccatagcgccgcaacgggcttgctctaccgccaactgctggacgcccagcttctggactggctcagtggctaccccgccctttgggggccgttgctctacgtcctggctggccagtacgagcacgccggagtgctgggcgagctggtcgtgcaggccgaccgcgcctccgtcgcccaagagctgggcggcgatccggcgcgcgccatggccgcgcccaagcacgcgctacagcgcaaactgctggacgggttgcgctatctgctcaaggaagagttgaagctgaaccagcccgaggcctctgatggctggctcaccgaggaagcactatggctggtgagcaagacggtctctgacaagctacgcgcgcacctgctgtcccagggcatcgacggcatccccgcgaacaacaccgcggtattcaacgtgctgcaagaccacggcatgttgcagcccacgatggacggcaaggcggtctggcgcgcgaccgtaaccagttccaccggctggtcccattcgttcaccctgttgcgtctcgcgcccgcactgatctgggaatccggcgagcggccaccaccctttgcgggcacggtagtgatcgacgcgacgcccgcggagaacggcgcaggtgcgcaggccacgccgcccgcggccggtacaccaccggcccgcgatggtcaggagatgccaccttgggagagcggcagcaccgtcgccactacgccgtccgcagtccaccccatgccggacgtcatggaggagatgctggcgatggtgggcatggacgacttgtccaatgccaaaaaagatgcgcagcctcactcaggtaaggagcctgccacacctcccgaagctcttacaccagcgacggccacaaccccgccaccactacctgcgctcccggcggcactttcgtcctctcgggctcagccatccggcgagcatttcatggcatggctgaaacagggagtcgcctcgcggcggctcatcatcaacgacgcgaaggctctcgtgcatacggttagcgacacggcctatctggttagtcccggcgtattccagcgttatgcgcaagagcatccacaggtggactcccttgccaagcaggatgagcagcaagactggcagtgggtgcagaagcgctttgaaaaactgcaactgcaccgcaagcatcccaatggcctgaacatctggacctgcgaagtcactgggccgagaaagacgcgccgtctccatgggtatcttttagatgatgccggccagatcttttcagagccgcccccaaataacccttatctctcgctttcaagcccatcgggctag

SEQ ID NO: 347850 - DNA, 801 bp, Pseudomonas aeruginosa
atggaaacgcttgtccgacatattgccccccgacttggcgacgacagggttgcctatgccggcactatccacgacgatgccagcgctgtggaactgggctacaagggtgcgctggtacgagcaaatgttctattcggccacctatatgacttgctcgcgccggcagtcggcatcgactggctcgctcacggctacttcggcgcgcgtatgctccggcctgcatatgacggggacccgctcgaactccggtgcgaaccgagcggtgatggagactacggcctatccattgcgcatgccgagcgcggccagattctgcaaggctgggcgaaggctcaacaccaatttgacagagcagcgctgccgggcagcggagtaacctttccgaagcgcagcgccaagccaggagaactgagagttggtgatgcgttcagtcgtcagacgcttttggtcgacgatgcactgagccgtgactgggcgctggagttctcgcaggaaagcgttccctcggcatggaccggtgttatctcgccggcctgtttgcagtggctggtgtcgaagaccatcaatgacagcttcgagttcctcacgctgcccatctatgtcgccatggatgccgcccacgtcagcttggcgcacgtcggcgatacattgcgctgcgatggaaccgttacagcggtctatacgcgcaagaaccacgaatacttcgacgcagaactggtggtttcgacgccgaagacggttgtggcggtggtccatcgctcgatgatctatgcgccgcgggcgttactctcggaggcgtag

SEQ ID NO: 347851 - DNA, 1575 bp, Pseudomonas aeruginosa
atgaccactttgcccgacctgctccgcaggcatgcgaagaacaatccgaataaggccgcaatcatctggtacggcacggagcttgactacgcgtacatcgatcgcgcgagcgaccagcttgcattgcatctcgtccacaagagcggtgtggtggttggtgagcctgtggctctgttcatgcagaactgcccccagtacatcatcgcgcacttcgccatcttgaaggctggcggtgcagtgagcccgtgcagcccgctcttcaaagccatcgaactgcgcactcaactggccgatctgggcgcgcgtattgtgattgctggcgatgaattgctggacattgtcgaggaagtgcggccgcaaactcagctcgggcatgtcatcgccgtgcattacggtcgccacctgcccgtcacgccgacctacgccgtgccggaggcgctgctgaagcccaaagtgaccagcgccaaagctgtcgacttcgaggccatcgtggaagggagagcctctggcacgcttccagaactctcatccgaccaactgggtttgctcgtctacacctccggtacgactggtcgcccgaagggcgccatgctgacccatggaagcatcatgtacaagaccggtggcgtcgtgcgtatcggcgacgtgagagagagcgatgtgatcctcgccattccgccgctgtaccacatctcaggcatgcttttcggccttaacgtcgcgatcttcaccggcgccacggtagtgctgcactaccgcttcgacccgacaactgccatgcagtccatcgagcgacacggtgtcacctactggaaaggaaccgctccgatgttggatgccgtgctgtcgtcagacgaggcacgtgcttaccggggaaattcgctgcgagtgaccacggcgtccagcttcggaatcgttctgacacaggatctgtccttacggtggcaacaattcacgggcggctgtttggctagtgaaccggggtatggtttgtccgagacgcatacgggcgacgtcatcatgccccccggggcaatcaggctgggaaccaacggggtcttcctcgaaggtgttgagtaccgcatcgttgacccagagacgggtattgatgtcccgctaggcgagaagggccacgtgctgctgcgcagcccgggcaatttcctcggctattggaacgcaccggagaagacgcgcgaagctgtccaggacggttggctgttgaccggcgaccttggccgtgtcgacgcagatggctacttctcgctggctgggaggatgaaggaactcatcaaagtatcaggctacagcgtgttcccagccgatgtggaggccatcttgtctcagcatccgaaggtcaagctggccgccgtcattggggtggcggacgcacgccgcggtgaagtcgtcaaggccttcatcgtgcccgaggacggggtaacggagcagtttggcgacgaactcatcgcatgggcccgtgacaacatgtcggcgtataaggtccccaaggcggtagagttccgaaccaaaattccgtacacggccagcggcaaaatcatgcgccacttgctcgtttga

SEQ ID NO: 347852 - DNA, 963 bp, Pseudomonas aeruginosa
atgcgttcgttcttcaaactcgtcgggctgtcagccgccgtggttgcctgcgcacaatcgctggctaacgaatatcccagcaagccgattcgcgcgctggtgggctatccgccaggaggttccgtcgattacatcgcgcgcatcgtctcacagcctttggccgaggcgctgggccagccagtggttatcgagaataagcccggcgctgacggaaccctagtcgcagcggaggtggcacgggcagccgccgacggctacacgttgctgttcatcccgtcccagcaggcggtgaaccagcacttctataaaaccagctacgacacgatgaagtccttcgactacctgtcggagctggtctccacaccgctgctgctcgccgtggcacgcaactccccagttgccaacgtgtccgatctggtcaagctcggcaagggtcgcaaggatggcctaacgtatgggtcgaccggctccggcagctttcagcacctcgcagcattcgttttcgcccagcgcgcgaacgtccctgcgctgcatgtcccctataagggcggtgggccgatgctgacggcgactatgagcggagaggtggacttcgtgttcacttccttgtcgcttgtcatcggccaggtcaaggagggcggcaagctcaagccggttgccgtcgcgagcaccagtcgatcgccggtattgcccgatgtgcccactgtcgatgaaaccatcgccggcgtccaagccaacaattggattggcctggttggcccggccaaccttccggccccggtgaaagcaaagctcacggctgcgctcggcaaagtgctgaccaacccgcaagtcaaggcccgtctgatatccgagggctggcagattgtgggtagcacgccggaggccttccagcagcatatgaaggccgaagttgaatactacggcgacctcatccaaaaaaacggcattaaagcccaataa

SEQ ID NO: 347853 - DNA, 900 bp, Pseudomonas aeruginosa
atgaacttgaaacatattgaagccgtggtccacatcgcccgcgtgggatcgctttccaaagcagccagttccttggggctggcccagtctctgctcagcagaaacctgagcgcgctggaggccgcatgggggcggcagcttttcgacaggcacggccgcggactggaactgtcggagttcggtcgattgatgcttcccgagtgcgaagcgctgctcaagcaacagcgcaagatgatgcagttggttgcgcaggagtcaggtaaggtcactggaactgtgcgccttggcgtggcgccgtcggtagcccacgcggtcattccaggctttgtgtgggaactaaagagcgcgttgccagaggtggtcctcagcatccacgaaggcgtgagcggacagctcgacgactggttgaccaacggacgcgtcgacctggcaatcgtcaaccgtcattgcgcgcagctcccggatacggaggacctgctcgcgcaggtggatatgcacctgatctcggcgacaccgaaacggagcgcttccgacacagcggagttcaactcgctggacggtgtgccactcgtgctgccggcgaatccttgcgagttccgtggggcactgcggcagattgccaaggaacgcaacatcgccttgaatatcgtgttcgaggcggaatccgtcgcgctcatcaaggaactggttgccgcaggtcgcgcatcgaccatcttgccgatgagcgccgtgaagccggaggtgcgggccggcgtgctgtcggcctgcaggctcgtgtcgcctacttgcgagcgcaagatatcgctgtgctccagccgccagcatcaactgtcgcccgccgcacgacatgtcatgcggcagatcatggacaagatgccgcaacttcttcggccgaactga

SEQ ID NO: 347854 - DNA, 360 bp, Pseudomonas aeruginosa
atgactttgaaacgcatcaatgttggaccgcgcatggcggacgtggttatccacaatggcaccgcttacctggcgggaaaagtgccgagcaatccagacggcgacatcatcgagcagaccgaggatgtgctcgcaacaatcgacaagctacttgccgaggccggcaccagcaaggagaacgtccttcgggccgagatttatctcaagaacatcgaccagtgggcgcaaatgaacacggtctgggacaaatgggttgcgcccgaccagacaccgacccgcgccgccgttgaggcgaagatgtctaacccgaaatacctggtcgaaatcatggtcacggcagccattccgtctcgcgactaa

SEQ ID NO: 347855 - DNA, 522 bp, Pseudomonas aeruginosa
ttggctctctacagctataagggaacggcgcccgagatcgccagcgacgcaatggtattcgacaacgccacgctcatcggcaacgtcaaggttgccagcggtgcaggcatctggccgggcgcgaccatccgagccgacaacgacctcatctccatcggcgagaacacgaacgttcaggagcaggcggttctgcacgtcgatccgggccatcctctgacgatcggtgcgaacgtgaccatcggccaccaggccgtggtccacggctgcaccatcggcgaaggtacgctcatcggcatcggcgcggtcgtgctcaacgatgtcaaagtcggcagaaactgtctgatcggggctggcgcactgatccccgagggccgtgagattcccgatggctcgctggtcatcggcattggcaagattgcgcgagaactgtcagccgaggaaatcgctggtattcacgcgggcaccgcaaactatgcagcgaaggcccgagcgttctcaaacgacgccgaaaaggtgcaatag

SEQ ID NO: 347856 - DNA, 768 bp, Pseudomonas aeruginosa
atgggagaaccatccattgaacacgttcgggtctcggtgcaggaaggcgtcggcaccatcgttctgaatcgcaccgaaaagaagaacgccattactcgtgcaatgcggtcgcgcctcatcgaagcgctgattgacttcgaggctgacggctcggtctgtgcggtgctactgagaggtgccgatgggtcctgcttcagtgcaggtatggacctcgaagaggctcggcagaccaaatgggacacgctcatcgagcaacagagcgagcaaaggcgcctgttcgaagcgctgcgcgccctcaccaaaccgtccatctgcgccatcgacggccactgcgtcggtgctggttttcacatgtcgctcctgtgcgatctgcggtatgccacggctcgaagccgctgggggcagccagaggtcaaggttggcattgcaagcatcatcgggcctatgctgatgcgcatgcacatcggagagggccacatcgcgatgctcacagtatcgggcaagctgattacagggcagcgggcctacgagatgggcctcgtgtctgaacttgtggcgccggaagaggtgttcgaccaggctatgcgggacgctaaggcgctggccgcgttgccaaggaccgccatgcgggtcacaaagcagcgcaaccgcgcagtgacacaaggcgacttcgacgcagcatacgtggcggtcactcgtgcccagattgagtgcatggccgctggcgagcgcaccaagatgattgacggcttcctgaaatcgtcttag

SEQ ID NO: 347857 - DNA, 2094 bp, Pseudomonas aeruginosa
atgaacatgcagagccatctccagacattcctcgatcccaaggcaatcgccgtcatcggtgcatccgataacgttcgcaaggtaggtggccgtttggccaagtacgtcgcttcgttcgggtacgccgggaacatctactacgtcaatcccaagtccgggtccgtgcagggacgaaaggcgttcccaagcgtttccgccttacctgaagtgcctgatgccgtcgtcattgcggttaacggggaagccgcggtcgagcaagtgcgcctttgcgcggaactgggcgtgaaggtcgcggtcgtcggcgcttccggatttgcggaggctggacccgaagggcaagaccgccaacgccggctggtgaatgcggctagaagcggtgaccttcgactggttggtcccaatggccaaggcgtcggcaacttcaggaacggcgcagtaatgaacttcagctcgatgtacctggacataccgcccatggacggtcccatcgccgtccttggtcagagcggcgctgcgacctcgggcacttacgcactgctgcggcaagccggctacggcgtgcgatacgtcgtggcaacggggaacgacgccgatgtcaatgtctgcgacatgatttccctctgcgcggccgatccggagattcgtctggtgctggcctacctggagtccttcagccagccagaggcgctagccgaggctgcacgcttggtgcgagagcgcaacgcgttcatggtggtactcaaaagcggcagcagcaagaaaggcgcagcagcggccgcctcgcatacgggtgccttggttggtaacgatgcggccctggactcgtttctggcgcgtctgggcgtctggcgcgctgagcacattggtgacttcttgcgtgctgtgccgctgtacttggagagtcccgatgctggtgctggacggaccatcgctcttagccatagcggcgcagtggccgtgatgacggccgacatctcggagaaggtgggcctggaactggcggacctttccacgggtacgctctcgcagttggcagaaatccttcccgacttcggcacagcgcacaatccgctggacatgacgggagaagtgttacgcgtcccaggaatgttcaagcgggtcgtcgatgcgatgaccgctgacccacaggccgatatgctcttggtcagcgtacctgtggcggcgccacaccacgatatcggtgccttcgttgatgcggtggacgatttccgccagcgcagccacaagcccatcgccgtctgtgccccccaggaacgcatccgcgagatgttcctgaaccgcggcttcgcgacctttgctgttgaagccgacggcattgcggcgctgcgccagtacgcgcttcaccaacggctaatcgaacgcgccgaagacattcccctttccacgcctgccgagcgtgtcgatggttccggcctgcaagatgaggtggctagcctcaagctgatgcaggacgcaggtgtgccggttgttccgttcgccgagtgcagcaccgacgtggaggtcgaggctgccttcgcgcgccttggcccgaccgtcgtggttaaggggtgctcggcccgcctgccgcacaagagcgagcacggtttggttcatctcggtctgacctcggctgctgctgcttgcgccgcatcccgtagctgcttcgccaagctccgtgcccttggcgaagaatcgccgcgtgttgtagtcgccaagatggtgtctcagagcggccatgagttcgccattggtgtgagcgtcgatccagtgcttggaccggttgtcatggtgggcgacggcggtacgctcattgaactgcgccaagacgtggcgacgctgcttgccccatttacccttgaggctgctgaggcggcgtgccgtagcttgcgcatcggtccgttgttcgacggctaccgtggctccgagtccctgaatctcaagagcttggccaaggccgtgaagcacgtcggcgacttcgcctgcgttaaccaaagcgcgattacctcgattgacatcaatcccatctatgtctacgcaggacagagcgaagcctgcgcagtcgacagtgtggtcgagttccatgaggagcgctga

SEQ ID NO: 347858 - DNA, 987 bp, Pseudomonas aeruginosa
atggcttctgaatataaacgccgagtgttcattggcgccgcgtgcgtctcgtttctgacctcacttagcggtgtctccgccgcagcggggtatcccgacaaacccatccggctcatcgtgccgttcgcagccggcggtccaaccgacgccgtagcgcgcctgcttggcgatgggcttgcccacgagctgggcgtgtccatagtcatcgacaacaagggcggtgcgggcggaacgctggcgaccacgcaagcagcgacatcggcagcagacggctacacgattcttcttgcacctacgggtgttcttgccatcaatccgaccctctacggcgccaaggcgaaggtctacacggattcgcttgtccccatcgcaatgctggtgcgctccagctacgtgctgctggtgcgtgcagacgggccatattcgacggtgcaggacttgatcgccacggccaaggctaacccgggcaagctaaccttcgcgtcgagcggcgtaggcggcaacatccacctcaccggcgaactgttcaaacgccgcgccggcatcgacgccgttcacgtgccctacaagggttccggccctgcagccatcgacatcatcggaggccgtgtcgactacatgttcgacggcgtggcgtctgccttgccaagcatcaagtcgggaaagattaagccacttgcagtaacgaacgcgacccgcattcctacgcttcccgaagttcccaccgtcgccgagactgtcgctccgggattcgagtccttgggttggtattcgctcgtcgcgccgaaaggtaccagccccgagattgtcgccaaggtgagcgccgccgcgcgtgcgatgttggacaagccggaactgcgcgccaaactcgccgaaatcaacatcctgccttggtggtccactgcgcaggcgctcgctactaccgtcaagcaagaagagcaagcctacggcaggctcatcaaagaagccaacatctccgccgaatga

SEQ ID NO: 347859 - DNA, 993 bp, Pseudomonas aeruginosa
atgtttcgctggcgtgaaactgtctcccttcgaactatcaaagcagctatcgatcttcgcgaaaccctcaatacaagtcccgcccagcgtccgaccatgaatatctcccatctcgaagctgtgaaactcgtggccgagcatggctcagtgtcgaaggccgctgccgcgtcgggagttgctcaatcggcactcagtcgcagcgtgtcgcttgtggaagcagaatggggacaacgactcttcgagcgcaccggtcgcggattaatacccacggagggctttggagtgagaatgttggcagaggtcgatgcgttgctgatccaatggaagcaactccaccttaccgctcatgaggcctccgaggagattcgtggaacggttcgagtcgccatggctccgtcactcgcgaaactgcttgttcgtccgcttctgagcgacatctccatcacgcatcctgaaataaagatctgcctccagggcggcccaagttcgggctttgaagaacaagtgctggcggggaaactcgacgtcgcactgctcgtgcgctactcagagcaacatcattcaggcgaggaatttttggcggacatcgcggtctattgcgtctgtaccaacacctcatcgttggcgaagcaaaacgtggtgtcgatgcggcaactcctagactgtccgctcgtattgcccccgaggccgaacactattcggccatacctggacgcacaagcgcatcagctcggaatgcgtgtcaacgctgtcgttgaggcggaatccattgtcagtctcaaggaggtggttctgtcaggtactgcgctcgcgatcctgccgctatcaacggttaaggatgaagttgccgctggcaccttggccgcgctacgcatcgaatctcccaccatttcccggaaagtgatgctcgccaccgcatcaccatcgtcatccgcctcacgtttcgtcgccgctcggctgcgccgcatggtctctacaaccatgatggcttag

SEQ ID NO: 347860 - DNA, 2076 bp, Pseudomonas aeruginosa
atgcataagaacatccaggtatttctgaatccgcgaagtgtcgcggtaattggtgcttccgagaaccccaacaaggttggaggccggccgattcactacatgaagaagttcggctttaagggagatatctaccctatcaatcccaaccgatccgagatccagggattgaaggcctatccgaccatttcggcgatcggcgccgcgcccgatgcagtcatcgtcgccgttggcggcgaccaggctttggaaagtgttcgcacctgcgccgagctgggcgtgaaggtgggcgtcatcatgtcttccggattctcggagctgggggaagagggccgagcgcgcgagaaagagctggtggacgtcgcccgacgccacggcatgcaactgattggcccgaactcgcaagggcctgcgaacttctcgaacggggcaattctgaacttcagcacgatgttcatggaaactgaggcattggacggtcctatcgcgatcgtgagccagagcggaattgcgagcgttatgccgtaccacttcctgcgggagagcggcttcggcgttcgctatgtcgtcgcgacgggaaacgatgctgatgtaggtgcgtgcgagatggtcgaggcggtcgcggccgaccctggcatcaagctgctgttggtctacctcgaatccattaacaacccggaaagtcttgccgaggcagcgcgtctcgtgcgggagcgaggtgcctacatggtggcactcaagagcggtgaaagtgcgaagggtgcaagcgctgcttcgtctcatacgggtgcaatcgtcggcaacgacgccgcgatcgacgcatttctgcgccagaacggaatctggcgcgcacgtgacatcaacgaacttgtgcgcgcgacacccctctacctgcgcgaccaggacagccgctcgggccgccttgtggcgatgagcggcagcggtgcggtggctgtcatgactgccgaccttgcagagcgcaaggggatggaactggctacgctttcaggcgccactaaggcggcactcgccgaggttcttcctgatttcgggacaccgaacaacccgctggacacgacagccgccattttgagcgacaactccatgtggcgccgctctttgaacgctttggggtcagatccacaagccgactgcgtgatggtgagtatgtcggtcgccggaccggggttcgacgtagaggcgctcgcacacgatacggcagagttttgtcagcgcgctaacaagccgatggtcatgagcgcgcctcaggcccgcgttcgtcaggcgttcgaagcccaaggcatcgccgcctttgccaccgaggccgatgcagtgggtgcaatagcccagtacgcggcccatcggcgtcttcgcggcagcattgcaccggtccgggagaagccatcatcagacttgagctttgcgcgcggcgtgcttgacgagtacaacagtctgagaacacttgccgagttcggtgtgccagttgtagatcaacgaatctgcggcacggctgaagacgcggttgcagcgttctctgctttgggaggcgggaccgttgtcgtgaagggctgcgcgtccagcgttccccataagagtgaactgggtctggtaaagctgggtttgagatcggcggacgaagttcgcgctgcagcgcagtcctgcttgaccaagcttctcgaactcgacgttacagacccccaggtgctggtcgcagtgatggtcaagccggtgcacgagcttgcgctgggcgtatctgtcgacccgaaactgggcccagtcgtgatggtgagcgatggggggacgctgatcgagctacgacgcgacgcagtttcgttgcttgcgccgttcacggtcgaggacgtaaaggctgcctgcaaacggctccgggttgctccactgttcgacggctatcgtgacatgccggctttggatttggaggctttcgctgaagccgcggtggcgctggggaacttcgcggtccgctgcacgaatctcaagtcgatcgacgtgaatcctgtccttgccctgcccaacggccgtggtgtgctcgccgtcgatgctgtcgtggagtttgcctag

SEQ ID NO: 347861 - DNA, 777 bp, Pseudomonas aeruginosa
atgaccattgaacttcaactcgcccgcgaagacgacatcgccgttgtcacgctgaaccgtccccagagaatgaacgcgatcaatgccgccatgcgagcaaagttcgtcgagagctttacccaactgaacatggacgacagcgttcgcgccgtcgtcatcaggggagccacttcacgcgcgttttcatcgggcatggacctggatgacgcttacgacgtcacgtgggacaagatggctgatcgcatgaacgatcagcgagaactgctcgaagtcgttcgcaacatgaataagcccgtcatatgcgccatcgacggaatctgcatgggtgccggctttcacatcgcattgctgtccgactggcgagtcgccaccccggacagccaatgggggcaacctgaggtgcgcgtgggcatcgcgagcgtggtcggtccatatctcatgagcttgtacgttggtcgcggaaacaacatggagctttcgctctcggcggagccgatcacgggccagcgcgcctatgagatgggcttcgtcagcgagctttgtgccgctgatgaagtcctccccaaggcgatggagcgggctcgcaaactggcctcaatgccgaggatggcagttcggttgacgaaggaacgtgcgagggagctgactgacgatggcttcaatcgcgcttttatcgccgcgaccttggcccaagtgcaatgcctgggcgacggggagcgcatcgagatgatcaatgtgttcctggcgcgccgccaggcaaagaacgcatctgtttga

SEQ ID NO: 347862 - DNA, 969 bp, Pseudomonas aeruginosa
atgctctaccgtccttggctggctgcgttgctttgttctctcagcctcaccggccttgcacacgccgattttccagaccgcccgatcaccatgatcgttcctttcccgccgggaggcccgaccgatgctattgcgcgtcacatcggtcagggactggggaaggagttgaatgcctcgattgtggtcgacaaccgagggggtgctggcgggacgcttgcgacgaccgtggctgcaaccgccaggcctgatggctacacgattttcttcgcaacgacagggacgatgacgatcaacccggtgctctacaagtcgagcctgaaggttaaccccctgaaagcctttacaccgatcggcacggtcgcctctgccgccaacgtgttggtggttgccaaagaggcgccttacaacaatctgcaggagctgatcgcggcggcgaaggcgaaaccagataccttgacgttcgcatcgagcggcaatgggggcgtcatccacctcacgggagagcagttcaagaacgccgctggtctccagatttctcatattccgtacaaaggttccgccccggcgatgactgatttgatgagtcagcgcgtaaccatgatgttcgacatcacgtccggctcaatctcgctgatccaaggcggaaaactgaaagcccttgcggtaaccagtgccaagcggctggagattctgcctgacgttcccacgatggcggaggcgggcatgcccaacttcgaagctaccagttggttcggcctagttgcaccgcaagggacgcccgagcccgttctcacgaaaatgagccaagcgctgcaaagggttctggccagcgcggaattcaaatcccaaatgcgcgcgctcggcaccgaagcaatgccgggaagcagacaagactttgccgaccaactccaaaaagatgcggtcaagtgggctgacctcgtgaagaaatccggtgcaacgattgattga

SEQ ID NO: 347863 - DNA, 954 bp, Pseudomonas aeruginosa
atgaatgttagacagctcgaaatcgtcgcccagattgccaagagcggttcgctgcttcgggcttccgtcgccctcggtttggcgcagtcgatcgtgagccgtcagttgagccatcttgaacaagagtggggcaatcgattgttcgaacgaacgggcaggggcatggtcctttcggagttcgggcagcaactgtttccgcagattgaagcgttcctgcaaggggcttaccaactggacgatgcggtcaaagtggcgtcgggcgtgcccactggtgccgtcaagatcggcgtcgtgccttcgttggccgatattgtcgtgcctcggttaatcgaggacctcaaggtctattctccgggtatcagactgtccttcgttgaaggattgagtggcctcctggatgacctcttggtcggtggccgcatcgacttggcagtcatcaacagatatgaagccgataaatatccggctgaggatttaatcggcgaagttgagacataccttgtctgtaactctcgccacaagttcgcaaaacggcagtcaattaatttctccgagttaagcgggctccccctggtgttgccatcggcagggagtgggctgcgaaggattctcgatcagctcggcaagcgccttggggtcgaggtcaatgtgcatatggaagctgagtcgctatcggtaatgaagcgggtcgtttcttcaggagcggctatgacgctgcttccgctgagcgctgtttgcgaagacgtgcgaagcggtgggctttccatcgtcaaactggtcgagcccgaaattccccgtcggataatgctatctagcacgcagcatcacggcatatctcgcgctgccaggattgtgatggcccgcttgcgccatctctcacccgagtttgtgcatcgggcttgctcaatggattccgagaaagacgcgattagtatgaacgctgtcgtcgcctaa

SEQ ID NO: 347864 - DNA, 561 bp, Pseudomonas aeruginosa
atgaacacacccaatttgtcccagcttcccgccgatctacccaggcccgtcgatgacggcgccgcagcgcatcttgagggaatgaaactgccgaacgtcgtgcttgccagtacggacggctccagcatcgaccttggcgccttgacaggaaagtgggtcatctatgtgtatcccatgaccggccgccccggagttgccttgccggacgggtgggacggcatccccggtgcccgcggctgcacgccgcaatcatgcaatttccgggaccactaccaggaacttcaggaactcaaggctggcgtgttcggcctgagcgcacagactaccgactaccagagggaagtccgcgatcgcctgcatctcccgtttcagctcctgagcgatgaaactttgcagttgaagcagacgctgcggttgccgaccttcactgtcgaaggcatggaattgttcaagcggctgacgctcatcgttgagaacggcaccatcacaaagtgcttctacccggtgttcccgcctgatacccatgcgcaagaggtgctttcctggctgcatgctgcctga

SEQ ID NO: 347865 - DNA, 1302 bp, Pseudomonas aeruginosa
atggaaatcactggaaagacagcggcagaaattttcgacagcatccgcacgctgacccagaacggcagactggtgccggggcaggaattacccacggttcgagacctcgctgccaggttgagcgtcaaccgcaatacggtgtcgatggcttacaagcgtctggtgacagcgggtgtcgctgttacgcaggggcggctcggcactgtgattcgcgagcagcccggccccggggagcaagaaggatcgcttcccggttcaccgctgaccgacctggggagcggcaatcccaacgccatctggcttcctgatatcggcgccgtcctggctcgcaggccgtaccgcacgcgtctatacggtgaagccacggtggacccggagctggaagcgctggcacgccggtggctcaccggcgactgtcccgagcgctatgaggtcaatctgacgcatggagcggtcgatggaatcgagcgcctgctgacggcatatctcgtggccggtgacaaggtggccgtggaagatccgtgcttcgtcagcaacatcaacacgctgcgcactgccggactacagcccgttggggttgccgtcgatgcccaaggcatgcaggtcgagccattggaacgagcgttggagcaaggcgcgcaagctgtcatcgtgacgccgcgagcgcataacccgaccggctgtggcctgagcgcagcacgtgccaagaaagtgcgggcggtattggcaaagcacccgcatgtgctggttctcatcgacgaccatttttcgctgctggccgtcgccgattacttcaacgtgatcccgcccgcgacgcatcgctgggcactgatccgatccgtttccaagtcgcttgggcccgacctgcgcctggccttcgtggcgagcgacgaacagacgtcccagcggttgcggctgcgcctggcccccggaaccaactgggtcagccatcttctccaggatgcggtgggcgcctgcctatcttcgcccgaagtgtcggctcagatcgccaaagcccgcgaagactatgcgcatcgccgagaaattctggcgagggaactgttcgaacagggtatcgccgtggctacgccagccgatggttccaacgtgtgggtgccattgcagacgaacagccagcctgtggtgctggcgctggctcaacaaggctggttggtccgcgccggcgaacccttcggtgtggatgcccccgcgcatggcttgcgcatcacggcctcggcgatcgacgaaacggtagcgcaagcgtttgcacgcgcgctacgtcgagtgttggatcgcggatga

SEQ ID NO: 347866 - DNA, 816 bp, Pseudomonas aeruginosa
atgaacgctgacgttccgttagatacccagactctgcacgaccagcacggacgctggccgcaggccgattcggtggaagacttccgccgcaacttgtcggcggtccacgctcgcatcgctgcggcttgccagcgcgtcggacgcgatccgacgagcgtgcgtctgttgccggtcagcaagaccaagacggaagctagtattcgcctggcctatgccgctggctgccgtcttcttggcgagaacaaggcacaggaggctcatcgcaaatgggaggcgatgggggatctttccgacttgcgttggtcggtgatcggccacttgcagaccaacaaggccaagctggtggcacgtcttgccgtcgaatttcatgcgctggacagcctgcgcgttgccgaagcgttagaacggcgcctgcaggccgaaggccgcggactcgatgtgttcgttcaggtcaacacgtcaggggaacccagcaagtatggattgccgcccgacgcagtagcggcattcctgcgtgagctgccggcgttctcggcattgcgggtacgtggcttcatgacactggcgctgttttcggcagaagccgagcgcgtgcgccggtgcttcgtactgctgcgcgagctgcgcgaacggctgcgccaggacgcaccgcaggggatcgtgctggatgaactgtcgatgggcatgtctggcgactacgaaatcgccatcgaggaaggcgcaaccattgttcgcgtcggtcaggcgatcttcggtgcgcgcgacaggcctgatacccactactggccagcctctggcgatagccgcgaggactga

SEQ ID NO: 347867 - DNA, 897 bp, Pseudomonas aeruginosa
atgtttctatccggtttgagtgctttccccctgaccccaatgaacgagagcggcatcgacgaagccacgttcatccgtctgatggagcgccttgctgctgcaggtgtcgattccatcggcgcgctgggctcaacgggcagctatgcctatctgacccttgccgaacggatgcacgtcgctcggctcgcagtgaagcatgcgggagatgtgccggtcatcatcggcataggcgccttgcgcacgcgcgacgtactggcattggccgaagacacgcagaaggccggagcgcgcggggtgttgttggcgcccatgtcgtaccagaaactgtcggccgatgaggtcttcgacctctacaacgtggtgacgcgccatctgtcggtgccgctggtggtttacgacaaccccaccaccacgcatttcgagttcagcgatgagttgcatggtcggatcgcacagctacccaatgtcgcctcgatcaagattccgggtgttccggttaaccctgatgcggcatgggcgcgggtcgagcggctgcgcgccctgattcccgcgcacgtgacgataggggtgagtggcgatgccttcgccgccaccggcttgaacgcgggatgtgaagcctggtactcggtgattggcggcctattcccgcagaccgccctggcgatcacacgcgccgcacaggccggaaatgcggaggaagccacgcagttgtcagcgcggcttgagccgctatggacgttgatccgcaaacacggcggaagtctgcgcgtcgttgcggcagccgccgaaaagctgcaactggtggatacacccagcctccctctaccgatcaaagccatcacgggtatcgaccgggatgggctggtggcgctggtggatgagctggatttgaaatga

SEQ ID NO: 347868 - DNA, 1437 bp, Pseudomonas aeruginosa
atgagtaggcggttgcagcgcgaatccatttcttcatccgttccttccccaaagcggaccggctgggtcagcctggcccggtacgtagcagccgcttcgctggcgaggacggctgatggcggcgctgtcgtcgccatcgtcctgctcgtaacgatgcagggtggtagcggaaagttggcgggatttctggccgcttgcatcaccgctcctcatctgcttggcccctttgtcgcacgacggatcgacgtggccgacgacggccgtaaggtgatcgccctcgcttgcattttctattccctggcgcttgctgcggccattgcgacatttgggcacgtctccgccctcatcagcggaatgcttctcgcggtatcgggttgctgcggcccactcttgacgggagggatcagcagccgtcttcctgctatcgcgggccagaatcaacgcagccagcgtcgtgcacaaggctgggatgtggcaacctatggaatcggtggaaccgtcggcccttcgatagtcgccgcagtttccgcctgggcttcgccaagcctggcggcattctgtttggcagcagcggcattctgctccgctgggctggtgctacgactcccgtatatggctcccgaacatggtggtgatgtgcggagcgtgccaggcgcctggcgcaccgtggcgatgatgggggccgatggcccgctgcgccgaacgctatacatgaccatgctcgtcgctttcagcatggcagcattgccgatcaccgctgttcacatgacggccttgctcaacgtcccggcagcgactgccgctgccatgactgccggctacggaattggaaatctcacgggatcaatgggcgtcatgttgcggccatcgcgtggcagcccggacatcctcatgtcacgcctggccttgtgcatcatcgttggcctgttcgcggtaatggcaagcccgacactgactttcgctatcgcggcctattggacggcgggaataatcaatgccttcttcttcgctaccacgttggctgcacggacggaatacgctccagcaaagggacgcggccaggtttttctatgggttgccgcaatgaagattaccgcgggttctgctggaactgcggtggccggtgcgctgactggtgtggacgtgcgtgctccgctgatcattgggatagcattgatcggaggcgctgtggggtctcgctgctggagcggcgaatggagcgtcgtaagcgccataagccgctgcgggtgcaggcaggagccgttggcgactgcgcacatggaacccaatcattcatggacccggcccacggcgacagggatgaatatcaccagggcaagagccgcggagacgctgaggaccaccccgagcgacgtggtggccgtgaagggcagcgcgctcgttatgaatgtgccgactgcggcgagcgccatctga

SEQ ID NO: 347869 - DNA, 1218 bp, Pseudomonas aeruginosa
atgagatccacgccttcattgcctaccgccccgaaggatcggcaactcaccgggagcactctttttctcctcgcgggcctcgcggcactggggacgctctcgaccaacatcatattgccggcctttcccgacatcagtgccgctctcggtgcatctgcgcagagcctaagtccgaccctcagcgcgttcttcatcgcgttcgcgctgggccagcttgtggtcggacctctctcggatcggatcggccgccaatggctggtcatcggcggccttgtagtgttctgcgccggcagcatcatctgcgcggccgccggcacgcttcaggtacttgtgttcggccggatcgtccaggcgctgggagcctgcgcggcatctgtgctctcgcgtgctatcgcgcgcgatctgttcgacgggccggcactagccaaggcgctcgccatgaccatgattgcaatggctgctgcgccgggtttctcgccgttggtgggcggcttgctgaacaccatagccggctggcgcgtcacctttgttctggtaggcgtgtgcggattgcttctggcgatctactttcgactgagccagggcgagacccatcccgtcgatcggcgaaattccgtatccattggcgcgatcgcgcttgggtatctgcggctcgcatgcgatagacggttcttcttgccgggactgcccgtcagcctcatcatcggtgggctctacacctattttgcggcggcgcctgcgatcctcatcaatggggcgggcttgagcgccttccaattgggaatcttcttcgccgcgacagtgttcgtggtctttggtgcgggcttcctcgctccccgccttgccaaacgcttcggtcagcggaactccgcactgatgggtttcgtggtcgcgctcgcaggcgtcgccatcctcttcaccgctccacagacatccccgctctggaccgtcaccgcgtcatgggtcgtgttcctgttcggcctgggggtggccaaccccgtgggtacagcgcttaccttgcaccccttcgccgcgcacgcggggctggcatctgcgcttctgggattccttcagatggcgctcgccgcagtcggcacattcataacgagcgcgctgcccttcacggccaccacgtcgctcggggtggtcctcagcgtctccgcggctcttgccctggtgatattcatccctgtcgccgtgggccgggtccatgaatga

SEQ ID NO: 347870 - DNA, 978 bp, Pseudomonas aeruginosa
atgtcgtccatcatatcaaggggcgacagtcccgcagaaacagtcctcgtgacaggagcgaccggccggcacggtggaacgtccgcacacatcgtcgccgccctcctggaagcgcatcgttcggtccgtgttctagcccggagcgaaagtgaacgaacggaagcgctggcggctctcggtgcggagatcgtcatcggagacttcaacaaccgccgcagcctcatcgcggcgctcgacggggttcgcaccgcgaccttcacctatccgatcgccggaggcattctcccggctgcggccaatttcgcatcagcggccagggaagcgaagacgcctgtgcgcgtggtggtcatgtcgatggccgtggcgcatcctgacagccctagccatttgggccaggcgcaatggctcgcggaggaagtgcttgcctgggcaggcctcgatctgtgcattctgcgaattgccgccctgttcttcgagaacatcactgccctgcacagcgcttcggtaagccactcggccgagcttgccaacagctttggcagcgcagacgttccctggataagcggcctcgacgcggctcggctcatggttgccgcggtgctccgaccggagctgttcgccggccaggcgattcactatcccccaggcgccgaacttcggagccatcacgaaattgccgaaatgctcagtgcggaactcggcaaggaagtccgcttcaaggccatcgaccgcgagcaatggacgacggcgctgctggcgctgtccaaggaagatccagccggcgtcgtcaacccggatatggcgcggcacatccccgcggtcggcgccgcgctggcatcagctaaagcacccatccgtgcgcccgatccagccgaactacagcgcgtcaccggacaggcgccgctttcgttgcaggcgttcctggcgcagcaccgcgccgctttcgagcagtcctatcgtccggcggaggcgctatga

SEQ ID NO: 347871 - DNA, 585 bp, Pseudomonas aeruginosa
atgcgatacggcacagaccagaaacaaattacccgcgatcgcgtgttaaaggtggcagcgagacaactgcgcgagcgcggcccggagcgcatggcgctcgcgcgcgtcatggccgatgccggcctgacgcatggtggcttctacgctcactttcagtccaaggacgattttctgcgtgcgacggtcgagcggatgttcgtcgatagtccgttcgccatgttgcgcgaggagggccagtctccgagcgaagcgttgacacgattcgtggacttttacctgtcgcctgaccatcgggacacgcgcgagggagggtgtccgcttcccttccttgcggcggacgcgccgaggcttccggcagatgttcgagagcgcctggcgggcggggcgaggacgatgaccaaacacgtcgcgcggcatctcgcagcgctcggccacagtgatgctgaaggcgaggcatcgtcgtgcgtagccgaaatcatcggcgcgatggttctcgcacgcgccgaaccagaccgctcgcgctcggacgcgattcttgcccgaagccggtccgcgatcctgcgccggctcaccttggagaaatga

SEQ ID NO: 347872 - DNA, 642 bp, Pseudomonas aeruginosa
atgacgacgagctacgacccgaagatcacggcgctgctgtgcatcgacttctacaacgacttcctgagcgaaggcggcaagctctggccttgggtcaaggacatggcgcaggagttgaacctgctcgacaatctgcgcacgatcgtgagcactgcacgcgaggcgggcatcaaggtctatcacgtcccgcatcaccgctgggaaccgggcgactacgtgaactggaaatatccttcgccctatcaactcggtgccggcgagcggcaggcgtttgccaaggacacgtggggcggcaccttccacgaagacttccaggtgcggcctggggatgtcgtcgccaccgagcattgggcgtctagcgggttcccaaacaccgaccttgagcaccagctcaagcggtacgggaaggagaagatcatctgcgtcggtctgctcgcgaacacctgccttgaggctaccgcgcggatagggatggagctggggttccacgtcacgctggttcgcgacggcacggcggcgcggtcgcccgaggcctaccacgccgcgctcaatatcgacggtccgacttacgcgcatgaaatcctgacgacggccgagttggtggccggcatcaaggcgtcagttcctgccgctacggcgtga

SEQ ID NO: 347873 - DNA, 456 bp, Pseudomonas aeruginosa
atgacgttgacgggcgagaagctctatcttgaagacgtggccgtgggcatgactttcagcagttcagagtacgcactcgacgcggcgcagataaaggcgttcgcatcgcaattcgatccgcaacctttccacttggatgaagctgcggcgcaaggcagcttcttccagggactggctgccagcggatggcacacgatgggcgtaacgatgcggttgttggtggaaagcctgcccttcgcgggtggcgtgatcggagcgggtgcggagttgtcctggcctggaccgacgaggccgggtgacgtcctgcaggtcaggagcgaggtggttgatgtccgaccgtcccggtccaaggcggaccgcggcatcgtactggtccgttcccgcacgcttaaccagcatggtgaggtacgccaggaggtcacgagcaaactgctggtgttcaggaggggaagttag

SEQ ID NO: 347874 - DNA, 594 bp, Pseudomonas aeruginosa
atggggcgctcgtcgaaggaacaggcgtcgcagaaccgggcaagaatcgttgaggcggccagccgtctctttcgccaacacggcgtcgatggtgtctcggtggcggacgttatgggtgcgctcgacatgacgacgggcggcttctacaagcacttcgcgtccaaggaggcactggttgcagaggccttcgccttggccttcgaacaatcatcggtttcgtgggaaaaggtttcgcagcgcgggcaggatagtgctgaccatcggtcgggggcgatcgtgcggcactacttccagaagcggtcggccgataagaattgccccatcctggcatttgccccgcacgttgagaccggggccaccgacgcccagacagtaggcgcctacacgaagggcgcggaggcgctgttcaagcaatttcgcgatcacatgcgagcgtgcggaagcgacttgtcagatccagccgttgagcaagacgccaaggtcttgtttgcggcgatggtgggggcgcgcttgctcgccaacgcgaccggcgatgcggattgggcgaagtcgatccaagccacagtacaacgggctgcaaacgaccttcattga

SEQ ID NO: 347875 - DNA, 723 bp, Pseudomonas aeruginosa
atgatcgatctctattactggccgacgccaaacggcaagaaagtctctattttcttggaggagacccaaacaccttacaggttggtccccgtcaatatcgcccgcggtgatcaattcacgcatgactatctaaggctcaatcccaatcaccgcatgccagcgctggtcgacgatgcgccggaagatggcggtgcgcccatcagtgtcttcgaatccggtgcgatccttttttacctcgccgagaagaccggaaagctctggccacaagaccggcgcacgaagtacgaggtcgtccaatgggtgatctggcaaatggcgaatcagggaccaaagctcggagaggtggggcattttcgtcggctcggcgacacccagggggatcagtcatatgccgtgcgacgcttcacggacgaggcgaatcgactatacggggtgctcaatatgcggttgcgtgatcggcgctatttagcaggcgacgaattcaccatcgccgatatcatcagctttccctggacggtccactggcaggcgcagggccaggacattgccgagttcaagcacttcaagcgatggttcgacgaagtgtcaacgaggccaggcgtacagcgtggccttgccgtcggtcaggacctttcgagcgaccaaggggaactctcgcccgaggaacaggagcgtatccgcaagatcctctacaaccagcgggccattcccgttcccgactaa

SEQ ID NO: 347876 - DNA, 669 bp, Pseudomonas aeruginosa
atgcgtatcgatatctggtctgacatcgtttgcccgttctgctacataggggaaaagcgcctccaaagcgtcgccgaggaaaccggcgttgaacttgagcttgtctggcacagtttccaactcgaccccaatgcaccacgcacgcacgaaggccccagcataaggctgctggtcgaaaaatacggccttcctctcgccgaggcagaggcgcagcagcgcaaggtcgctgcgatggcgaaggcggacggcgtggactatcagtggcaaaagacccagccgggtaacacctttgacgcccatcgcgtcctccaactggcccaaacaaaggggctggggaccgaagcgaccgaagcgttcttcgaggcgtctttgacggagggtttgaggatcggcgagcccgaagtaatcgaggaagtcgcagtgggggccggcctcgatcgtgatgaggtccgcgccgtgctgcaaagcgatcgtttcgccgaggaagtgcgcgccgatcaggaactaggccgccggctcggagtaagcggtgtgccctttctcgtgttcgacaacaaattcgcgatctccggtgcccagtcgcgcgaggtcttcgctaacctgctgcaaagggcgcaaacagaacacatcgatcaggacggcccggcttgcgatgccaagggctgctga

SEQ ID NO: 347877 - DNA, 966 bp, Pseudomonas aeruginosa
atgaaagctatcgtaatgcgtgaaccaggtgcaccagaggttttggaactggccgagcgagacgatcccgttccgggcgctggcgaagttcttgtcgagatcgccgcagccggggtgaatttcatggacacgggcgtgcgtcgcggcttgttctgggaagagcccaacccgaagatcattggcgttgaaggggccggacgtgtggtatcggtcggcgcgggcgtcaaggacttcaagccgggccagcgcgtggcatgggtctatgcgatgggaagctatgccgagcgcatcgccattcccgcagcggcgcttgtgccgataccggatgcgatcgacgacaagaccgcggcgtctgtcatgatgcaggggcttacggcgagccattttgcaaccgacttctatccggttcagaagggtgatgtggctctggttcatgccgccgctggcggcctgggaatcatcttgacgcagatcgtcaagctccggggcggcaccgtcatcggccgtgtttcgagcgaaagcaaagtcgcgatcgccaaggaagccggcgccgaccatgtaatcgtcgatgccggtggcgatttcgctgatgaagtgcttcgcctgacgggcggcgaaggcgcgcacgttgtcttcgacggctccggcccgacgacgtttcaggcgtcgcttgcgtcgcttcgtcgatgcggcactttttgctggttcggccccgtgctcggtgggcctggcgcgttcgacatcggtactctgccgaaaagcatcaagatcggctatgccgtcttcatggatcacatccatacgcccgagttgctgcgcgcacattccaagcagcttttcgactggatcgccgagggcaagttgaagctgcggattggtgaaacctatccgttggccgaggccagccgagcgcatgccgatatggaaagccgcgcttccaccggaaagctgctgctgatcccctga

SEQ ID NO: 347878 - DNA, 762 bp, Pseudomonas aeruginosa
atgtatgaacaacgacacaccggcagaatcgcaatcgtgactggcgccggtagcggtatcggacgggcaaccgccatttccctgctgaggtcaggcggctttgtcatcgcctgcgacgtcaatgctgacggactgaaccaaacactcgcagaggtgcctgagtgcggcgcgcggatcgaagctgctcacatcgacgtgacgaagcagaccgacgtggaccacatcgtcgctgatgtcctcaaacggcacgcacggatcgacatcctggccaatgtcgccggcatcatggacggctttctgccggctgccgaggttgatgacgcaacgtggaatcgcgtcatggacgtcaacgtcaccggctttctgcgcacgtcaagagcggtgctgccggggatgctggacaacaagtccggcgccatcgtcaacgtctcatccgtcgccggactccgcggcggccctgccggcgtcgcctatacggcctccaagcatgcggtcgtcgggctcaccaaatccattgcctggagctacggccgcgcgggcatccgctgcaatgccgtttgccccggcgccgtcgatacgccgatctccctcgaatcgcgcagcgcgctgggctccgaacgcagccaggcggtcgcaaatctcgtcatgagcgtcgcgcagcccgagcagatcgctgccgccatagcgtggctggcttcgcccgaggccgacaacctgaacggcgcaatcatccccgtcgatggcggctggtcagccggctga

SEQ ID NO: 347879 - DNA, 804 bp, Pseudomonas aeruginosa
atgtcgtcactctcagattacgaagaagccttcgaacgcatcagttttcgtcgtgaagacggcatccttgagatccgtcttcacacgaacaacgggtcgttcattttcgatgagcagacccacaacgaattcgggacagcgtttcacgccgttgcgcacgatcttgagaaccgtgtcgtcatcctgaccggaacgggcgaccggttctgtgccgatcttgactacgccagcttctacgagacgagacggctcgatccagagagtcactggatcagaattcgcaatgacggcgtgcgaatgttggcggcattcctcgacatcggcgtgcccgtcatctcggcgatcaatggccctgctgtcagccattccgagttgccgcttctagctgacgtcgtgttggcggccgacaccgcggtcttccaggacgccacccacttcatcgccggtcttcctccgggtgacggcatgcacatcgtctggacgacgctgctgggcctgaatcgaggacggtacttcctgatgaccggccaaaagctctcggcccatgacgcgctacaagcgggcgtcgtcggcgaagttctcccgcgcgacgagctgctgtcccgcgcctgggctatcgcacgggattgggtgaagcatcgcccgctcaatctcattggtacgcgcgcaatcctcaccgccgagtggaagcgaaagatggccgactacctgcactccggcctgaccaacgagttcctcgcggctgtcaatcttccccaggtccctccggcaacgccgatcgtggatctgcttgcagaccgctga

SEQ ID NO: 347880 - DNA, 1227 bp, Pseudomonas aeruginosa
atggcggccgctcctatcctgtccaaattcgtcattaatgtctccgatgacgtgctcggcgatcttcgtagtcgcttgcaggccactcgctggtcagacgacttcgacaatgaagaagagttctacggcatcagcaccagttacctgcgtgggctcgcagagtattgggccaatggcttcgattggcgcgcggcggagcgaaagctgaatgaatttgcccaccatcgagtcgcaatcgacggtgtgccggtgcatttcatacgcgagcctggaaagggaccgaaacccgtaccgatcatcctctcgcatggctggccctggacgttttgggattggagcaaggtcatccgccctctcgccgatcctgcggctttcggtggcgatccggccgacgccttcgacgtgatcgtcccgtcgctcgccggcttcgggttctctactcctctgggcaggggagacatgaacttctggaagatggccgagctttggcactcgctgatgaccgagacgctgggctacgaaaagtatgctgccggcggttcagattacggtgcgctcgtgacgagccagcttgggcacaagcacgccggttcgctttacggcatccatctcagctcggagatgccgctcaacatctttcagggagagcggccttgggatttgaccggcggccagatggtgccgcaagaggcatcggccgagctacgggcctccatcctgctatttcagcgaacctatgcgtcgcatgtcgcagtccacatgctcgacagccaaacgatcgcgcatgggctcaatgactcgccggtcggaatgctcgcatggattctccaacgctggaagcattggagcgacaagaacggcaacttcgaggacgtgtttcctcgcgatcacatcctcaccaacgcgacgatctattgggtcaaccaggcagtcggttcgtctgttcgttcctacgccaacgccaaccgctatccatggaagccctcgcatgaccgcacgccggtcgtcgaagcgccggctgggttcacctttcttctcggtgacaccgcgccgcccggcgtgacgctggagaaccgagtggagtctttcaagaatggcccgctgggccccctctacaacgtggtctacgccgaggcacacgataagggtggtcacttcgcggcgtgggaaaaccctgaagcagtcattgaaggcatacgcggcacctttcgcgggctgcggccatag

SEQ ID NO: 347881 - DNA, 459 bp, Pseudomonas aeruginosa
atgactgaccttgaacgacttatcgcaatcgaagacatccgcgcgctccagtccaggtacgttcgctatgccgacgaaaagaacttggacgcgatcgctggatgcttcctgcctaacgcctctttcactccttttgatgtggaaggaaaaccgcaagtcgtcatggccgggcgcgaagcgataaagacgaccatcgccacgaccatcggaaaggggcaggcgattcatcacctgctttcctacgagatcgagatcaaatcaccgacgcgcgcccacggcgtttgggcgatggaagattggatcgaccgctcgaacgacgacgccccgaccggcgcagttgcgcccttcaagacgatgcacggttgcgggcgctaccacgccgattacgagaaggtcgatggcgtctggtttattgcggaattgaagctgtaccgcgtgaagctcgaatttactaactaa

SEQ ID NO: 347882 - DNA, 747 bp, Pseudomonas aeruginosa
atgcaatatgacctcgaaggcaaagtcgtcatcgttacgggtgccgccagcggcatgggccgagaggccgcactccgtctcggtcaagagggcgcgaaggttgtcgccgctgaccttaataccgaagagggagagcgggtggctgccgcgatccgtggcgccggaggcgaggctcatttcgtcaccacggatgtctcgcgaagcgaggattgcgagcgtcttgttaatgagtcggttcgaactttcgggcgccttgatctggcgtacaacaacgcaggtatcgcgccaccccagcatcacccgttggcggagtgggacgagtcagccttcgaccgtgtgatcgcgatcaacctcaagagcgtctttctctgcctcaaatacgaaattgccgcgatgctcaagacgggcggcggtgcgatcgtgaacaccgcgtccaccgccgggttagccggcatggcggggatcggtatctattcggcatcaaagcacggcgtcgtcggcctgacgagatccgcagcactcgactacgccaagcagggcatccggattaacgcgctttgccccggcgtcaccgacaccgcccttctccaggccttcggagacttcgactcgtccgcgataagcccgatggggcgactcggaacgcccgccgaagtcgtcagcgccgcgctgtatctgctttctcccgccgcctccttcattacgggtgcgacgttcgccgtcgatgggggacagaccgccgcctga

SEQ ID NO: 347883 - DNA, 393 bp, Pseudomonas aeruginosa
atgtcagcaatagaaaacctgatccaagatttcgtagccacgttcgagaagagagacgcggatttgctcgctcctttcttccacaacgacattttcttcgcaaatcacggtgatcctgatgtgcgcggcaaagataacgtcttgaaaatttggaagggagtcttcgagacgttcgaggtggtgcgcttcgaaacgattcaccaggccgtcaacggaaacatcgttcttgcggagcagattcaccacctggcattgcccggtcgcgaaacggcacccatccggaacatggccgtttacgaagtgcgggacggccagatcgtcctttggcgggattacagcgacggcaagttcgccaggcagcagctcgacgccgccaaacctatctcgaaataa

SEQ ID NO: 347884 - DNA, 741 bp, Pseudomonas aeruginosa
atgtctaacacagaaagcaccaaaaagaaggtagccctcgtcttcggcggagcgcgtggaatcggcgccgcaattgtgcgccggctggcgagcgacggctttgccgtggcgctcacctacgtctcgcgccccgacaaggcagaggaagtcgtcgccgcaattaagacggagggtggcagtgcaatcgccatcaaggccgacagcgccgacccggaagcaattcgggccgctgtcgctgcgaccgtcgaacgtttcggaacattgaacgctgccgtggtcaatgccggagtcatacgtcagggaaccgttgatcaagtcagtctcgaagacctcgacttggtactcaatgtcaatgtcagaggtgtgttcctggccattcaggccgctgcttcaaacatgaaggacggcggccgcatcatcacgatcggcagcaatacagcgattcgcacgggtttgcccggcggcagcgtctatgggatgtccaaggccgcagtcgcccgaatggtgaagggtatcgccctcgatctcgctccgcgccggatcaccgtcaacaacgtccagcctggtccgacagagaccgatatgactgcggcgttcatcgaccagatcgtcgacctcgtaccgctaaagcgtgtgggcgaaccgaaggagattgcaagcctggtttcctggctcgcgagcgatgcctccggctacatgaccggcgccgatctcaccatcgacggtggtttcgtcctgtag

SEQ ID NO: 347885 - DNA, 471 bp, Pseudomonas aeruginosa
atggggatcggccgacagagcctctacgacacgttcggtgacaagcgaagcctctacaaagaggcgttgcagcgctattgctttgatagcgtgactgctctgtcgatgtccctgcaaaacagcgcatcgcctctgacggcgattgaagcgaccttgctgagcttcgccgcccgggtttctgacaagaacgaaggtggctgcttagggatcggcgccatctgcgaatttggcgaacgtgaccgggaaatcacggcgatcgggcagtcagcccacaactgcttgcaggccatcttcgaggcagcgattcgaagggcgaaggaaagcggcgaggcggcgccggatgtcgatccgcgcaccagcgcgctcttcttctgctcgaccctatcgggcctgaagatcgctgcacgcggcggggctaagcgcgaagatctggcagcaatcgccaagaccgcgatgcgctgcctccgctga

SEQ ID NO: 347886 - DNA, 510 bp, Pseudomonas aeruginosa
atgaagcgtaccgatctaagcgcgtggacatgcccggttgctcgcagcctgagccgtgttggagagtggtggagcatcctcatcctgcgggatgcgatgtatgggctaacccgcttcgacgaatttgaagagagtcttggcatagcaaccaacatgctcacccgccggctgagcgatttggttgctggcgggttgctggaccgcgttcaatacagcagcaaacctccccggtatgagtacgtcctgaccgaactcggctggtcattccgcccggtcatgctggcacttacggaatggggaaacgagcgattgtcaccagaagggcgaacggtcgaactgcttgacaaggcgtcgggacgtgccgtgcgcatggggatcgtggacctggaaacaggacagccgattacgcgagatagccatgtggttgtgcccggccctgccgccgacgcaaccatccaaatgcgtttttcccaggtaagggcgaagcatgcagcaactgagcgagtgtga

SEQ ID NO: 347887 - DNA, 1038 bp, Pseudomonas aeruginosa
atggatcgcttcatcctctttgcgcttgcggcagcaaaggaggcactgtgtcaggcgaactggtcgcccaaaaatgagagcgagcagacaaggacagcgactatcgtcgcctcgggcatcggtggctttggagcgattgccgatgcagtacgaacgaccgaaagcaaagggcctcgccgtctttcaccatttaccatccccagcttcctggcaaatatggctgccggaagtattgcgattcggcacggcttcaaggggccaatcggggctccggtcacagcttgcgcagccagcgttcaagcaattggcgacgccgcacggttgattcgagcgggggaggcagacatcgcattatgtggcggcgccgaagcgtgtattgatagggtcagcgtaggcgcctttgccgcagcacgggcactttccacgggctttgtcgagaagccggaagaatcctctcgtccgttcgatcagagacgcgatggatttgtaattggcgaaggagccgggttgcttgtcatcgaagatctcgaacacgcattgcggcgaggtgcgaagccgatcgttgagttggtcggctacggaacaagctcggacgcctatcacatgacttcaacgccagccgacggcaacggtgcgcgtagagcgatggagttggcactgaggcaggcaggaatttcgccactcgacgttcagcacctgaacgcgcatgccacatccacacagctcggcgacagcagtgaattgagcgccatcaaggcgttgttcagatatgtgggcagcccagcagtctccgctacgaaatctgccacgggacatttgctgggtgcagccggagggatcgaagccatctttacggcgctcgcgatacgagaccagatcgcgcccgccacgcggaacttggaagcgccagatgcagacgctgccggcgttgatattgtgcacacgtcccctcggcgaatgaagattgaacacgccatttcaaatggattcgggtttggcggagtgaatgcaagtgttttgtttcgccgagttgaatag

SEQ ID NO: 347888 - DNA, 891 bp, Pseudomonas aeruginosa
atggagttgcgacaccttcgctattttgtcgttctggctgaggaattacatttcacgcgagcggccgagcgtctgcatatcgagcagccgccattatcccgggccatcaaagaactggaggaagaactgcgggttgcgctgttcgatcgagaccgcagaggaacgcggttgaccgacgctggcgcagcattcttgcaggacactcgccgactattcaccatcctagagcaggcacgagagaacgccaaggctattgcagcgggcttgcgcggtagcctgcgcattgcggtatccgacggggcaatcgatcctcggctttcggacctcttggcctgttgccgcgcggaagaaccggacatcgagatacgcctgtttgaagtgcctttggccgaacagttgcgcggcctgcggtcaggagacttcatgatcgggttcgcgcatacgtccgacgtcggcgacggaattgctgccgaaccgctttggcaagaccctctggtggttgtcgtgccagcccgacacgcgctgctcgccaacaaggaggttcctctccatgaactcgggaaccatccgcttgtcctgggtgatccgcatatagccgaaggttgctggcgtgaaatggttcgactcctgcggcctttggagcgcgagccgaacgtggttgagcacgcgtcctcgctggacatgatgctcaccctggttggtgccggttacggcatcggcttggcgacaggggccaagattccagtctgccacaggccggatgtagtgatccgtccgttggcatcggattcagcaatggtcaccacctacctgctgaggctcgacaacacaggtttgtccgctatgttggagcgcttcctctctcgcttacgtgcgcacctgagcgactga

SEQ ID NO: 347889 - DNA, 642 bp, Pseudomonas aeruginosa
atgcataacatcaccagcctattctcccgtctcaggcttgctatcgcgccgggcgtaccgtcatcacaactttcaaagctatttgcgctgcaacgcgcggaagagccagacgtcaccctcgccatttttgaggtcacgggcgacgatctgtttcgcggccttcgagacggccgctacgacgcaggggtgacgcttcagggattgaatgatccatctctagtgagtcaaccgttgtggaccgagcacatggctgtcgcggtgccgctgcgctccccgttgctcgaccataccaagctcacgagcgccgagttggtgcactgtcctgtgtttcgctggcaagcagaaacctgccccctgctggatcagcggctatctgctctcgtgcccgtggacgagcagaacattcagcgcgtgacttccttcgagatgatggcgctctgggtcgcggccggctatggcattggactgtccgcacagtcccgcatccaacgagctgctggatggggaattgggatgcgaccgctatctgacggcccttacgaagtcgtgacgcacctgcaacggcccagcgaacacgtcaaccctgtgtctgagcggttcgagcgaagagcgctacaggtcgcccaagcgagcgtagcctga

SEQ ID NO: 347890 - DNA, 1341 bp, Pseudomonas aeruginosa
atgcaagatctcgcgaagtattcttttaacgcagaactcagcgacgaaaaagcgcttgaacgccttatgcagatcgaaaaccaggtatctagctggcttatagaaaaaggggctacctctcccattcaggcgcaagggaaatttatttccctgacaggggacggagaaggaaactaccataagaaagacacgacttcggaggcaggtatattcaaggagtatagcctcacagaagagtcaggcagagaccaaatattcactacaaaaatccaagcaatctacgacaacaaagaactaaccatatacacaagcctgtctataactagcgcatcaaacactgtaactcctcatctcgttttcccgcgctgcccaaaaataatcagaaccattctagccaattttagcgactggaagtttggcgacgagcatctcccggcccctcgccctataaacgctatgggcggccgcgaagaaacttacgcactctgcaatgaaatattaaaccccagaagacggcttccactgatcgtaatatcgctcgatgcagacgaaaccgtatggaacgaactaccaagctcacttgcaaacgacctaatagccttatctcagatatatgtgatcgatgaggagggttcctggactttgacagatgagcttgggaagcagaactcctgttacttgggagcggtgcgactatactggccaatcactgacaaagacaaagaccccgacagtattgtgtggactgccagcaagctccaacaagcattcggtgaaagcaatagaggactaaagaagttctgcggaaacatacgcagaatgattatgtcgactgccgcattaacgctctcagcgcctaagtcattgagagaaattcaaaacagcgcaactatagaaagattaaaaaatctcgaagatagcgcacgagatgaagaactaacagaaatagtagaagagaactaccgactagaaggcgaactagccgaaaccaaagcattaattgcccgactacaatggaagatcaatcacctagaaagccaaaccatagccccttcccctaacgatgaagagtcagagccccgagaagccgccaacgacgaaacacacatccaggctaagccgggagagttgcgatactacaaaaaaatcggcaaaaaaggtgataccgatacattagtagttaccgctccctgcaaccacccttcgagctgctgggcaccagcccacaaggcaattcaagcagaaaaaggattgcagaaactagaaggtcgtgacgactggagaagtatgcaacattgcagcaaatgcactggcggaggccgctggaaggttcaatggtaa

SEQ ID NO: 347891 - DNA, 435 bp, Pseudomonas aeruginosa
atgaaaaacctgaaaatttcagtatttccattagtactcaccatgggggcagtaatctctattccagcctctgctgattgcgcacataaacgtgctgccattgaacatgagatcctgcaagcggagaagtacggcaatacccaccgagtggaaggaatgaaaagggcgctgagtagaacaaacgcctattgtgtagaccacagctacgtcagacagatcacgagcgtggagaagagagtgatgaaactcgaaagcaaactgcacgataaacaggaggacgtgcgagaggcccagatcaaactacacgaagctcaaactacgggcacacgcaataaaattgccaaggcccgaaggaaactgcaggaaaagcaggatgacttaaatgaaatagcgaccgaactacgagaggcacaagcgatgctgggtggtagttga

SEQ ID NO: 347892 - DNA, 591 bp, Pseudomonas aeruginosa
atgaaagcaatcaagtccctgatgttcttctccgccgccagcgtactgagcagtaatgctatggctgccgacggcactatcaacttcaccggcgagatcaccgccgcatcctgcgttgcctccgcgggtgccggctcctccgttggcggtaccaaaggccagcagatcgtcgatgtgaatctgggcaaggtcagcatggacacattggctggttcgagcgaagcgggccttgccgccggcacctcgatcaacctgaatctggattgcggcaataccgctgccggcctgaccaccgtcaagttcggtttcgacccgatgtccggctcgggcgtcgatccgaagaacaatagcctgctgaaaattaccggcaccgccactggtgtgggaatcggcatgtatgacgagaacagcaagctgatcaacttgtcggcgaacgaagcctatcgtgcgccactgaccgtcgtcggcgaaggcacagaagccaaatactccgccgctctaaacatgcgtgcctcctacgtcgccaacggcgacgtacttgcgccgggcaccgccaacggcaccctgccgttcactctcacttacgagtaa

SEQ ID NO: 347893 - DNA, 720 bp, Pseudomonas aeruginosa
atgaagcctggattccttttccgtctctacacgctgctgacgctgtccatgatcgctgggacctgcctggccggcatccaggtcggcggtactcgcatcatctttcccgccagcgaccatgaggcgtccatacaggtcagcaacctgggtgccgaggacattatgatccagtcttggatagaagccgaaccgggccgtgctgaagcagatgtacccttcgccgttacgccttcacttgcgcgactgggccaccgcaaacaacagacgctgcgcattttttaccaaggcaagggcctcgcgcaggatcgtgaatcggtggtctggttgaacattcaggaaatcccgcagatatccgaatccagcaacaacctgcaggtcgcgttccggcagcgtctcaagttgttctaccgacccaacggccttcccggtagcgcagacgaggccgcgaaccaattgaagtggaacctgctcaagaccgacggtacgccgacggtgttggccatcaacgattcagccttccacgtttcgctggctcaggtccgcgtcattgccgaccacaaagaatacccagttgagtccgctatggtcggcccgcgggacacacgcaaaatgattatcaagggacttcccgccggcttcagtggcgctgcggagattcgctgggagtcgatcaacgactacggcgccctgaacaggcacaacgctccactccagttctga

SEQ ID NO: 347894 - DNA, 2526 bp, Pseudomonas aeruginosa
atgaacatgaatgaatacaagaagaggcctagaaagaagcgaacctggaagtgttcgagcaccggaattcctctcctcaccgcggccagcctactgggcactacttcggtctctgccgcgcagttcaaccccatgttcctgcagaacaagggcgccgaaatcgatctgcgctacttcgaacaaaacaatggtgttgttccgggcaagtacagcgtagatctgtaccttaaccagcgtttggaacgccgtgaggatatcagcttccgcgcagatgacgagggtggctccaacgacgctcagccggttctgagcctgagcctgctgcgcgaaatcggcgtggacgtcgaacgccttaagcgtgaaggcattgtttcgtttgacagtgcggacaatgacccggtgatcctgctacgcatcgagggggcgtccatagaaatggacgcctcccgactcgcgctgtacgtaagcgtgccacaagcgtacataaaacgccgttcgcgcggctacgtcgatccctccctgtgggacgatggcgtgactgccgctttcaccaactatcagctgaacttcaaccgtaaccgcggcgatggcttcaagagcgactatgcctacttgggcctgcgcaacggattcaacatcggccagtggcgctttcgcaacgactcgtcgatcagccagagcaccggtctgtcgcgtcacttctccagcaaccggacctacttggagcatgacatcaccgtgctgaaaggacgcttcgccatcggtcagctctacaccagcggagatatcttcgacagcagtcgcttccgggggctgcagttggcttcggacatcggcatgttgccggataacgaatctggctatgctccgatggtgcgcggtatcgcggaaaccaatgccacggtagaagttcgccagaatggctacgtcatttactcgacgaccgtgtcgcctggcgccttcgagatcagcgatatctatcccagtggttccaacggcgatctggaaattacgatcatcgaatcggatggccgcgagcgcaagttcacccaggcctactcttacctgccggtgatggtgcgccgcgggaccttccagtacaacctgtccctgggtcgctacgacaacgaaggggaggagaatccaaatctttggcaaggcacggtggtctatggagccagcgacaacctcaccacctacggcggcttactcggggccgacggatacaatgccgtcaatctaggactgggccttaacacgccggtaggcggtatgtcgctggacgtgaccaacagcgattcacacccggaccatggtaaggccagtactgggcagagtgcgcgattcctctactccaaaacgctcaacagcactaacacgacattcaccatggtcggttaccgctattctacttccggctatcgcacactcagcgagcacattcaggaaatggccgaggccaatcgccagagctttatcagcgccagacccaagaaccgcctcgacctgagcatcaaccagaccgtgtataacaacgactcggtgtttcttagcgtcggtgaaaccacctactggaaccgcagaggcaatactcgccgcattcagttgggctacagcggcaatgttggcgaggtcagctacaacatttccgcgtcacgtacccagagcgccgggcgctcgaaaggctcggatgaccaagtggcgctttcggtgagcattccgttcggctcccgctcgcgctcgcagcgcgtgtacagcagctacacgactgcaggcaaaggtgacgataacctgcaggcgggggtctccgggtacctaaacgatgccagcaccctgtcatactcggcacaggccggccaggccggcagcgatcactcgggaagcgtaggtctgggctgggatgcgccctcggccaagctcgccggcaactatgcgaaatccggttcatctcgccacttggacctgacagctaccggctcagtggtcgcccacagcggagggatcaccttcggtcagcccgtgggtgaaaccttcgccctagtcgaggtaccaggcgtcaaaggtgccagtctggaaggcgcaacggcgcgcaccaatggcgccggctatgccatcgaaggctacgtgcagccttaccgctacaacgacctcagcctcaacacccagaccctgggaacggaggtggatgtcagcgagacctcgacgcgggtcgtgccccgccggggcgccgtggtcaaggcgcacttcgacgcctcctccggacgacgcgtgcaattcgacctactgcaggccaatggcacgcggattccctttggcgcgcagttgttcgacggacagaaactgctggccgtggtggacaaccagtcccgagcgctggtgttcggcgttaccgagaaaggcaagttgcaggtgcgctgggcggggggtagttgcagccttccctatacattacctgagcgcgatgcgtccttggtgtacgaccaggtgaaggcggtatgcatcgctcagccagcaacggagtcctga

SEQ ID NO: 347895 - DNA, 1002 bp, Pseudomonas aeruginosa
atgaaattgaagcttttagccctggcggcgacctgcgccgtgctgggttcaaacttggcacaggcggccaatccggatgggtgcagctggaatccgcagcagagcgctggtgttggcgaccagaaaagatacttcacgatggctgctccgagccagttggtgctgcagagcgtggctatcggcggtgtcatggctagttcacctaagaagaacatccataacgaaatgttgcaaataaaatgcccttatccggccgcacaggcctaccggggcgaatattacgtttccgacgctgaactggcggacgggttcaccgatgtgtacaagaccggcattcctggtgtcggcgtgcgtttcaagagtgacatcagcggcaccgttggcagcctgccgcgggtcgacacctatatgaacggcaacaccatgtacatcaacgtgatcaaggagctgcagctcgaattcatccgtaccgcgcgggacgtcgcccagggcatggcgttgatgaacttcaccatcgaacaggacattaacggctggggtgcggcgcagattaaggtcggaggcagcaccaatctggaaacccgcagctacttctccggctgcgcaggcgtcgagaagctcactattcccctcgggaaggtttccatcggggaaatcggcaaacagcagaagcagttcaatctcgacgtgctatgttccgggctgccagcgggcacaaagattcctgtacgagtctatttcgaaggtagctccaatggaccggggcgcctgaaccttgatgcagggggagcgaaaggtgtggagatcgcacttaaagatgggagaggtgctctactgcctttctccaagggcagcgctcttgccatggactggatcaacagccagcccggcggcgagctttatcggctgtccgtcagtgctggctatgcccataaggacgtacagaccgttgaagccggtatggcgaacgggacgctgaactacattatcgattacgactga

SEQ ID NO: 347896 - DNA, 795 bp, Pseudomonas aeruginosa
atgaagataaccggcactgctaccgctcccgcactatcagatcgcagaccagagcaaaactgcttacttctattccgagccggcccactccctaggattactgatttccaaaaagggaaaatgtatatgaacagcgtgcagttcttttctcaaatggaaggtgagcaagcgacaggacttcgaagtgacgcactagaaaaaacccaactaaaattaaaatcttccaacacacaagaaagtgcaagttacttcactatagaaataaacggagaggaaatccacccaggagacggagcagttctccacactgatattccaaacccatccaatatcttcatattcagcatggcggcactagccgatgggccagacgggaaaattcccggggaaaaaaatggaatagttgagttaagcaaaagattttccgagtttggtgatcacgctattataattagaaagcaaagggaattttcaaaaagactcagcagcgccatagagtccaacccctacttatttaaatcccctgttcttgaaggcggacatggactggtcgaatatacagacacaaaaactcatagcggaattttagggctattcagaaaggacttacagtactcatggcaaagagagtatcgcttctgcctcggcgcccacgatgaagcgttaaacagtcggggagcactagagcttaacataggcgatatcagcgacatatcagaaataatccctattgaaaatttcctttcatcccccataacaataaaaagaagaacactgcattatctacccagttag

SEQ ID NO: 347897 - DNA, 1938 bp, Pseudomonas aeruginosa
atgatcagaatacatggggagaacgacaattcgccggagtatcaggctgctgagaggctagcaggtctcgcagctgcgtgtatttccgggcttgatgaagatagtcaggttgttcttgagatttttccttcggctaaatgctttgggcaaaaggtccaggatatcgatttgctcgttttctttgccaactatcgcaaagaagagatccggtcagaaaaaactaatacattgattcattcattctgtgcttcgtttgaagtaaagggtcactcgccgaacttagttcgctttgaggggaataggtgttttgttaaatataatgatagtgatcatgatgtcactacgcaaagtgatgggcagaaatactccataaaaaagtacattgagaaaaatagtctgagcaaaagctctccttggattacaaactttatttggctcgagcgagttcaatgcgcgcttattccaaagtcgcagaacaacatccttggatcagatgtgacttgggggcttttgttagaaaaggtagccttattatcgagtcggccaggttataacgaggtgcgctgcttttccgtgcgcacatatatggctaatactttggcagttttttcaaacgtactggtcccatctaaaatcgacagaaagcggcttgaggcgatcacaagatctgttctggatcgcacgcagcaacagtacgctgagaagctaggaaggcaacttctaatatttagagggcgcggggggacgggaaagacagtacgccttattcgcatggcatatcaggcatatgacgagtttggtttgcgtgttgtcctgcttacctataataaggctttagtcgcagatctgcgtagacttctgaccttgctcggagctaaggattcggtcggggagggaagtatttcgatcaagaccattcatagcttcatgcgcgaatggctgctggctttgggttttatctcgaagcaggagcccaatttccttgaggcatatgaagagtataaaaaaaatgcgcttgagtacttgttggccggagctgtgacacaagaagaagtcgagaggtcgagatctgcccgcagtaggtcattgacatgggatctattgctcatcgatgagtcgcaagattggcctgctactgagcgagacttaatctatcagctatacgggccaaagaaggtgattattgccgacggggttgatcagttcgtacggggtgtggaaaaaatcgattggcgagcaaatataggaatgtgcgaaagccagattgttccgctaagaaaaagtctgcggctcaagtccagcctttgccagacagtaggccatttcgccaaggaaattgactacgcgaattggaacctcgaacctctgcctgaatcacacggcgggaaagtcatcgtagttgttggtgatccattctccaaaaaatttcattctaaactagtggcaactgctagagatgatgggaataaaccgattgacattctgttttgtgttccgcctggatgggtggaaacttccgccgatgggcaaaggcgctcgaaggttggaaaacagtttgccgaatggggtcttgagtgttgggatgccgtcgatccggagcagcgagatgaatatccaaccagccttgagcagtttaggattgttcagtacgagtcatgccgaggccttgagggatgggtcgtggttaatttcgccttagatgagtttttttcttacaaacaggagaatgctaaagtcagcgaggaggagagaggcgatatattctacgacgaggcagaggcggctctagagtatgcgagaaagtgggtgatgattcctcttacaagggcaatagatacgctcgtgatccatgtctcggatccagggtcatacattggaaggatcgctattgatttgcatcggaagtatcctgatagcattgattattatgagttctaa

SEQ ID NO: 347898 - DNA, 5535 bp, Pseudomonas aeruginosa
atgaccgtagtgtcgaaaactgttgaagcaacgggcgtccatgaggccgcgaggagtttggcagagagtctcaggcaatacattgaggctcaatatcacatccgtgatgaggggctcattaaagagcgtcatgcgcttcttcggagggatgccaccattgcccaagtcccctatgtggaagccactccggtctataaggtgggtgatccctacgacagcctgccgatccctaatgctgccatcgacgcactgacccaattggcggggatgggcgtcggcctttaccctcatccctacgagcaccaatcggaagcactcgtgtctttcctcggtgatgaagcaactgacctggtagtggctactggtaccggttccggtaagaccgaaaccttccttatgccagtcattggtaagttggcgatcgagggggaagaaaggccggcgtctgccgagcttccaggctgcagggcgatgttattgtatccgatgaatgccttggtcaacgaccagcttgcacgtatccggcgaatgcttggcaaccccgaggctgcaaaagtcctctcaaagggacggccgaggcccatacgtttcggcagctatacgggacgcactccctatccaggacgccgatcctccgggcgggatgaacgatttattaaacctcttttcgaagagttctatcgcaaggtcgcagagaaatcggcagtccagatggagctagagcgcatcggccgctggcccagtaaagatctggacgccttctatgggcgagagctggctcagaccaaaacctacgtgtcaggtaagaaggctggcaagcaatatattgccaataactggggtcatcggcttgttacgcagcccggtgaccgtgagctcatgacccgggacgagatgcagcagcgctgcccggaactgctcatcaccaactactccatgcttgaatatatgctcatgcgccccatcgagcgcggcatcttcgagcagactagggattggctcaaagctgatccccggaacgaattcgtcctcgttctcgacgaggcgcatatgtacaggggggctggtggcgccgaggtcgctcttctcatccggcgcctctgcgcccgcctagagataccccgtgaacgcatgcgttgcattctaaccagcgcgagccttggttcaggcccgactgcagtcgaggacggcgagcgcttcgcccgggatctaactggcttgccagtaggttcctcccggcgcgtcagagtgatccaaggaacctcagagccgcgttctctccctcgtcccgccacgcgcgaagaggccgaggcgttggcggaattcgatcttggggcctttcagaatgctgccaacgacctcggcgctgcgcagatggccgcgatggaactcgccgcacgtctgaactggcaggtgccaaccgcaggggatcatgcatcattccgtgactggctcttcgagaatatgaccgacttcggtccccttgagacactgatcgcgacggtgtcgggcaaggcggttaggctcgacactctcagcgaggcgctcttcggcgagtttccatctgacaccgcagcgcgggcggctgacgccttgcttgctttgggtagttatgcccggcggcgctcagatggtcgcgtattgataccgacccgcttgcatcttttccatagagggctgcctgggcttcacgcttgtgtggaccctgaatgttcgcaaaggctcggcggccacgccggccccactatcctaggtcgccttcatacgaagccgttggaccggtgctattgcacgtcgaagggaagggtctacgaattactcacccaccgcgattgcggtgccgctttcatccgcggctacgtgagttccgacatggactttgtatggcatcagccgagtggaccattgtccgcaggcggtactatagaactcattccgattgagatattggtcgaggagaacgttcacccacgcagccgccacaaagacatgtggcttcacgttccaaccggaaaactcttcccaatctgcccctccgatacctcgggctaccgcaaggtaaaagtacccgacaaggtcgccgcaggccaggtggagatctccttcgacgaatgccctgtatgcatgcgtaggacccggagctctaagaacgagccctccaaggtgatggaccacgtgacgaagggcgaggctccattcactgcgctggtccgcacgcagatggctcgccagccggcaagtcgtactatcgatgcaaagcatcccaacggaggtcggaaggtactcatcttctccgatggtcgccagaaggctgcacggttggctcgcgacatcccacgagacatcgagctcgacgtgttccggcaggcggttgcgctcgcatgcgcgcggctggaggcaattccccaagagccgcgacctaaccttagcctctatctcgccttcttgtccgtcctctctgaacacgaccttctcattttcgacgggcaggatgcgaagaagatcgccgccgctcgcgccgaattcgaacgcgactgtgagggagacctgaggcaagctctcgacgatgatttcgaaccatcggaaacgccacccgcacgctatcggatagctctgctgaagcttttttgcagcaactactactcgctgtcgggaacaaccgtcggcttcgtcgagcccgcacgagcaaaactcaggaagctcaaagacgatatcaaggcggcagggatcgctcttgggggcgaggacgtccgggcactcgcagttgcctggatagatgcactgctcagggagttcgcattcgacccgtcgctggacccggtactccgctgcaaggcggccggttacttcaagcctgattggggaagcaaagggcagttcgaccgggccttcgcggaggcccttgcccgtcgccccggttgggggaagctcgccgtcgaggctatcgaggcagcgttccgcagccagttggcgtccgagaaagacaaagtctggttccttactccgaacacactccgcctacgagtcgacctttcccacgtttgggctcagtgtccagattgcacagctctcatgcctctcgctttaggtgggacgatctgcctcgcttgcggaagtgaaggagtcagactagttgatcccctggtaagcaattacgtggccgcccgtaagggcttctggcgcctgccggtgcaagaggctctcgcttctggcgctcggctctccaacctgagcgtcgaagagcacacggcccaactctcaaatcgggaccgaagcagtgtccacgctaccaccgagctttatgagcttagatttcaagacgtccttatcgaggattccgacaggccgattgacgtgctcagttgtaccaccaccatggaagttggcgtcgacatcggctctctggtcgcggtagcactgaggaacgttcccccccaacgtgagaattaccagcaacgtgccggtcgggctggccgtcgaggtgcttcggtctcgactgtcgtgacgtattcccagacagggcctcacgacagccactatttcctgaaccccgagcacatcgtggctggggcgccgcgtacacccgaggttaaggtggataaccccaagatcgctcgacgtcacgtgcacgcttatttggtccagaccttctttcacgaacttatggggcaagggggttatggtcccggtgaaaaaacgtcaatgcttgaaaagtcgctcggtccgacacgacagtttttccatggggcacgggacactggtctaaacctagaaggttttggcgattgggtgtcacatcgcgtcctatcagccgagggtgatctgagggcatctgtcgcagcatggcttccaccgtccctagataccggcggtcgaccgctcgaggagtggctcgcggaggtggcagaggagctcctgacgactttgcgtcggctcagcgcagatgtcccatcacctgctgtttcggaggacgacggagagaataaggaagttgaggacaacgaaaacgcgggaccgaatctagagcaggaagagtttctggagttccttttcttccatggcctcctaccgagctacgcatttcccacaagcctctgcagtttcttggtggaaaagcgcgagaagaatctcaaaggcattttggaggttcggacggttcagcggcctcagcagtcgatttctcaggcattaagtgagtatgcccccgggcggctgatcgttatcgataagaagacttaccgttccggaggtgtgttcgctgaccttccagccggggaggtgagtcgggccagaccacttttcgcaactgcgaaaaagctcgtccattgcgaagcatgctcctttgtacgtgatccccatacggcccagggaaatgatagtacctgccctgtttgtggcggagcgttgaaagaggagacgatgattcagccagaagtctttggtcccgaatgcgccagagaacttcccgaggacgaccgcgagcaagagatcacgttcgcaacgatggcacagttcccgcagcccgttgatccggaggtattcacctttaggccgtgtgggccaaatgctagtttcactcacgcgaccgaccgcaggctagtagccgtcaaccgaggcaaagagggggggcaggccaacgggttctcggtatgcgtcgaatgcggagctgcctccgtcttcgaccagttctcgccggctagtgggcctcacgaacgcccctaccgctacctcggcccgcaggggactccacagctatgctctggtgagttccgacgtgtgcttcttggccatgacttcacaactgatttattgctggtaaggctgaaagtcgccgctccgctagtgaccgacaccagtgacatagtgacactacgaatgctggaggatgcgcttcacacgatcgcagaagccctccggctcgctgcgagccgccataggcaattggaccttgatcctgctgagtttggttccggtttccgtgttgtccccgttcttcaaaacgaggctcggatgttggacatattcttatacgatacactttcggggggcgcaggttatgccgaggtggcggcgagaaatcttccagatatcttggcggatactcttgttctgttggagaattgcacctgcgacacttcatgcactgaatgtctagaccacttccacaaccagcacatccaggatcgactagacaggaagctcggcgcggcgcttctacgctacggaatattcggtgaggagccgcgttgctcccctccaaatgtacaggaggtcactctgtcccagttgtgcgccagtcttgagttggagggcttccggtgcttgcctggtggcatgcctgaagcccccatgcttgtagagcgtggagggtatcgaatggccttgggggccttcccgggactaatcggtaggccggaattcgcccatgcagtcaatagcgcacagaatgttcatggctacttggcattgaacgagtacctgctcagatccaacctgccggattcccatcagcgggttcggagctttttccgttag

SEQ ID NO: 347899 - DNA, 1062 bp, Pseudomonas aeruginosa
atggagtggcaggcagtttccttagagggcgcgcgtaggggcgtcggggcggggataggctgtaggcgaggaggggaatgccttcggatatccgcagtgtcggaatgcttgcgagcggtatcgcatctttgctccgcccctaaaggcagtcagggagcgtgggagcctgctgcctcggttcgtctctccggtatggtgcgacgtaagttggtttcgttgtggccaaatcttgctgccgatggagtggatactcaacctggagtaataggaatacttaatagtcttgccgatctgggagacatggtcagactcgagggcggcaagtggcttgcggcgccagctcacactgttcgggcaggagacgggttagctgtgctgctaggtggggggccaaaggagatactcccacaagcggtgagggcatcggcaaaggctgagggtagggttcggctggtggagaccgctgcttgcgaaggctgggcagatatgtgggaggcagaagagtggatcggagcccccgccgaagggcttgaagcatggtcagcgcggctgctggctgaggctacgagtcgactgacggatgctcctgacgacatgggtgaggtctccgtctacttgccgcgtgaatgggtcagacttacggatctgccggctggcgagggatcaattttactctgcagagtgcgtagttcgggagttgccgggccgatgttttcctatttcattggcgaatttgtaaggggtcgcctgcggagacttagtggcattgattccaaggatgccagacgctttcgcttccatctggatgcacgggcagggcgttctatccgcgtcgtcgcttcagtgtcgcagggctcggtgaaactcagactagggcgccgcttgccagagcgtgaggcaagggtactcctgcttggttggcaggtccccgcgcctgatgggggacatcctggtgtaacgcatcacatgtttcccgtagagactttaccaatcttgcgtaaggcatttgaggggcttcggatcgtactggatgagcgtttggacgcagggagagaaaactga

SEQ ID NO: 347900 - DNA, 1878 bp, Pseudomonas aeruginosa
atgagttaccaatacagccaggaggcaaaacagcgaatctctgcattgggacaaaccgtggtcgcagaattcattgaggaaattcctcatggattgcgcaagacaatctataaccgtttgccgcgcattcaaggattcagaccaggcacgcctcccgagttcaaggagagacagaaacgtctaatagggcatctgatccatccgcaaacaagcctcaaagatgcatttgactggagtatcttcacccagctttgggaggcttggggtaggggccggctgggaggttccattccacaaggcgacaactccgagcctacctccgacgccggtccttccttcttgagggagctcgctgagcgttttccgcgcgccgctaaagaggacgtagagcgattattcattttcagttgttttccagaccatcctgatgtcgcgatggcacttgcttgtttccgctcggcttcaactctggcacgcgatcagatgatcgacggcctgccgacccgtattgaagacatggagcaacgctttgcagttgctgaggttgctgctgcgggtcaggccaaccgcattgggcaacttgaaatcacagcagcttctcttgtcagaggtattgaggacttcgccaaggacgttagtcagagctccaatgcagtgtccgacttgcggatgtcactggatgcggaattcacacgttccgaaaagactgaaaaatttattgattcgctaagcgttgccgctaagcagaacgctgacgctatcgccgccgtcggcatcaaagccgatgtccttgaggaaggcgtgcgggcgcttgcggtacgtggagagaggtgggatgaggtcgcaactgacatagcagcgctgagggtggctgtcgaaagtctttcagcaagcgaagccgatcaggcagagacggctgagaccgttggcatacttttgggaagagtcgctgcccttgaaagcatcttggtgggaagtggtgcagactcgggaacaaggcaacgggttagattgcttgagaacaagccggagggagcgtttgtcgccattctttctatccaaaacgcctgtgacttagtcgcttcgaatcttcaggcgaccggaattgcgagaggggcagcaatcgccgctgctcgccagatagttgcagctgttgtcgcaggccaaatggtgcagttctcggggtcgctcgctgacttggtggctgactctgtggccgcagctatcggcgggccgattttccatgaatggcgagtgccggtcggacttatatctgatgaggttgcgtccgactgtgtcgagattgttgcagactcgtcaagttgcctgcttttgaagggggcgaacctctcagcttttgaggtctacggtgctgctgttcgagatattgtcgtacgacggcagttcaccgggtcaagctacggaggctttgctctaatcgcctcttgggcgcagggtccggccgcgttccctgatggaggcacgcttgctgaactggggcccgtattcgatacggatgctcttccgatgcgcggaatatccgccaagctaccccagttgaagtacggccgactcgcgaaagaagcctggccacaggtcgatggccttgaaactagcgagacgactccagttacgagccagttgggtgagcttctgaaggaggcaggctttgaaggcggcagtttatggcggcgcgtgtctagccgtgcttacgcggctctcagggcgataccaggtggaaaagcggaggatgatctcaattcgctgcttgtctcatgggccgctccatgggctagagccaccggtggtcctgttaaggagatcattcaaatcgctgagcgcgagttggccaacgggcgagcagacatgacagtttga

SEQ ID NO: 347901 - DNA, 1431 bp, Pseudomonas aeruginosa
atggagctccgcttggtgatccctccaataggggccgatcgtgctggctggtcgctcgaactggtgctgcccccatgtcgcgaatgtccggccatactctcgctggacgtggggggaagagtccagacgctgaatatgcgtggtatgcaggagcgccgccgtgtgactgttgagctttctactgccccttactctatagtcgagttcagcggcaaacccgacccttcgttcgtgctcagtgtggatagagagtgccgaggattacccgccgtaggagctgcggccttcaccgcgtcgggccgaagcgaacctcgaggattcccacgaacacaggagcttagagcctcggaaacttttgctctgctgtggagggagcctgctaagccagattttcccgatgagttagtaatcgataggtttcctgggcgacaaggatggaatctagctctagccacatttcctgatgaattatctccaggatgcgccgattggctgcattcattcacggggctgccaattgcaccgcccgtgcccgcaatcaccgctgtttggccattctttactaggaacgcaagtgtcaatgtggttgagagtgtcaggacaagcgtactcttgctagcagcgaagatgatgccgttggaacagtcggatcaaggtccgacaatgcaagtccaaagtgggtcctcaaagtattcagttttaggaaaggaacgatcgccagcgttttttgcccttaagactgacggcgcgcagactgtaaaagtttcagatgcgaacaatccagggattgaagagttcgtatccttcacccttaatccagtgctctctcagtggctcccctctgttgaactggggttcacgacaccaatgggagttcgccatgttgttcctctgcatcaacgcaggtgtacagatatggtgaccgaggcccggacacatgggagggggccagactatctatcgatgcctcctggcgcgacgggagtcctccgcatagatggaccaattgggcgatttataacagcgctttcctctgggagtgactcttctcctcatagccgtcatatgcgtctcccacctcctgacgtgctgacgaagataacttccgccttggccgaccctgcatgtcacgtggagattgaattcggtggttttgggcgattgcgcgtcgccggcacttgggcatgttcttcagtaggactccgtagtaaggagctcactccagccctacgatcaaggttgcttagcttcatgttccagttgcaaattgcttcgccaacgacagtgtgttctgacgacaactcgctagttggagtcttcgctgcagcgaggcccgaagcgtcgctcatcccgcattatcgttcgctggtaaaggagatccttgcctgcggctttgaaattaaacgtttgggagaaggtgcctcatcatga

SEQ ID NO: 347902 - DNA, 1230 bp, Pseudomonas aeruginosa
atgccaaatggcgatacaacaagcattgatgtcgactctcgtgaggaggatctaaaggaaaagttacgggagcacctgcactctcttggctttactaaagctgaaaagggagtattgcaagctccaggaaacactaaggaggcgatccgctctctccacagtgcgcagcgagaggagaggctctcggctaatgagaaatttgtctcactaactggccgaaaattgatgaaattttttgcgtccggggcggatattgatccggaaaaaatttcaccggtcctcgagcgtgtttcatcgggaacgcaacaaggtgagctctttcggcttgcatctttgtcgtggtctgttcccgtttcgaacgggtttggtaggcgtctccgttaccttgtctgggatgagaataatgggaagctaataggattaattgccatcggtgaccctgtgtttaatctcgctgtgcgagataggtttattgattggaatactcatgacagaagtgcgcggctcgtaaatctaatggacgcctacgtgttaggggctctccccccgtacaatattctcctgggcggtaagcttatagcatgcttattgcgtagtcgtgatctttatgatgatttttccactgtatatggtggtatgacaggtatcatctccggggaggtcaaaaaagctaggcttcttgcgataacgacgtcgtcgtcaatggggagatcatcagtttacaatcggcttaagcttgatggaataaagtatttagagtctattgggtataccgatggttgggggcattttcatatccccgatcagttgttttcggaacttcgtagttacttgcgcgatattgaccatacttacgcggatcagcatgcattcgggcagggtccaaactggcgtttgcgaactatgaaggcagcgctgtctgcgcttggcttcaaacaaaatctaatgcggcacggtatccagcgcgaggtttttatatgccagctggccaataacgcgacagaaattctgcggaccggaagaggtcagccggacttgacatcgctcctgtctgcaaaggatgttgccgagcaagcagtgagtcgctggatgatacctcgttcaaggcgtagacctgagtatcgagactggatgcctgggagtcttattgacatgtttggaaatcaggcgcgaaatctacgtgcccagatagagaaaatagaaaagcataggaatattgaccggctgtag

SEQ ID NO: 347903 - DNA, 618 bp, Pseudomonas aeruginosa
atgagtatgaaagccctaatcgtcgatgatcaccctgtaatctgccaggcaatcagccaggcccttgtatctatcgggatcgaggctgttggtgagacaggcgatggagtgactgcgctgcacatgattcagacgttgtcgccagacatagtcattctcgatatcggcttggagaaacttgacggcctcagcgtactcaagcgcatcacccgcgagaagctcgatacccgtgttctagttttcacctcccaggccaaggaaagctacgcagtacgctgccttcatgccggcgcgagtggtttcataagcaaaagtgaatctatcggcaagcttatcaaagcaatcgaaatgattgccgatggttatgtgtttttcccgaagggttgtatgccgctgctcggaaagccagagtcaacgggggacctggaagacctcacggatcgggaactgcaaatacttaagctgttggctgagggtttttccaacggcgagatcgctgcccggctgagcttgagcagcaagactgtcagcgggcacaaggtgaacattcagaacaagttgggggtagtctcagtgatcgagctggccgatatcgcgcgccggtatgagctggtctga

SEQ ID NO: 347904 - DNA, 513 bp, Pseudomonas aeruginosa
gtgagactgttgaagggcggctgggcagcgaaacgatttcaaggtcccgccctgccctgggcggggctgctgctggtcttgctggctgcctccgccgtaggggtagagcttctgatgaagggcctgccagccaaccacagcctctacggcgatgcgaaagcgcgctggacgatcaatgaatacgccgacctggagtgccccttctgcacggtctacaccccgcggctgaagcgctgggtagacagccatccggacgttaagctgatatggtaccatcctccgctgcagatgcgtggcgagactgcacactatcaggctcgcctggtagtgtgcgcaagaatccaggcattttggagcgctatcgacgcgatcttcgctcagtccgccggtaacggctggactacccccgatacgatagacgtccccagcctacgctttcagcatatcggtacgtttccgcaggtcaggttcaagctcgatgcttggcatgatgtggggggattggcggtttga

SEQ ID NO: 347905 - DNA, 327 bp, Pseudomonas aeruginosa
atgttgtgtcgttctctgtctcccattttcgggttgctggacatactcgtagctgcccaggaaaccaccagcatctccctgaactctacgcgcgtcgttttcgacggcactcacaaggaagccaatatcatcgtgcgcaatggtaaccacgaagtcttggttcagctctgggtggatgccggcaacagcgctcaggcgccgttcgccattactccaccgttagccagggtcttgcccgagcaggaacatcagaacgcccaaggctgggcctggggcgtcgctctgcccgtcagctacctgctgtttttcaaacgcgcaacctcataa

SEQ ID NO: 347906 - DNA, 648 bp, Pseudomonas aeruginosa
atggaaaaattcaaggtcatcatcgccgacgatcatcccatcgtactgctcggcgtccgggaactgatagagcgcgacccgcgcttttgcgtggtcggtgaagccgtctgttcgcaagggctgatcgagctactcaaacaccaacccacggacatggtcatctcagactacaacatgccggcagactcaccctacggtgacggcctgagactgataggctatctcaagcgccactatcccaccgtccgcatccttgtgttgaccatgatatccaacccgctgatcctgacacggctgcaagaactgggcgtgtacggcgtcatccagaagagccagttgcacggcgaaatcgaaaaggccctcaatgccatcgcccgcaacaacatctacccggcgccacaaccggcaagacactcggtggtcacctgtaacaccgacatagaccaacggatgaaaagcctgtcacccaaggagttcgagatactacgtctgtttgtggctggccaaagtgtcagtgaaattgcccgcagccaacatcgaagcgccaagactattagtacgcagaaagtttccgccatgcgcaaacttgaagtgaacagcgatcaggaattattggcctattgcttagcaagccatatattcaattaa

SEQ ID NO: 347907 - DNA, 3231 bp, Pseudomonas aeruginosa
atgaaacagtacaacgctctgctggaaaacctggcccgcagctctctgcgcctgaacaaaggcatgacagtactgctgggcctggcgctgctgctggccggtttcagcttctggtcgatcgagcgcctgctcgacgaaaacagcgacacgatcagcatccatttcgcccggctgatggagaatatccaggagcaggaaaccttcctcaaggccctagtgcaacgcagcgccaagggggagctgttcaactatccacgcgcgctcgaaccgatcctggaaccgctacccgaagaagggccgaatatctacaagggccaagtcttcccgttttccatgccgttcagcctcaatctcgaccggcgtaatctcgctgacagcgaagtgccggacatcttcacccaaggggcgaatctggccagcttctacagcatgttctggtcagcctctccctatcgctcgccgcaggtgttcctgttctcgccggatgcccgttacgacatcacggttcccgccgcaggacgctggcgggacaagcctgagaaggaaccattcagcgacgtgatcaggcaggtcatcgcacgccagccgcagaacaaaggccctgggatcatctggcgcagctatgtagagcagccggaccaaacctcaccgccgcgcgtgctggcctatgccaacatcatcctggacccggccaacgtcgacggccgacgcacccaagtggcgtcgctggtggacatggcccagatagatgattttgaacgcatcatggactggagcgtgtatgaccacttcaacctcattgccccttccggcgacgtgctaataggcgagcccacttcgctgaagggggtgcatgagggcctcaacctcaagcccgagggcctggtgttccgtctccacgaacaagccaacggtggctggagcgcagtctacaccgtaacctaccggcactttttccgttacgcattctggtcgctggctagcatcgccgtgacctttctggttctcgtcgggctgggccgggtggccatccgctggtatcagcgccaagttattctgccagcccgcgccgcccacgagagcatcgccgagagcgaggccttcagccgggtagtcatcgataccgctccgaccggcctctgcgtggtgcgcagcgccgaccacgaagtactgctggagaaccagcgggcgcagcaatggcagggcacccgcgaactggtcagcaccctcgcttcggcagtggtcagcaccggtagtggcgaatactacctagagatcgcaggccgtcacctgcaggtcggtttcatatctacccgctaccacggcgaagacgtgcgcctttacgctttcaacgatgtcacccgtcacgtcgaggacgcccaggcgctcgacgaggcccggcgcgccgctgacgccgccaatactgccaagaccttgttcctggcgaccatgagccacgagatccgcaccccactgtacggcgtgctgggcaccctcgaactgctcggcctgacgcagttggatggccgccagcagggctacctgcataccatccagcgctcttcggcaaccctgttccaactgatcagtgacgtgcttgacgtgaccaagatcgaatccgggcagatggcactcgaacccgtgacgttctgtccgctggacatcctcgaggataccgtgcgcacctaccgcgccttcgccgagagcaagggtcttttgctctatggctgccacgatgcccgccttccggcccaggtggttggcgacccgatacgcatccgccagatcctcaacaacctgctgagtaacgccatcaagttcaccgacaccggtcgggtggtgctgcgcacccgtgtactggcgctcgatgccaaccaagtcagcctccaatggcaggttgccgataccggcattggtatctctcaggcgcagcaggccaggctcttcgaggtgttctatcaagccgcagacgcttccagcgagggcggcgcaggcctgggcctaccaatctgcggctggttggccgagatgatgggtggccagatcaaggtggtcagcgagccgggactgggcagcagcttctcccttaacgtcagcctaccgctgggccaaggggaactaagcgattatccgcccccggcgcccgacgacgccccggtatatatacgtgcgccgataccggagcttgcccagcatggcgtcgactggctgcagcgcctgggcatcgccgcgaccctgacgattccccccctggaaaaggacaacccccaggccctgctggtggacctgctcgactgcccggacgctgctacctggcatggccaacggatctgcgccagcagcgacggccctgctcccggcgcgttcattgacggctgctggcgggtagacctgcatgacgtacgcgccattgcccaggtcataaccctggtgcgccaaggcggggcatccgatgggaagccccccgcgcagcagcaaagtaccgccctgcacctacatatcctggtggtcgaggacaatccgatcaaccaagcgatcctccaagagcaacttgaggcgctgggttgcactacggtggtcgcggcaaacggagaacaggccatgcagcgctggcaaccacgcctattcgacctggttctgaccgacgtgaacatgccgcttatgaatggctacgaactggccagaaccctacgccagcatgacgcccgactaccgatcatcggcgtcaccgcgaacgcactacgagaagaaggccagcgctgccttgaggtaggcatgaatgcctggatggtcaaaccgttgagcctgcaggccttgcgcagccatctggtccgcctgtgccgaccagtattggccgacgggcctaaccgtgcgcaagcggacagcctcagcgcctcgcccgcccctgccgtcaccgataccgataccgataccgataccgataccgataccgttcaagtatccgccaccatgcgcgccctgttcatcagcaccttgcgagaggacatgcagcagctgcgcctggcccttgaacaacgcgaccaccgacgccttggcgagcgccttcacagcatcgctggcgccttgggcgtggtgcaggcccgggccctagccgaacagtgctgcgcactggagaacgcgctggtcgactcgccactcgatgcggccctgaccgataaactgcaggaggttctggacaggctgtcggcaatactcgatacccttgcatag

SEQ ID NO: 347908 - DNA, 1194 bp, Pseudomonas aeruginosa
ttgaagacctttaacatcctgattgtcgaagaccacccgttccagcacatgtacctgcaacacctgttcagcgaacttggcagcttcaacctggaagcggctcgggatggtcaggaagcgctggagcgcctgcaccagtgtgagttcgacctggttctgaccgacctgttgatgcccggcatggacggcgtacagttcattcagcacctcgccggtctgcgccacaagccaggcctggcgatcatgagcgcggcctcgcggcgcatgctaatggcggcgagcctggtagccaagaacctcggtgtggacgtgctcggactgatatccaagccggtcgagcctgttgcgctgcgcagcctaatcgatcaactgcagctgcactatcaggcaccgacccaagcggcacctgttacgacggaattcgaccgccagaccctaatcgatgccttgaacaaccatgccttccaggcctggttccaacccaagaagtccttgcataatggtcgcatcgtcgcggccgaggccctggtgcgctggttgcacccggagcaaggagtgttgctgccaggcaccttcctgccgacgatcaatgccttcggtctggaggaaaggctgctgtgggtgatgctccagcaggccgtggatgctcaggcgcggtggcgtgaacagggctatgacataccggtctcgatcaacctgccaacccatctgctaaacagccatgacttggccgaccggctgctggaattcgtactgcaccaccaaggcatacccagcaagctctgcttcgagctgatggagtgctccattcccgaggagctgagcaacttctatgcaggtgcctgccgattgcgcatgaaaggttttggcctttcccaggacgacttcggtaaaggctacagctcctacatgagcctggtatcgacgcccttcaccgaactgaagatcgaccgagcgctagtgcaacgttgcaatgaaagcgagagtctgacctcggctctagtcagcatcgtcgccctgggtcgcaagctcgggctcactgtagtggccgaaggggtcgagacgccccaggagctcgagatactgcgtaaggtcgactgcaaccaggtgcagggctttttgatctcccatgccgtgtcggcggaacaattcaagcgcctgctacacagcgacggcccgccgttggcctactga

SEQ ID NO: 347909 - DNA, 2820 bp, Pseudomonas aeruginosa
atgcgactcaaagcttacctgcaacagatcaaccccctactctccgaccccgaggcagcgcgccgcctgcttcggctgttggcgattgtgctgtcggccggcattcttggcgcggcctacaactttctgtccttcaccttcaacaccgacatcgcccggcgccacggagccatgagcagtacgatcgccgaggcccacaccttcttcaccaacagagaggggctgctagagagcttgagcctcgcagccgtgcgccaaactgatccgggcgccaactggctgcctctggcaccggacgaagaagtgcacctgcaactgggtagccaaccggacaagcgctggagcctgtggctgacccagcgcatgcgtacctacctcaaggctcggcaggtcaacctgctgtacgtcgacgccggtgctcaaccccacatgcgctggctgtacaacgttaacgcccaggcctcgccgccttcgcctgcgatgctggcccagctacgcgctgctgggctacgggccaaatccccccgggaggtgtggctggccgatctagacgcgcaccgttcgcgtttgttcatcttcctgcgcctagacgagcgcgacccggactctggctggctggggctggaaatcgacagccacgcagtgtcatcgtcgctgaaggataccagcgcaggcgaattcatgatgttcaacgccgacggcatgctggtgttcaccaacagcccgggaccgacactggtcggctcgctgcgccaccccatggataacaacttcttcggcttcgccggtcaggggctactgcctgagcacctagtcatcagtaagccgttgatgtcctcggactggcaactggtctatgcgatcgacctgtcagccatccttgctggtctatggcagcaacttcttggtgccctgctgttctgcctgctcagcatcaccttgatacatgtgttgattcagcgttttgaccagcgcttcttcacccccaccgtcgaacgcatccgcgcgctggtggaaagcgaaatgttcagccgtgatgtcatcgaaaccgcccccgtcgctctgtgcgtgctgcgccgcagcgatggccaggtggtgctggagaaccacctggcccagcagtggctgggcaaggaccaggcacgcgacgcgcgcagcacgcaatggatcaagcaagccttcgagcagcacgaaggccagtgcagcgactatttcgagagtgccgaaggacgccacctgtacctgagctgctcgccaacccgctacaaaggcgaacaggtgctgctttgcgcattcagcgacatcagcgcacgcaagcagattgaggccgctctggaggaagcccggcgcgcagccgacacggccaatgaagcgaaaacccagttcctggcgaccatgagccacgaaatccgcacacctctatatggcgtgctgggcacgctggagctgctgtcgcgcaccatactcgacgcccagcaacgcgattacctacgagccatcgaaggttcctcgtcgaccttgctgcaattgatctgcgacgtgctagacgtgtccaagatcgaggctggccagttgaccctcgaactcagcgaattcagagccccagacctagtccgcgaagtgatccagagctacagtgcagccgcccggagcaaggggcttcagctctacagctgcctggacccgcgcctgcctgaacacctgatcggcgacgccaaccggatccgccagatcctcaacaacctgttgagcaacgcggtcaagttcaccgattgcggccgtgtggtactgcgggccagactgctaaaccgcgacggcgagcgatcttgcctgttgtggcaggtctcggacacgggcaagggcatcgccgaacaggaccaaccgttcatcttcgacccgttctaccaaaccgaaggccatacccaggtcatccctggcaccgggctcgggctgtcgatatgccagcgcctgacacaattgatgaacggccaactacgcttggtcagcgagttgggcctgggcagcagcttcagcctgacactgcccctagaagtcgcgtcagaccaagccagcgccccattcaacctgctggctgaacgcgttcacgtggtgtcgccagtacacgaattggccgaagccatcagcggctggctgtgccggtggggtgcacgcgctcaggtcggcgcgccggtgccgggcagcgccgtggccggcgaactgctggtcgagctgcatcccggcaacgtcgagcactggctggtccccgaatggtccggcccacgcatcctggccagcgcccaggactgctgggaagcgcggcatgaggccgagcactggcaggtcaacctcaacgacctggacgccctgcaccatgctgtcggccaggcccagggtctgcattgtcccagggaccaggccgtgccagctacttcggctgagccgctcgggctgcacgtgctggttgccgaggacaatgtcatcaaccaattgatactgcgcgaccagctcacagagctcggttgcaacgtgaccttggccagtaacggtgagcaggcactgcaagcctggcagcgcaagcatttcgacctgctgctgaccgacgtcaacatgcccggcattaacggctacgaactagccaggaccctgcgccggcaaggctgcacccgccccatcatcggcgccaccgccaatgccctgcgcggcgaggaagaactgtgcctggccgccggtatggatcgctgcctggttaagcccttcaacctgcaagtcctgctcaactgcctagctccgtatcgaggtagccgttttgaagacctttaa

SEQ ID NO: 347910 - DNA, 375 bp, Pseudomonas aeruginosa
gtggactcacgaacagtcgccgaccatccaatcgaaggctcccgcgtcatctatcaaggctcagacaaggaagcgagcatcaacgtggtcaatcgcagtggcctcgagacggtcatgcagagcagggtcagtatccctgacgaacgagacgatgctcccttcatcaccataaagccattgacattgatctcgcccaacggccagcagatgctgcgggtgctgcatgccggccaaagcctacccgaggacagggagtcactgttctggctaaacatcctcgatatcccgcgtaaccccagacaggccgacacccggaagttcgccatccgccagcgtctgaaactgttctaccgacctgccaggctcagccagtga

SEQ ID NO: 347911 - DNA, 246 bp, Pseudomonas aeruginosa
atgaaatactcactgtcgagcaaggtgattttcccttggggcggcgccgacggcgaactgggtgatgcggcccgcatcactctgccaaggatcgacctcggcgccgacggcaagatgggtgattccactggaatcactctgccagggatccacttcggtatcggcggcaagatgggtgtttcgggccgaaacacttcgccaaagcgaggcatcaccactcacgaggaactcaaacaatgttcttga

SEQ ID NO: 347912 - DNA, 1767 bp, Pseudomonas aeruginosa
atgaccgaagcctggattcttcaaacctctgaaattcggcgtccgttttcgcgggcgacttggatcccccttcgtgcatcgttaagtgacgagcagggcaacgtgaaggaagtggggtatgtcggggacgtgttcgcctgtggctccgtcgcctttcccaagcagcatcaagagttcgccgagcgcttgagttggagcgacatcggcatcgggcataccgtggcgccgtatgcctattcggacggccattactcgccgatcgatgagtatcagtacaacgacaaggagcccatcgggattaacctcgttttcgagcatccgcagcctgtgctcggaggccggcagtggattctgaatccggacttggtggtcgcacttggcctgattaaggaggggccgaactgggttaggccggaagaagactttgtcgtggtcgcaagggagacggtggacagcgatggtagccatcgcctgatcgagatcaagcgggaattcctgatggattatctggcggctcgcggactgtctctccgtctgtcctattaccgtcagcgcgtcgagaacgtcgccagcctcaaggacagtccctatgcaggcctgaatgagatccaagagcagcgtgaaggcggaagatacgaattgcgcatcaaggatctggctgccgtgttcggtggtagttgggcgttcttccgaatgtggcgtactgacgtcgacgaggaggaagacgcgcccatcatgggccccgagactgacgacaacaccgcctcggagagctctgaggggcatcgaagcggctatcctggaatgcgtgttgaaggcgagttctggcgagacgagtggatcgagcaccagggcaagagcatccgagtgcgcggcgatcaagatcagaacttgccgcactttatcgtcgacaccgatggttcacgcaaattctcggccgagctcaatgacgaagacatcggacgttggctctggttccgcccgtccgtggtcaccgagctcctgacacatcgaggcttctccctgaagtggtacacggctgaaaccggcgcgatcaactccacctcggggtactcgattcatttcgggatcaacgcctcggagctcatcaccgtctacgcctacgacatcgccaggctgcccgcctgggagcagttcgtctgggccgcgagtaacgtcgcgccggagggtaaggtcagcgccgagctcctggcctctcaggtcaaagcgcagccggcagacacccatgccgtggaagagttgctattcgggtgcatgcggttgctggaagccgagttccgcaaggcattcggagtgtcgctgttctcgcacgagatagacgatgatgcgtcgatgcagcacgtctctcgtttttcgagcaaagatcagacttcgctcctgcggctagccaaggagctcgttcgcatcttctcggatcgacttgacgttcgctctcttcgaaagctatccaaccaccctgacagggagaaactgggctctaacaagctactgcagagtatcttggctcagaaggccggagaggcacgtgcgcgcgaggtcttcgctgttatcgctggcgcctatgacatgcgccttggcgacgcgcatccgacgagctcgaagatcggtgaagccctcaagctcgcaggcatcgacaccactgcgtcgtatctgcggcagggtgagcagttgatcagcaacttcggtcacgctatttggtgcactggaagtctgctttttggagaccacgataagagcgagggatga

SEQ ID NO: 347913 - DNA, 849 bp, Pseudomonas aeruginosa
atggaggacagagaacactggtttacgttgttggcgcaaaaggactgggaggcgattggcaagctcctgtacgagaaaaagaaggccaaggtgcaagatccctatctggctcaaatgaccggcttctttgagaccgaattcttctccttctccgaatcgcttcagcctagtgaacgctctaggcaattcgagtccaccaacctgctcattgagctgaaccagcatggcttcagccaggactttgtgaatcgatttgttgatgagcggctgaagctgatgcaagagaccaagcactcagcactgctgaactatgctcagtcgcatcagcaccgtccgctggccaaggagatcatccagtccttcctacaggctaagccagaggcggttgtggcgagcatgcgagagaatatgactgttagggccactgaagtgacgcccggaaagccaaagaccatccggctgttcaaatcgaagcaggaagagaacttttacgaggcggtgcggcgggttttcccaacctaccacccatacccaaatgtggcgttgagctgcgtactggattatccggcgatcaaagatcagctgtcagaaaaggccaggtcttactttttccggggcatcgtcgacagcgtcgtattcgacgtgggcagtggctacgagccgaagtatttcatcgagctggatagcagcttccatgatgatccccaggcgcaagccaatgaccagctgaagaacgccatcttccgcgcagccaataccaagctcatacgcatccggcctctggacgccaaggcctcctcagtgcaggagttcgagcgactggtgcgagagctgatgcgccaactctga

SEQ ID NO: 347914 - DNA, 1203 bp, Pseudomonas aeruginosa
atgcgatccagcaagcaaaccgttatttacctcgatagctctgattattcgaccctcacccgccctcgtctggagcccgcacagaaccagcagctagcagccttgagagcactcaagaagcgcaaggacgtgatgtttgtgtattcaggggcgcacatcgcggaaatgtcgcccttggaggagcaatacgctagtgcaggcgtggcgcgcactgcgctgatggttgagctgtgtgggcgcaccacgatgatttcctacgatcgcctgatgaaggccgagctcttgcgcctcgtggagcgcgatccagcccctgtagatgtgctggataccaacggtggctggttcccggacatggggtcactgatgagcccgcttgatgagttggacatccctgggatagtgcaggaagaggtggacaagcaccagatgaaccgcaaggcgcgccggatcctccagaagagcatgtccaagcagggcggtttcaggagcaactttgagaagaccactggtgagatgcttgatttcaccgagctgttgaagaaggtgcccatgcgcaaacgcgatgcggcagttctcaagcggtatgtgctgggcactgccacacgcgcgcaagccgaccaggcattcctggagagcctacgtgaccctaccttcatgtcccagtggttcatccacaaccaccaccagctaggagcggtcgttgaatggatcaggaaaccggcgcagcagatcatcgcaagctgccagcagacgcttgacgaccttaatgatcagctggctcaactgtcgaaatccgaacatgctgaggcgatgcgcagtgtcaggggcgagcggtggacgaaactgaaaaagcaagggatgctcgacatcgtgaaccacctgcttgaaagcgtgttgcctgaagcctccaagtgcgaagacgcttcgctgattgagcgctactgtccaggccttttcgtctgcgtcaacgcattttacacctcgcttcacaagtcgcttggggagaatggtcgaaagccgaaggccagtgactttgttgacctgattcatgccctgtacattccctacgtttcctacttccgggctgatcgctacatgtgcggcatactgcagccgctagccgaggcttgtggcactgaagtagtggcatcgccggctgcgattattgagtcactagaggaaggggcgcaccaagcagtttga

SEQ ID NO: 347915 - DNA, 1854 bp, Pseudomonas aeruginosa
atgaatagatataaacgtaacgtaaagcttcccagcagtgagcaacttcaaggttggaaaataactaaacgcattggaggaggggggaacggcgaagtatatcgtctggagcgaaatggtcagttaagggctctaaaaatccttcatcgtggagacagagtagacaaggatcgtttccaagacgagattgaggcaatgcgtaggtgcgcgggcattgctggagtgcttcctgtattcgagtcctcaagtgactttgaacaatctgactcgatgtggttcatgactggtctggcaactgagcttatggcgaagctgggtcataagccagagctccgtgaagtggttgaagctgtatgtgcatacgccactatcttggctagcatccacgatctcgatatctcacaccgtgacatcaagccagaaaatttgtttttttatgagggacggtggacagtcggagattttggcctcgcaagttttgaaggaaaaaaagcggtaacagctacacgcggtaagctcggtcccttgttctacctagccccggaaatgttcaatgacgtcaagaactctaatggtaagagtgtcgatgtttactctctagccaaaacgttatggaagctctcaactcgccagcaataccctttgcctggcagctacgcccccgttcatttggcgtttcgcatcggctcataccttcctggtcaactaggttcagcggcattggatcaattgattgctgccgcaacagcgtttaaaccctccgatcgccccactatggccgagtttgctgctgagctgaaggcgtggctcgctccccgagttgagaaatctatgccaattaaaatcgatattggtcaacacctagccctgctggaagacttgcacctgaatgaagaggcggcgcgcgagcatctagccatgcaggcaaaggcgaacgaagaagctgtggctagagtaattgataccgtgtctccgttcatggtcgacctgcagcagtcatgttcacaggtgtctgataagctcaagtgcaatttgaccggtggaaaaaacgagtctcagttggtcatctcgattcctggtgaagagaaagcaactcttgaattgacagtagaagttaatacagcgtcccatccgatgatcactacgacagcccgaattgcgcttcactggagtaccggagccggtcttaagctttcgctatggagctcagaggcccgataccttggggcaggaagcgaagagtccacaaaactccatcagctttgcgatcagatagctatcggtctgcggggggcgttacaagaggcattggagttgagctccagtaggcgccggatggaatcggaacaacgtggaattcggtttaagatagatcgccagtcaggtttcccagtcgagggagctagtatccatctcctgagcgcagacggaatcactttggaaaccttgtccacaaatgccgatgggctggcagagtgtgaactcacaaccaaaggggcagtggtagctttcatctcccactctgagtgtcactcaaccacgctggtaaatttgagccaggatagcaaagtgacgctaagggatcagccaggggcattctcgcgagtgcagaaaacatcgtgggcaggtattcagggaatgatcgggcaattctcgctgatacatgaccgcagtcaaagaatgtatatgtacgctcaggacttttcagtcgatggaggtgcgaccggtgcgatctatctggctttggggaagaaggtgcacattaaggataaaaatggaataactgtcacccttacacctcgctcggttattggggactgctacatcttggacttccagaaaactacggagtga

SEQ ID NO: 347916 - DNA, 366 bp, Pseudomonas aeruginosa
atgaccgatccaattcacgactacgatcccgcgcaagccttggaaggccgagaggcgatcgccgtattcatcgcggacgccttgggagcgggagacgctgcctatatcgccaagggccacgccgtcgatattcaaggtatcccgcctgaggtggttacccgcgaagccgcagcgctgctgaatctctctcgtctccgcctgctgaggctcctcgatgacggagagattgcttcacgcataatcgacgggcgacggcgtgtccaggtggccgacctagtgacattcaagcagtcacaggcccaggcccttagcgctgctatggacgagctcacacgggaatctgaaaggttgaatttgggctactga

SEQ ID NO: 347917 - DNA, 3243 bp, Pseudomonas aeruginosa
atgactagggggcaggattcaagattatcgccttcgcattttatgcggcagctgcgtccggagtgctactccgatagtgctgatcgagtgtcctacctgctggacgccaagatgcttgagtactgtctggaaagcatcacctcgcgtaatgagatgcatgacttcgagatattctgtcgaaaattgtgcgaacggatgatctgccccaacctcaagccatccacagggcctgaaggaggaggtgatagtaaagcggatgcagagacctatcctgttgccgaggaaatcgccgagcatacctacattggcaatgttgcgggtggccaggagcgttgggccttcgcattcagcgcgaaaaaaaaatgggcggaaaaggtacgcaatgatgtcgctggaatcgttgcaactcagcgcggatataagaaaattatctgcgtaacggcacaatttgcgcctgccaagaagcgtgcgcaattggaggatgagctctcaaggctgtacggcgtcatcgtcacgatcctggaccgtagttggatcgttgataaggtcattgatcatgaccatagagacttggcctaccactatctgcatgtcgggcaggaggtggccgatagtcgccgcctggggccgtccgactactcgcgtaaccaacaattagaagaccttgagcaggcgctcgcacgtcccgatgagttcgagggaatggagatgcaacgagcgacggaagcgctcgtagctgccaaattgtcacgtaacctagagcggcctcggaccgaaacagatggtcggttcgaaagagccatccgcttggctgcacgctacggcaatcaccgtcagaagcttgaggctcactacgaaaagctctggactgccttttggtggttcgatgatatagctttgatgaatgaggggtacgaggcattcgagcagttggttctggataccgaccatgccaagaaccttgagctgctttgcaatttggctcagttgcttttcaactcagtaattcatcaacacctgacagctgaggaggctcagctcgttgagcgtgttcgtcgtctacgcgaaagattgaccttgatggcggcggagctagagcgaccgaatcacgctttggaagcgaggacatcaatacttgtcctcgacgtcaatcgagccgcattggctgatgaccagcaactattagctgagctctggccgcagttctcagatttactccgacaagcgcgaggtctaggagagttttccgcggggcggttaacgaacttgatcgaggttttcggcaatgtcgcaggcaatgacccaggctatgctgcgctggtagatgaaatggccttgttcgtgacagagcgtacgggcgaggggcagggggctctggtgcttttgaagcgggcaaggcagctcgattttaaggataatttcgagatgataaggctgctaggtaaggcagtccgacaattgacaaagaaagagtactccgaggccatgattgaagcatcacagcttctcgccttggcatatcgcagtgcggggcttctatgggcagcacgcgccagttgcatcttttcgcttgcatcgatgtttattgctgctgaagaagaccatgatcttcccgcgtcgattgttccgacattaatgatcctcgtctggataactgtcgaactccgccatctacccgatctactggaggccgtccgactggtgcaaggttgcgcaaatgggctaccgctcgatgatgagtctcagggtcgagtccagaaacgcttgggggagttggatctgattctaacctgccaactcgtaaacttagatgagaatagtcttcggcgaattactcaactaccagaagtgctggagcggttgggtttgatacatagtcgaaatgctctgctctatgttcttggccacgagacgaagctgcgagaggaaggaaccattcctaaacaggagacacctgagcaggttgctgagcttttctcccagattgccagtcagccggctggaagcaactcggattacccgatgattttcaatgagggggggtcgcagtatctcgtctcacgggtgcagggcatgctggtttcgattcaacatccatgcactgagacatcgattcctctggcagaggccatcttaggcattattgaggctctttttgccaccgctctccagctcagagttgcagctcacaccgagtgtttcaaagttaacgttcaggaggttggccagaatgcggagcccgcattctgtgtaaatgatgaggacatgactgcttcggtggcatggcctaccgggctggtggtgagctcgtacgcgagaacgcaagaaattcagcagacgttgatccatctggcggtcaccatctttgccgcgacttgccatgttcctgatttagagaccacccttgatcagttgttcaagagcgaagcagtgctggatcggattgccatgatcgttgcggtcggcaacagccggcagcgtctattcagccagtccttttccactatcactgagtggtctgatatggccaattcagagtttgctcttgagcccacaaggcctgtaatcaagcgtactcccctaagggggcatagtgatgaagtcgtcggggaaggtgagggcatcctgatgtcgcccggctcggtgagtgatcatcgtcaactaggtgtgcggtcggtcattgatgtccatctttggaatcaggctggctggcgaggtgttgtcgttgctgacttggctcctaatgccccgccagctttggcgctgatgttcacagacgcgggagctgccagaaaaatctttgcacgctggcgcgagcgcctgggtagtgtcgatcataatgatgaaatctatgtagcggtagtgcagggcatctctcgggaatatccagctcattaccggctcctcattacgtcgacccctcctgaggcggaggaaccgttggatcggaaggcacatatggtggtttcgcgtatgcagactatggaagcttccagcgacgccaatttgctgcgattcttggccgcttaccagcgggcgggcgcctatcttcttcttccagccgtgctcaattctgggcagccagagcttctttttgagacggcgatcctgaagagaaagctagtagtcagatccgctgcggagatcgggaagaatgatttagaggtaatggcgctcggttcacagctgtaccgcgagcgatttggtgagatgggcgtgggtgatggggaagaggctgtttga

SEQ ID NO: 347918 - DNA, 2121 bp, Pseudomonas aeruginosa
atgaccaacctcgttcgcgagtgctttggttaccagtttcctgacatcctgagcaagcctcaggttagttatatctacaactacctcaagcgcatgggggccaagagcgtattgttggagtttgactacatagataaggattttcttgaggatttcacaagatattacgctaagcgctataagaacgatgggcatcattgtgcccgtatgcatttctttgccaacactattgaccatcgctgcattacgtcggttttggatggggggctggaagcagaaggaatagctgatcaactgcagagtgcctacctcggcttcatggtcatcaagcctctgccgaaaaccttcatcggtaagacctgtttgaaggtaatgtctgacaaagttgagtttccagcgagaaagcggcgaatgtggaggacgtatgatgtagatctgtttgggatcaaactcagcgttgactccatcgcattccaagagcaggacaaagtcgtggctgcctgtgcaactacggccatttggtctgcgctccacgcgttgagatggcgtagcgtgagaagcattcgttcgtgcagtgaaatcacgatgagtgcgctgaacgatggagatggttcctcaaatagttttcccaacacaggattgagtagcgaacaaatcctccggtcgattgatgcagaaggactccgtcatcacatggagagtatgctgaaggtcgatcagagccgtttcttttcgagtgtcatcgggcatattgacagccaactgccgctcatttttgtgggtgatgtgttcggggtcgaggaggaaaggagggcgcacaagggtatactcgaatatcgaggtagccacgccatatgcatcttgggctataaggtcgataaagaaaacgtggtttatatccacgatgatcgttacggcccatatgctcgcgcaaaactagtatccacaaaggactatacgtcggatcgtccactcaatagagaatgggcgttgggaattcagtcaatgagtgaggatggaacttggagtgaacccaaggagctcatcattcctgacgttttgattgtgccgacggataagaagacccgtctaccgttcgactatgcgcgagagacttgcgagaccattgtgctcgccctcagtctgtcatctggtcacaagttagctccagacgacctgtcttttcggattcagcttcgagaaatctccgatatccggcaagaggtgcggagggcgcgattgccctgcgatgtatccgttgagggtgacggtgggctctctatgtcggaggagaaaaagcaaacttggcgaaagctgagggttgaattccttacaagcgggtttgcaagatttcagtgggttgcccagtttttccataagggctctcctgcttttaaagtgctgattgatgcgacggacattcctcaaggcgacgcggtaactgccattttagtggacgatgtgccgatagctgcaccatatcttttacattttatcgaccacgcacagctgtttaagtctgagcagcgtgggcagttctttcaatcctttctccgccgcttgacggaggacgatgagtcgattgagacctacctaaacaagacgtacggtgaggtgagagctccactttacctcaagggggcagagttcaaggggggggaaatcttccgtagtccgactgcgaagccgctgtacgatgcccctggcgtaaaagtagcgaagctgcacaaggagttctcgaagcgcacgactgagtatctgatatgggcgatagctcgtgatggggccctaataatcggcaaggagcatgtcgaggaagtcgacggagtgctcgagaagtgtggacaccccagcatcacgggatttaagccggctcgaattgctggtgagatgtggaagactccttccgggtgggaacttaactcgaagtcggggaggtatagcggtgactacgtcaacagtgaagctctcctcgaaaatgccctgaacaaatttcgagcgtttttccctggggaaaatttcgctgtcaaacctccactcgaggggcctgaggcggtagtcggcccttgcgcggcattgctgaaagaggtttgtagtagtaaggccacctcggaaggctga

SEQ ID NO: 347919 - DNA, 378 bp, Pseudomonas aeruginosa
atgaacattccgctgtttgccaccactctggcccataatccaccgcgcccaccgcaccacgaacgcttcctgctggaaatggaccggatcctgccctggcccgagctgaccgctctggtccactcgtgctacgcctccccgctgatggcccaaccaccgcgccacccgctggacacgatgctgcggatctaccttctgcaacattggttcggccacgacgctgctggaatcgaggaaagtctttacgagattaaggcctggcgccttttcacccgactgcaatgccctcgctgccgggtacccagcgcgctggagatcagcgccttcgccgacctgctggaggacagcggggtagccaagtgcttgcagcggtattga

SEQ ID NO: 347920 - DNA, 651 bp, Pseudomonas aeruginosa
atggccacgcccttcaccgccgtcttcatggaaggcctgctgctcggcctcggcctattcagcgcacccggccccaaggataccctggtcatccgccggggcgtgggcgggcattcggtgtggggcatcgtagcgatctgcgtggtcgccgacgtgatcctgatcgccctggggatcagcggcctggcgggcgtgttcgccggctatccgctcgctatttccctgctcctgctgtccggggcgctctacctgatctggttcggctggcagcgcctgcgcgcctgcctgctcaaccagtcgctggccgaagtacagggccagaacagccacaccggtggggcgctgagagaagccctgctcctgagcttcgccaacccctacgcctggctcgacaccatcatcctcatcggccccatggcggtagccaagccggcctcgcaacagatctccttcgccaccggtaccatggccgcctcactgctctggttcgtcctcctcgccctgggcagcagtcatgccagtgctctgttccgctccgcccgcgcctggcgcttgctcgacggagtggtggcgctgctgatggcctacctcgccagcgggttgttgatcgaactgctgcgcaagcatttccccgccggcggcctcgcatga

SEQ ID NO: 347921 - DNA, 810 bp, Pseudomonas aeruginosa
atgtctcaggtaaagcaatgctgcgagtcactgatccgaacaggcttcggacggctggaacttccatcggaagcgcttctcgacctcaaccagcttctggatggtttctacaaggtcgagcagaccaccaagcaaagctactccttcgtgcaggacaccgacggcttccttcccttcggctccgaatatgccctcatcgaaacccatcccgacctgtgcgagcgcttctgttactggcccgcacggagggcgcagcggcaggaacacccgttcagccagagcgccttcgtcgatgccgccgagcgctatgccgcggtcctgagccaactggccgagcaggtcctcgccgctctctgcgacgaattcgacgccgcccccctcccctccacgcgcgccgcgtcctacctgcaactgtgcgcctacggtgagttgcgtccggacaatacccggcgcttcgcccaggacccgcacgaggacggccacctgctgagcttcatcaagcccaatcaggaaggcctggtgctggtgaagggccgtgacctagaaccagcgcgcctgctgaagaacgaggtggcgattctcgccggctcgctgctgaccaagctgtcggacaacgctatccccgccgcctaccacgcggtgctgatgccggagaaaccgactcggcgcagctcgctggtgtatttcgtcaaccccgccgaggaccagccgtacaacggcctagtgcggcaacgcccggtcacgctgcgggaagagatgctggctcgacataccgggtttggcaatcacgcacttcagctagtgtcctga

SEQ ID NO: 347922 - DNA, 693 bp, Pseudomonas aeruginosa
atggttataaggaccaaagaaacgttgaagatgctgctggcccggcgtagccgtgagctgggcaagtcgatgagcaccatcgcccgggaggccgggctgtcgcggacctacatgtacaccctggcccgcggcgatgcgcaggacccctcggtgcgcaccttggtgcgcctggccaaggcgctgctggtctcgccgctgctactgttccgctactacgctgatatctctggggcaccgcagtccggcttcaagctggcgccgaccaatcgcgcggtggggctcgacgatcttgacgacatcgccgtgttcaacgccgacgtgaccatgcccgaccaggccatcgtgattcccggcgagtcgttccataaggtctgggagatccagaacgtcggccataaaccctggcgcgggcgacgcctggtgcgggtcgatggcgaatacgtgatcgcccgccgcgatcctgcggtgaacggctgggtcccggtgatggacgtgcacctgtcgagcctctaccgcgagatcgcgatccccgataccttgcccggccagccggtgcgcctgacggtggagttcgcagcaccgcgcgagagttgctcggtggcgtcaatctggcggatcgaggacgagcacggactaccctgttacagtccagagttcgtcctgcatgtaattgtcacggtcatggcactctga

SEQ ID NO: 347923 - DNA, 834 bp, Pseudomonas aeruginosa
atgaagaagatgatgcagggcgccgccgccctgatcgcgctcgtcggcgccggggagagcatggcgctggaatggatgagcaacagcgtcggtttccgttacggccagcaattcaccaacccgaacaacccggacaagttcgccaagcgcatctacagcttcacccacgccgacggctatcgctacggcagcaatttcttcaatctcgatgtgttcctttccggcaaccgcgacccgcgcaagggcaccgaccatggtggcagcgaagtctatgcggtctaccgccaccagctctacgcttcgcgggtgttcgaccggccgctgggcaccggcctggtcaaggactacgccttcaccctgggcttcgacgccagccgcaacaacaacctggcttcggccaagaagcgcgccctggtgttcggcccgaccctcaagttcaacggtcccggcgtgctcgacctgagcctgctctactaccgcgagaagaaccacttcggcgtgcccggcgcgcgccatcccgaccacaccttcgacaccacctacatgctcaacctgacctggatgcggccgttcaaggtcggcaaccatgcggcgaagttccagggcttcgtcaactacgtgggagagaagggcgaggactacaacgacaaggacaccgcggcggaaaccctggtccgcaccgccctgatggtcgccgccctgccaggcgacaagcgccagccgaacctgtggctcggcgtcggctacgagtattggcacaacaagttcggcgtcgacggtggcaccggcagccgcacctcgacgccgacgttgaatatggaattcaccttctga

SEQ ID NO: 347924 - DNA, 942 bp, Pseudomonas aeruginosa
atgagccgcaagctgcatatccacgcgcccgcgatccactacttcgacatggttcgccgctgccattcgatccgcgaagccgcgcggcgcctgaacgtcgcctcgtcggcggtgaaccggcagatcctcaagctggaggacgagatcggcgcgccgctgttcgaccgcctgcccggcggcctgcgcctgaccggagccggggagatcttcgcgcgccacgtcaccgtggtcctgcaggacatggagcgcgtgcgttccgaactggacgcgctgcaaggcctgcgcaccggccatgtggagatcgccaccatcgaagcggtgaccagcgacctgctgccctgcgtgctcaaggcgatgcgcgaacgctacccggacatcaccgtcggcgtcaccctgctcggttcccaggcgatacccgaggcggtgagcagtggcgcggtcgacctcggcctggccttcgccctgccgcgcagcgccgacctgcaacaggtcagcgtcggccatttccgcctcggtgccatcgtctccccgcagcacccgttggcgcgacaccaggccatcgccttcgccgattgcgtcgaacatggcctgatcatggccaagagcgagctgtccatccatcacctgctggcgccgctccagcgccgtttgcgcgaaccgcgccgggcggtgctggagagcagctccctggagctgtcgcgacaactggcgcggcgcgggctcggcgtcgccttccagacccgcctggggatcgaggccgacatcgcccagggcgagctgcgtttcctgccgctgaaagacaatggcggcatccacagcgacctcggcctctacgtgcgtaccggccgttacctgccggtggcggtggacgccctggcccggcagatcgccgaggaagtgcgcctgcgcgagcgcgaggaagcgcgcctgaaccaggcctga

SEQ ID NO: 347925 - DNA, 402 bp, Pseudomonas aeruginosa
atggacgagaaacaacgctacgaagccggcatgcaagtgcgccgcgcggtgctcggcgacgcccatgtcgagcgcagcctggccaacctgacgccgttcaacgaagagttccaggaaatgatcacccgccacgcctggggcgacatctggacccgtccggggctgccgcgacacacccgcagcctggtcaccatcgccatgctgatcggcatgaaccgcaacgaggaactcaagctgcatctgcgcgcggcgaagaacaacggggtgagccgcgacgagatcaaggaagtgatcatgcagagcgccatctactgcggtattcccgcggccaacgcgaccttccacctggccgaatcggtgtgggacgagcttggcgtggagtcgcagcaggcgtcccggtag

SEQ ID NO: 347926 - DNA, 1380 bp, Pseudomonas aeruginosa
atgagcgacgtacccgccaaccagttgttcgatgcctatttcatggcggcgccgatgcgcgcggtgttctccgaccgcggccgcctgcaaggcatgctcgacttcgaggccgccctggcccgcgctgaggcgcgcaccggggtggttcccgcgacggcggtggcgccgatcgaggcggcctgccgcgccgaactgtacgacccgctggcgctggccgaggcggtcgccactgccggcaactcggcgatcccgctggtcaaggcgctgggccgccaggtggcggctggcgacgccgaggccgagcgctacgtgcatctcggcgccaccagccaggacgccatggacagcggcctggtgctgcaactgcgccgtgcgctggccttgctcgagcaggatctgcaacgtcttgccgaggtcctggcggaccaggccgaacggcatgccgacacgccgctggccgggcgcacctggttgcagcacgccaccccggtgaccctgggcatgaagctcgccggcctgctcggtgccttgacccggcaccgccagcgcctgcgcgagttgcgcccgcgcctgctggtgctgcaattcggcggcgcctcggggacgctcgccgcgctcggcgaacaggccctgccggtggccgcggcgctggccgaggagctgggcctggctttgcccgaacaaccctggcacacccagcgcgaccgcctggtggaattcgccagcgtgctcggcctggtggccggtagcctcggcaagttcggtcgcgatgtcagcctgctgatgcagaccgaggccggcgaggtcttcgagccggccggcgccgggcgcggcggttcctcgaccatgccgcacaagcgcaacccggtgagcagcgcggtgctgatcgccgccgccacccgtgcgccggggctggtctcgaccctgttcgcggcgatgccgcaggaacacgagcgcagcctcggtctctggcacgccgagtgggaaaccctgccggaactctgttgcctggttgccggcgcgctgcaacaggcgatcggcctgctcgaaggcctggaggtggacgcccagcggatgcgccgcaaccttggcctgacccacggcctggtgctcgccgaggcggtgagcatcgccctggcccgccgtatcggccgcgaagccgcgcaccatctggtggaacagtgctgccgccgcgccgtcgagcagcgccgcgagttgcgcgcggtgctcggcgaagaggcgcgggtgagcgccgagttgtccggcgacgaactggaccgcctgctcgatcccgcccattacctcggccaggcccgcgcctgggtcgagcgcgcgctcgccgaacaccatgccctgggcttagaaccccatcccgcctga

SEQ ID NO: 347927 - DNA, 1299 bp, Pseudomonas aeruginosa
atgactgcccctgttcaccagtacagcaacgaagaacgccgcaagcgcatcttcgccatcgtcggcgcctcctccggcaacctcgtggaatggttcgacttctacgtctacgccttctgcgcgatctacttcgcaccggccttcttcccctccgacaaccccacggtgcagttgctgaacaccgccggggtcttcgccgccggcttcctcatgcgccccatcggcggctggatgttcggccgcatcgccgacaagcacgggcgcaagaccgccatgctgatctcggtggtgatgatgtgcgccggctccctggcgatcgcctgcatgcccacctacgccagcatcggcaccctggcgccggcgctgctgttgctggcgcggatgttccagggcctgtcggtgggcggcgagtacggcaccagcgcgacctacatgagcgaggtggcgctcaagggccagcgcggcttcttcgcctcgttccagtacgtcaccctgatcggcggacagttgctggcggtgctggtggtggtgatcctgcagcagttgctgagcgaagacgaactgcgcgcctggggctggcgcattcccttcgtgatcggcgcgatcaccgcggtgatcgccctctggctgcggcgctcgctgaacgagaccgcttcgaagtcgaccctggagcgcaaggaatccggcaccttcgccgagctgttcaagcacaagcgggccttcttcaccgtgctcggcttcaccgccggcggctcgctgatcttctacaccttcaccacctacatgcagaagtacctggtcaacaccgccgggatgagcgccaagaccgccagcgcggtgatgaccttcgccctgctggcgtacatgctgatgcaaccgctgttcggcatgctttccgatcgcatcgggcgcaagacctcgatgctctggttcggcaccctgggcacgctctgcaccctgccgatcctgctcgcgctgaagaccgtgagcagtccctacatggccttcttcctgatcatcctggcgctggccatcgtcagcctgtacacctccatcagcggcctgatcaaggccgagatgttcccgccggaggtgcgcgccctcggcgtcggagtgtcctacgcggtgggcaacgcgatcttcggcggctcggccgagtacgtcgccctggggctgaagtcggtagggatggagaacgtcttctactggtatgtttcagccatgtgcctgctggcgctgctggtctgcgtgagcctgccggacctgcgcaaggtcagctacctgaacgacgagccctga

SEQ ID NO: 347928 - DNA, 1206 bp, Pseudomonas aeruginosa; identical to SEQ ID NO: 320923

SEQ ID NO: 347929 - DNA, 783 bp, Pseudomonas aeruginosa
atgagcagctacagcaccaacgagatgatgaccgtggccgccgcccgccgcctgcacaacggcgcggtgtgcttcgtcggcatcggcctgccgtcgaaggccgccaacctggcgcgcctgacttcctcgccggacgtcgtgctgatctacgagtccgggccgatcggcgccaagcccagcgtcctgccgctgtccatcggcgacggcgagttggccgagaccgccgataccgtggtccccaccggcgagatcttccgctactggctgcagggcggacggatcgacgtcggcttcctcggcgcggcccaggtcgaccgcttcggcaacatcaacaccaccgtgatcggcgactaccgccagcccaaggtgcgcctgccgggagccggcggcgcgccggaaatcgccggcagcgccaaggaagtgctgatcatcctcaagcagtcgcaccgcaccttcgtcgacaagctggccttcgtcacctcggtcggccatggcgagggcggcgactcgcgccagcgcctgggcctgccgggcaaggggccggtggcgatcatcaccgacctgtgcatcatggagccggaagccggcagcaacgagttcgtggtcacttcgctgcatccgggcgtgacccgcgagcaggtggtcgaggccaccggctgggcgatccgcttcgccgagcgggtcgccgagacgcccgcgccgagcgaggtcgaactcgccgcgctgcgcgacctcgaggcgcgcaccgcggccgcccatggacagaaggggagcgacgaatga

SEQ ID NO: 347930 - DNA, 852 bp, Pseudomonas aeruginosa
atggctgaaatcctctccctgcgcgaagcggtgcgacgcttcgtccacgatggcgacagcgtcgccctcgaaggcttcactcacctgatcccgacggccgccggccacgagctgatccgtcagggcaggaaagacctgacgctgatccgcatgactcccgacctggtctacgacctgctgatcggtgcaggctgcgcgaagaagctggtgttctcctggggcggcaaccccggggtcggttcgctgcaccgcctgcgcgacgcggtggagaagggctggccgcaaccgctggagatcgaggaacacagccacgccgacctcgccaacgcctatgtcgccggcgcctccgggctgcccttcgcggtgctgcgcgcctacgccggctccgacctgccgaaggtcaacccgctgatccgcagcgtcacctgcccgttcaccggcgaagtgctggcggcggtgccctcggtgcgtccggacgtcagcgtgatccacgcgcagaaggccgaccgcaagggcaacgtgctgctctggggcatcctcggcgtgcagaaggaagcggccctggcggcgaagcgctgcatcgtcaccgtcgaggagatcgtcgacgaactggacgccccgatgaacgcctgcgtcctgccgagctgggcgctcagcgccgtgtgcctggtgcccggcggcgcgcatccgtcctatgcccacggctactacgagcgcgacaaccgcttctaccaggactgggacccgatcgcccgcgaccgcgaaagcttcaccgcgtggatcgacgaatacatccgggggaccgaggatttcggggccttccaggccaagctcgcggagggcaagcgatga

SEQ ID NO: 347931 - DNA, 540 bp, Pseudomonas aeruginosa
atgtccatgcgcttgaaattgctgagaaaaaaactcggggtcacgctggagaccctggccgagaagaccggcctgaccaagagctacctgtccaaggtcgagcgcgggctgaacacgccgtccattgccgccgcgctgaagctggcgaaggcgttgaacgtgcaggtggaggagctgttctccgaggaaagcgacggtgtcgacggctacagcatcgttcgtcgcgaccagcgcaagtcgctgtccagcggcgacgacggcccggcctacgcctccctcgcgcagcagatcggcgcccgcgcgctgttgccgttcatcgtccaccccccgcgcgatttcagtcactcgacgttcaaggagcacctcggcgaagagttcatcttcgtccatgagggccaggtcgaggtcgacttcatgaaccagcggatcatcctcgagcgcggcgacgccctgcatttcaacgcacagaagccgcaccgcatccgctccctgggggagacccaggcggaattgctggtggtgatccacagcgacgaatga

SEQ ID NO: 347932 - DNA, 783 bp, Pseudomonas aeruginosa
atggctacgacactggaattacccaaggatcaactgatccagcacgcgctgaagcagatgaaaagcagcctcggcgataatacgtggactgaccggcaaaagctggccctgacctgccggattctcttcgaggccggccacgactccgggctcgccgggcagatcacctcgcgcggcccggaggcggggacctactacacccagcaactgggcctgggcttcgacgagatcagcgccggcaacctgctgctggtcgacgaagacctcaacgtcctccacgggcacggcatggcgaatccggccaatcgcttccacagctgggtctatcgcgcccgcccggacgtcaactgcatcatccacacccacccgctgcacatcgccgcgctgtcgaccctggaagtaccgctgcaggtctcgcacatggacctttgcccgctatacgacgactgcgccttcctcaaggactggccgggcgtgccggtaggcaacgaggaaggcgagatcatctccgccgccctcggcgacaagcgcgccatcctgctctcccatcacggcctgctggccaccggtgcaagcatcgaggaggcctgcgtgatcgcggtgctgctcgagcgcgcggcgaagatgcagttgctggcgatggccgccggggagatcaagccgatcccgccggccctggcgcgcgaggcccacgactggatctccaccccgaagcgccacggcgccgcattcaactactacgcccggcgctgcctgccgcgcaacagcgactgcctgagctga

SEQ ID NO: 347933 - DNA, 882 bp, Pseudomonas aeruginosa
atgtccgcatccatccacggcatcatcggctacaccatcacccccttcgccgccgacggcggtctcgacctgccggccctcggccgctccatcgagcgcctgatcgacggcggcgtgcacgccatcgccccgctcggcagcaccggcgaaggcgcctacctgagcgacccggaatgggacgaggtggtcgacttcaccctgaagaccgtcgcccatcgcgtgccgaccatcgtcagcgtctccgacctgaccaccgccaagaccgtgcgccgcgcgcagttcgccgaatccctcggcgccgaggcggtgatggtcctgccgatctcctactggaagctcaacgaggcggaagtgttccagcactaccgcgcggtgggcgaagccatcggcgtgccggtgatgctctacaacaacccgggcaccagcggcatcgacatgtcggtggaactgatcctgcgcatcgtccgcgaagtggacaacgtgaccatggtcaaggagagcaccggcgacatccagcgcatgcacaagctgcgcctgctcggcgaaggccgggtgcccttctacaacggctgcaacccgctggcgctggaggccttcgtggccggcgcgaaaggctggtgcagcgccgcgccgaacctgatcccgacgctcaacggccagctctaccaggcggtgctcgacggcgacctggagaaggcccgcgcgctgttctaccggcagttgccgctgctcgacttcatcctccgccggggcctgccgaccaccatcaaggccggcctgggcctctccggcctggaggtgggggcgccgcgccttccggtgcaggcgctggataccgagggctgtcggtatctgcaggggttgttggaagagctgcgctga

SEQ ID NO: 347934 - DNA, 1059 bp, Pseudomonas aeruginosa
atgttcaagtccttgcaccagtacgcacacgtgttttcccggttgtccctgttcggcctggcgttcgccgcggcggcccaggcgcagagccagagcctgacggtgatctccttcggcggcgcgaccaaggccgcccaggaacaggcctatttcaaacccttcgagcgaagcggcggcgggcaggtggtcgccggcgaatacaacggcgaaatggccaaggtgaaggccatggtcgacgtcggcaaggtcagctgggacgtggtcgaggtggagagccccgaactgctccgcggctgcgacgaggggctgttcgaacgcctcgacccggcgcgtttcggcgaccctgcgcagttcgtccccggcactttcagcgagtgcggggtggccacctacgtctggtcgatggtgatggcctacgactcgacgaagctggccagggcgccgcagtcctgggcggatttctggaacgtccgcgagttccccggcaagcgtggcctgcgcaagggcgccaagtacaccctggaagtggcgttgctggccgacggggtgaaggcggaggacctctacaaggtactcgccaccccggagggggtcagccgcgccttcgccaagctcgaccagctcaagccgaacatccagtggtgggaggccggcgcccagccgccgcaatggctggcggccggcgacgtggtgatgagcgcggcctacaacgggcgcatcgccgctgcgcagaaggagggggtgaaactggccatcgtctggcccggcagtctctacgatccggagtactgggcggtggtgaagggcacgccgaacaaggcgctggcggagaaattcatcgccttcgccagccagccgcagacgcagaaggtgttctccgagcagatcccctacgggccggtacacaagggcaccctggcgttgctgccgaagacggtgcaggaggcgctgccgaccgcgccggccaacctcgaaggcgcgcgggcggtggatgccgagttctgggtggaccacggcgaggagctggaacagcgtttcaatgcctgggcggcgcgctga

SEQ ID NO: 347935 - DNA, 1383 bp, Pseudomonas aeruginosa
atgaccgctcagctcaacccgcagcgcgacacccgcgactaccagcaactggacgccgcgcaccacatccacgccttcctcgaccagaaggcgctgaaccgcgaaggcccgcgggtgatggtccgcggcgatggcctgcagctctgggacaacgacggcaagcgctacctggacggcatgtccggcctctggtgcaccaacctcggctacggccgccaggacctcgccgccgccgccagccgccagctggaacaactgccgtactacaacatgttcttccacaccacccacccggcggtggtggagctttccgagatgctcttcagcctgctgccggaccactacagccacgcgatctacaccaactccggctccgaggccaacgaggtgctgatccgtaccgtgcggcgctactggcagatcctcggcaagccgcagaagaagatcatgatcggccgctggaacggctaccacggctcgaccctgggcagcaccgcgctcggcgggatgaagttcatgcacgagatgggcggcatgctgccggacttcgcccacatcgacgaaccctactggtacgccaacggcggcgagctgagcccggccgagttcggtcgccgcgcggcgctgcaactggaggagaagatcctcgaactgggcgcggagaacgtcgccgccttcgtcgccgagcccttccagggcgccggcggcatgatcttcccgccgcaaagctattggccggagatccagcgcatctgccggcagtacgacgtgctgctgtgcgccgacgaagtgatcggcggcttcggccgcaccggcgaatggttcgcccacgaacacttcggcttccagccggacaccctgtccatcgccaagggcctgacgtccggctacatccccatgggcggcctggtactcggcaagcgcatcgccgaggtgctggtggagcagggcggggtgttcgcccacggcctgacctattccggccacccggtggcggcggcggtggccatcgccaacctcaaggcgctgcgcgacgagggcgtggtcacgcgggtcagggaggagaccggaccctacctgcaacgctgcctgcgcgaggtcttcggcgaccatccgctggtcggcgaggtccagggcgccggcttcgtcgccgcgctgcagttcgccgaggacaaggcgacccgcaagcgcttcgccaacgagaacgatctggcctggcgctgccgcaccatcggcttcgaggagggcgtgatcatccgctccaccctcggccgcatgatcatggccccggcgctggtggccgggcgtgccgagatcgacgaactgatcgacaagacccgtatcgcggtggatcgcaccgcgcgcgagatcggcgtgctctga

SEQ ID NO: 347936 - DNA, 1434 bp, Pseudomonas aeruginosa
atgaacgacacgccgaacgtgcgtgagccggccctgcgccgcgtgctcgggctgggaccgctgctggcggtggccatcggcctggtggtttcccagggcgtaatggtactgatgctgcaaggcgccgggacggccggcctcggcttcatcgtgccgctgggagtggcctacctgctggcgctgagctacgccttttccttttccgagctggccctgatgattccccgcgccggtagcctgagcagctacaccgaggtggccatcgggcatttcccggcgatcctggcgaccttttccggctacgtggtggtggcgatgttcgccctctcggcggaactgctgctgctcgacctgatcatcggcaaggtctaccccggcgcgctgccgccgatgctggtggcctacggcgtgctcggcctgttcaccctgctcaacctgctcggcatcgacatcttcgcgcgcctgcagagcgcgctggcgctgctgatgatgatcgtcctgctggtgctcggcctgggtgcggtgagcagcgaccacgcttccgcgcagaccgccctggcgagcggctggaacccgctcggggtaagcgccctggcgctcaccgcgatggccgtgtggggcttcgtcggcgccgagttcgtctgcccgctggtggaggagacgcggcgtccggagcgcaacatcccgcgttcgatgatcctcggcctgagcatcatcttcctgaccatcgccctctactgcttcggtgcgctgctgtgcatcccgcaggcggaactggccggcgacccgctgccacacttcctcttcgccaaccgcgtgttcggcgagtacggccagctgttcctggtgatcgccgcgatcaccgccacctgcagcaccctcaactcgtcgctggcggcgatcccgcggatgctctacgggatggcgcagaacggccaggccttcccgcaattcaagcagctcagccggcgggcgcgcacgccctgggtggcggtgctgttcgtcgccgcgatcaccggcctgccgatcctgatcctcggccaggacccggactcgatcaacctgctgctgctcgccgccgcgctggcctggctgctggcctacatcatcgcccacgtcgacgtgctggccctgcgccgtcgctatccgcacatcgcccgtccgttccgcacgccgttctacccgctgccgcaactgttcggcatcgccgggatgatctacgcggtggtccacgtctcgccgaccccggaaatgaccggacggatcttcgccagcgccggcgtggtgctcggcgtggtctcgctggtggcggtggtgtggatcaagggcgtgatgcgcaagcccctcttcgtacccgaaccgctcgagacggccggtgagactgcccagggcaagtccgtcgccctcgatcccctgcaatccccttcggcctga

SEQ ID NO: 347937 - DNA, 1491 bp, Pseudomonas aeruginosa
gtgttcgaactcagcgattggcaacggcgcgccgcgacacagcgcttcatcgaccaggccctgatcggcggccgccagcgtccggccgccagcggcgctaccttcgacgccatcgatccggcgagcaatcgcctgctggcgcgggtcgcggcctgcgatgcggccgacgtcgacgcggcagtggccgccgcccgccgcgccttcgacgaaggcccctgggcgcgtctcgccccggtcgagcgcaagcgcgtgctgctgcgcctggccgagctgatgctggcccatcgcgaagagctggcgctgctcgactcgctgaacatgggcaagccggtgatggacgcctggaacatcgatgtgcccggcgccgcccacgtcttcgcctggtatgcggaaagcctcgacaagctctacgaccaggtcgcgccgaccgcccagcaggccctggccaccattacccgcgtgccgctgggggtgatcggcgcggtggtgccgtggaacttcccgctcgacatggccgcctggaagctcgccccggccctggccgccggcaactcggtggtgctcaagccggccgagcagtcgccgttctccgccctgcgcctggccgagctggccctggaggcggggatgccggaaggcgtgctgaacgtggtgccgggcctcggcgagcaggcaggcaaggccctcggcctgcacccggaggtggacgcactggtgttcaccggctccaccgaggtcggcaagtacttcatgcggtattccgcgcaatccaacctcaagcaggtctggctggagtgcggcggcaagagtccgaacctggtgttcgccgattgccgcgatctcgacctggcggcggagaaggccgccttcggcatcttcttcaaccagggcgaggtctgttcggcgaactcgcgcttgctggtggagcgttcgatccacgacgagttcgtcgagcgcctgctggccaaggcccgcgactggcagccgggcgatccgctggacccggccagccgcgccggcgccatcgtcgaccgccggcagaccgccgggatccttgccgccatcgagcgggcgcaaggcgagggcgcgaccctgctcggcggtggtcgccagttgacgatcaacggttcggacaacttcatcgaaccgaccctgttcggcgacgtacgcccggacatgcagctggcccgcgaggaaatcttcggtccggtgctggcgatcagcgccttcgactccgaggacgaggccatacgcctggccaacgacagccgctacggcctcgccgcctcgctgtggagcgacgacctgcaccgtgcacaccgggtggcgcggcgcttgaatgccggaacggtgtcggtgaataccgtggacgcgctggacgtcgcggtgcctttcggcggcggcaagcagtccggcttcggtcgcgacctgtcgctgcattccttcgacaagtacacccagttgaagacgacctggttccagttgcgctga

SEQ ID NO: 347938 - DNA, 921 bp, Pseudomonas aeruginosa
gtggcgtcctataccttgcggcaactcaagtatttcgtgaccaccgtggaatgcggcagcgtggccgaggcctcgcgcaagctgtacatcgcccagccgtcgatctccacggcggtgaagggtctggaggaaagcttcggcgtgcagctgttcatccgccaccacgcccagggcgtgtcgctgacccccgccggcgcgcgcttctaccgcaaggcgcaggaactgctgcggatggcccacgagttcgagcagaacgccctggccgacaacgacgtgatcgccgggcagatcgacatcggctgcttcgagacggtcgccccgctctacctgccgggcctgatcgccggctttcgccaggcctatccgggggtggagatccgcatacgcgacggagagcagcaggaactggtgcaaggcctcacctccgggcgcttcgacctggccttcctctacgagcacgacctcgactcgaccatcgagaccgagccgctgatgccgccgcaacgaccccacgcgctgctccccgaagggcaccgcttcgccgggcaggcgcaagtgtcgctgcgcgacctgtgcctggaaccgatgatcctgctcgacgtgcagcccagccgcacctatttcgtcagcctgttcgaggaactcggcctgacgccgaacatcgccttcagctcgccgtccatcgagatggtgcgcggcatggtcggccagggcttcggcttctccctgctggtcacccgcccgcattcggaatgcacctacgacggcaagaaggtggtcatggtcgacctcgccgagccggtgtccacctccgggctcgccgccgcctggctgaaacgcgcgcaactgaccaagccggcacgattgttcgtcgactactgccgggagcaactgggcaagcttgccgagcgccggcactga

SEQ ID NO: 347939 - DNA, 438 bp, Pseudomonas aeruginosa
atgaagaagttcctgttgcccgccctgctgttcgccgcggcctcgctgaccggctgcgccagctacaacgtcagccagcccatcgccccggtggccggcgcggtgaaaaccgacctcaaggccgacgtcgccgtcggcgagccgatcagcggagactcctcggtcaatatcctgttcggcttcctcaagttcggcggcgacagccagttcgccgacggcgtcacctacggcgcagaaagcggctcgggcctgagcctcggcgccttcgacccggtgtcctcggccaaggccgccgccgcgttcaaggcggtgaagaactccaatgccgacctgatcgtggcgccgcgctacgaggtttcggtgaacgactacttcctgttcaagaaggtcgacgtcaaggtcaccggcagcaagggcaccatccgctccatccgctga

SEQ ID NO: 347940 - DNA, 930 bp, Pseudomonas aeruginosa
atgctgatagacgaagaaatcaccctcaagaagctggaaaccttcctcgccttcatgcgcaccggcaacctggcgcgcgcggcggcggaactgggcaccagcaacgtcagcgtgcaccgcgccatccactcgctggaaagcgccctgcgctgcccgctgttcaagcacgagggacgcaacctgaccccgctggaaagcgcctacgtgctcgaggagcgcgcgcagaagctggtccaggaggtactcgacacggtgcgcctgacccgcgaggcggccggcttctccgccgagcgtttcaagctcggcgcgctctattcgctgacggtgaagaccgtgccgcaactgatcatgggcctcaagctgcgacgcagcgcgctgaacatcgacctgatcctcggctccaacgtcgatctgttctaccagctgaagaacatggagctggacgccatcctggtgtcgctcaacgacagcgtcagcgatcccgactgcgagcacctgccgctgttctccgatgacatcttcctcgccgtgccggtggactcgccctacgccaggctcgccgagatcgatctcagcaccctgcgcgacacgcccttcgtcacgctcacccagggcttcgccacccatcaggacggcacccgggtgttccagcaggccggcttcgaaccgcagatcgccatgcaggtgaacgacatattcaccctcctcagcatggtcagctcgggggtcggccatgcgctgctgcccaaacgcatcgaggcggtctacgagaaccgcgtgcggctgatcccgctgcaaccgcgctatcgcctgcagcagcacatcggcgtggtgttcctcaaggccaaggagcgcgacccgaacctgctggcgttgctcgcggagtgccggatgtacagcctgcgcctggagcaggaggcggcgggatag

SEQ ID NO: 347941 - DNA, 765 bp, Pseudomonas aeruginosa
atgttcgagtccctgaacaaagtcatcaatggctacggcctgatcagcggcttcgccatcatcggcgtgaccatggcggtgtcctactggttgtcggcgcgcctcacccgcgggcgcctgcacggctcggcgatcgcgatcttcctcggcctggtgctgtcctacgtcggcggcgtcgccaccggcgggcagaaaggattggtggacgtgcccctgatgtccggtatcggcctgctgggtggcgccatgctgcgcgacttcgccatcgtcgccacggccttcggggtgaatgtcgaggaactgcgtcgggcaggggtttccggggtggtgtcgctgttcctcggagtcggttcgtcgttcgtcgccggggtcgcggtggccatggcgttcggctataccgatgcggtcagcctgaccaccatcggcgccggcgcggtcacctacatcgtcggaccggtgaccggcgccgccctgggggccagctccgaggtgatggcgctgagcatcgccgccgggttggtgaaggcgatcctggtgatggtcctgacgcctttcgtcgcgccctacatcggcctgaacaatccacgtacggcggtgatcttcggtggtctcatgggcacctccagcggcgtcgccggcggcctcgccgccaccgacccgaagctggtgccctacggttgcctgaccgcggcgttctataccgccatcggttgcctgctggggccgtcgctgctgtatttcagcgtgcgcggcctggttgggtga

SEQ ID NO: 347942 - DNA, 405 bp, Pseudomonas aeruginosa
atgattatctacggtgtcgcactgctgtctctgtgtaccctcgccgggctgttcatcggcgagatccttggcgtgctgctcggcgtgccggccaacgtcggtggcgtcggcatcgccatgctgctgctgattttcgtcggcagctacctgggcaagcgtggcctgctctcggcgaagaccgagcagggcgtggagttctggagcgcggtctacattcccatcgtggtcgccatggccgcccagcagaatgtcctcggcgcgctgagcggcgggccggccgctatcctcgccggcatcgccgcggtcgccgtggccttcgccctggtcccgctgctcgaccgcttcggccggaagaaagccgaaggcgccccgccattgaaaccgcgcaccagcgtgcaggggtga

SEQ ID NO: 347943 - DNA, 933 bp, Pseudomonas aeruginosa
atgagcgtgctgttcgcctatcccggccagggcgcccaacgtcccggcatgctcgcggccttgcccgacgaaccgccggtgcgcgcctgcctggagcaggcggcggactgtctcggccaggcgccggccgaactggagagcgccgaggccttgcgcggcacccgcgcggtgcagttgtgcctgctgatcgccggggtcgccgccagccgcctgctggagacgcgcgggcatcggccggggctggtcgccgggctgtccatcggcgcctatccggcggcggtggtagccggcgcgctggacttcgacgacgcgctgcgtctggtggcgctgcgtggcgaactgatgcaggccgcctggcccgagggctacgggatgagcgccatcctcggtctcgaacaggcgcaactggaagcgctgatcctggcggtgcggcgcgagcacccgccgctctacctggccaacgtcaacgccgagcggcaactggtggtggccggcagcgaagcggctctggccgccctcgccgaacgcgcccgtgccgccggcgccagcgcggcgaagcgcctggcggtgagcgtaccgtcgcactgtgcgctgctcgacgaaccggccgcgcgcctggccgaagccttcgccggcatccgcctgcatcggccgcgcgtgccctacctgagcagcagccgggcgcgcctggtcgccgaaccggccgcgctggccgacgatctcgccggcaacatggcgcgccgcgtcgagtggctggcgacattgcgcagcgcctacgagcgcggtgcccgcctgcatctcgagctgccgccgggacgggtcctcagcggtctggcgcggcctctgttcggctgcgccacgccggccttcgaaggctcccgggcggataccctggacgcgctgttgcgcgaggaggaaaagagaacccgataa

SEQ ID NO: 347944 - DNA, 693 bp, Pseudomonas aeruginosa; identical to SEQ ID NO: 320938

SEQ ID NO: 347945 - DNA, 807 bp, Pseudomonas aeruginosa; identical to SEQ ID NO: 320939

SEQ ID NO: 347946 - DNA, 864 bp, Pseudomonas aeruginosa
atgactgacgtcgcccgcctgctggcgctgcgcagcttcaccgaactgggagcgcgccaacgcgcccgtgccctgcttgacgcgggcagcttccgcgagttgctcgatcccttcgccggcgtgcagtcgccctggctggaacgacagggcatcgtgccccaggccgacgatggggtagtggtcgcccgtggcctcctcgacggccagccggcggtgctcgccgccatcgaaggtgctttccagggcggcagccttggcgaagtcagcggagcgaagatcgccggcgcgctggagctggccgccgaggacaatcgcaacggcgttccgacccgggccctgctgttgctggaaaccggtggcgtgcgcctgcaggaagccaacctcggactggcggcgatcgccgagatccaggcggccatcgtcgatctgcagcgctaccagccggtggtggcggtgattgccgggccggtcggctgcttcggcggcatgtccatcgccgccgggctgtgcagctacgtgctggtgacccgcgaggcgcgcctcggcttgaacggtccgcaggtgatcgaacaggaggccggcatcgctgaatacgactcgcgcgaccggccgttcatctggagcctcaccggcggcgagcagcgcttcgccagcggtctcgccgatgcctacctggccgacgacctcgatgaggtacgcacctcggtactcgcgtatttcgccaagggcctgccggcacggccgcgctgccgccgcgccgaggattacctgcggcggctgagcgacctcgataccgccgagcaaccggatgccgccggcgtgcgccggctgtaccaggggctgggccaaggagatgcaacatga

SEQ ID NO: 347947 - DNA, 300 bp, Pseudomonas aeruginosa
atggaaaccctgaccttcgaatttcccgccggcgctccggcgcgcggtcgcgccctggccggctgcgtcggctccggcgacctggaggtgctgctcgagccggccgccggaggcgcgctgagcatccaggtggtgacctcggtaaacggcagcggcccgcgctggcaacaactcttcgcgcgggtcttcgcggcgcccacggcgccggccgcgtcgatccgcatccacgatttcggcgccactcccggggtggtccgcctgcgcctggagcaggcactggaggaggctggccatgactga

SEQ ID NO: 347948 - DNA, 882 bp, Pseudomonas aeruginosa
atgaacgccatcgcgaacctcgcggcgacgccgtgcgccgacctcggcgaatgcctggccgacctggcggtggacgccctcatcgacgaagccgaactgtcgcccaagccggccctggtggaccgccgcggcaatggcgcgcatgccgacctgcacctgggcctgatgcaggcctcggcgctgagcctgtggccgtgtttcaaggaaatggccgacgccgcccagcggcatgggcgcatcgatgcgcgcctgcgcggcgtccttggccaactggggcgcgacggcgaggcggcgatgctgcgtaccaccgaaggcgtgaacacccatcgcggagcgatctgggcgctcggcctgctggtcgcggccgccgctctcgaaccgcgccgcacgcaggccggcgaagtggccgcgcgcgcaggacgcatcgccctgctcgacgatccggcggccgccatcggcgacagccacggcgagcgcgtccgtcggcgctacggcgtcggcggcgcccgcgaggaggcgcgtctcggcttcccccgcgcagtgcgccacggcctgccgcagctatggcgcagccgcgaaggcggcgctggcgagcagaacgccaggctcgatgcgctgctggcgatcatgagcgtcctcgacgatacctgcgtgctgcaccgcgccggccgcgtcggcctcgccgtgatgcaggatggcgcccgcgcggtgcttgccgccggcggcagcgccagtctcgccgggcgtcgccgcctgtgcgagctggaccgccgcctgctggcgctgaacgcttcgcccggcggcgccgccgacctgctggccgcctgtcttttcctcgatcgcctgcccgccgtgtccggtgggtgggctgggagtctctga

SEQ ID NO: 347949 - DNA, 1665 bp, Pseudomonas aeruginosa
atgacgacaccgatctctcccccgccgcagtggtcgcggcgccgccaggaaaagcagcggcgcctcgagcgcgtgcgcggcctggctgacggcgcggtgctgccgcgcgaacgcctggtcgccgcgctggaggcgctgatcgcgccgggcgatcgggtggtgctggaaggcaacaaccagaagcaggcggatttcctctcccgttcgctggcgcgggtcgatcccggcaagctgcacgacctgcacatgatcatgcccagcgtcggccgcccggagcatctcgacctgttcgaactgggcatcgcgcgcaagctcgacttctccttctccggcccgcagagcttgcgcatcggccagttgctcgaagacggcctgctggagatcggcgcgatccacacctacatcgagctgtacgcgcggctggtggtcgacctgatccccaacgtggcgctggtcgccggtttcgtcgccgaccgcgaaggcaacgtgtacaccgggccgagcacggaagacaccccggcgctggtggagcccaccgcgttcagcgacggcatcgtcatcgtccaggtcaaccgtatcgtcgacgacccgcgcgacctgccgcgagtggatatcccggcgtcctgggtggacttcgtggtcgaggccgaccagccgttctacatcgagccgctgttcacccgcgacccgcgccacatcaagccggtccacgtgctgatggcgatgatggcgatccgcggcatctaccagcggcacaacgtgcagtcgctgaaccacggcatcggcttcaacaccgcggccatcgagctgatcctgccgacctacggcgagtccctcggcctgaagggcaagatctgccgacactggaccctcaacccgcacccgacccttatccccgccatcgagagcggctgggtcgagagcgtgcactgcttcggcaccgagctgggcatggagggctacatcgcccagcgtcccgacgtgttcttcaccggtcgcgacggctcgctgcgttccaatcggatgttctgccaactggcaggacaatacgccgtcgacctgttcatcggcgctaccctccaggtcgacggcgacggccattcctccaccgtcacccgcggacgcctggccggtttcggcggcgccccgaacatgggccacgacccgcgcggccggcgccactcgacgccggcctggctggacatgcggggcgaatccgaggccttgctggagcgcggcaggaagctggtggtgcagatggtcgagaccttccaggacggcggcaagccgaccttcgtcgagcgtctcgacgcgctggaggtggcgcgccagaccggcatgccgctggcgccggtgatgatctatggcgacgacgtcacccatgtgctcaccgaggaaggcatcgcctacctgtacaaggcgcgctccctggaggaacgtcaggcgatgatcgcggcggtggcggggatcagtccgatcggcctgcgccacgatccgcgcgagacccagcggatgcgccgcgaagggctgatcgcgctgcccgaggacctcggcatccgccgcaccgacgcctcgcgcgagctgctggcggcgaagagcatcgccgagctggtcgagtggtccggcgggctgtaccagccgccggcgcgtttcaggagctggtga

SEQ ID NO: 347950 - DNA, 582 bp, Pseudomonas aeruginosa
atgcacagcgaacgcgtccgttatgtgttggtgcccggttggtacggctcggaagacgcccattggcaaagtcactggcagcgcgcgctgcccaatgcctcacgggtcgagcaacaggactggatcaccccgctgcgcgccgactggatcgccgagctggacgccgagatccgccgccagcccgggccggtggtgctgatcgcgcacagcctgggttgtgtgacagtggcgctgtgggcggcccaggccgagcgccgggtgcgcgaccaggtacgcggcgccctgctggtggcgccggccgacgtcgagcgcgagagctgcgccgaggcgctgcgcaacttcgcgccgatcagccgcgagccgttgccgttccccagcgtgctggtgggttccgacaacgaccaggcctgcagcccgcagcgcgccatgcacctggcccgcgcctggggcgcggagacggtgatcctgcccgaggccgggcacatcaacgtgaagtccggccacggcgcctgggaggccggctaccgtcacctgttccgcttgcagtacctgatcgacagccaggctcgtcgccgcgcctga

SEQ ID NO: 347951 - DNA, 402 bp, Pseudomonas aeruginosa
atggccttctcgacccaggacagcgacgaagtcctttccgaaatcaacgtcaccccgctggtcgacgtgatgttggtgctgctggtggtgttcatcgtcaccgcgccgctgctgaccaactcgatcccgatcaacctgccgaagaccgaatcggtggccccgccggagcagaaggatcccctggtggtgagcatcgatggcgccggcaagctgttcgtcaacaaggacgagatccagccggagctgctggagagcaacctggccgcggccaaggcgaaggacgccgaggtccgcgtgcagttgcaggccgacgaaggggtgaactacggccaggtggcgaaggccatggcttccatcgagcgcgccgggatcaccaggctggcggtgatcaccgcacgctga

SEQ ID NO: 347952 - DNA, 720 bp, Pseudomonas aeruginosa
atgagtctgttaaccaccccgctcgaatccgtcgaaggcgccgtcatctggctgctggtcggcttttccgtggtcacctggggcctggccctggtcaagggcgtgcagttcgcccggcagaagcgccaggaccggcagttccagaagcagttctggagcgccaccagcctcgactccgccggcgagcaggcgcaggacaagcagggcgccggcgcccgcgtggcccaggccggcttcgccgcgatccaggtgcaggacaacggccagcccgacctggcccagtcgatcaaccaccaggaccgtctcgaacgcgccctgcgccagcagatccagcgcgagcggcgttccctggagtcgggcctggcggtgctcgcctcgatcggctcgacctcgcccttcatcggtctgttcggcaccgtctggggcatcatggaggcgctcaaggggatcagcgcggccggctcggcgagcctggagaccgtggccgggccgatcggcagcgcgctgatcgccaccggcgtgggaatcgccgtcgcggtgccggcggtgctggtctacaactacttcctgcggcgcctgaagctgaccgccgccgacctcgacgacttcgcccacgacttctacagcctggcgcagaagagcgcgttccgcgtcatcgtccatccctccgccgcgcgccaggccggcaacccctcgcgcaacgtgaaggaggcgtcctga

SEQ ID NO: 347953 - DNA, 813 bp, Pseudomonas aeruginosa
atggcaacaccccagcccgtcgatgcccgcacgcagccctggcgcgagacgcccggcggcgacctggtggcgctcggtcggccggttcgccaggcgttgcacctggttcgccacaacccggcacagggtcgggtgctcagccggcgcgagacgatcctgctggtcctgttcgccctgaccctgcacggagcggtgatccattggctgagccagcagagaaccccggcgctgcccgaggtgccgccacaggtgccgccgatgaccatcgagttcaccgccccggcgccgccggtggtggaaccgccgccgcccgagccgttgccgccggtggtcgaggaaccgccaccaccggtgatcgacgagaacgcggtgaagccgccgccgccgaagccggtgccaaagccgaaacccaagcccaagccgcaaccccggcccaagccggcgccgaaggccgtcgagccggctccgcccgcgccgccgcaacccgccgcgccacccgccccgccggcgccggccgccgccccggcgccgctgacgccgccgtcggcgaacgccggctacctgcacaacccggcgccggaataccccgccctggccatgcgccgcggctgggagggcaccgtgctgttgcgggtgcatgtcctcgccagcggcagcccgagcgagatccaggtgcagaagtcgagcggacgcgaagccctcgaccaggccgcggtgaaagcggtcaagcgctggtccttcgttcccgccaagcgcggcgacaaggccgaggacggctgggtcagcgtaccgatcgatttcaagttgaactga

SEQ ID NO: 347954 - DNA, 1437 bp, Pseudomonas aeruginosa
atgagcatgaacctggtcaccctcctgtacctcatcgcctcggtctgcttcatccaggccctgaaaggcctgtcgcacccgaccacctcgcgccgcggcaacctcttcggcatggtcggcatggccatcgccgtggccaccaccgtcggcctggtgttcaagctgggcgcggagatcgccaccaccggcgtcggctacatcgtcgtcggcctgctggtcggcggtaccgccggctcgatcatggccaagcgcgtcgagatgaccaagatgcccgagctggtcgccttcatgcacagcatgatcggcctggccgcggtgttcatcgccatcgccgcggtggtcgagccgcagtcgctggggatcgtcgcgcacctgggcgacaccattcccaccggcaaccgcctggagctgttcctcggcgcggccatcggcgccatcaccttctccggttcggtgatcgccttcggcaagctctccggcaagtacaagtttcgcctgttccagggcaccccggtgcagttctccgggcagcacctgctgaacctggtgctcggcctggcaaccctcggcctgggcctggtgttcatgttcaccggcaacctcaccgccttcgccgtgatgctggcgctggccttcgtcctcggcgtgctgatcatcatccccatcggcggcgccgacatgccggtggtggtgtcgatgctcaactcctattccggctgggccgcggcgggtatcggcttctcgctgaacaactcgatgctgatcatcgccggctcgctggtcggctcctcgggcgcgatcctctcctacatcatgtgcaaggcgatgaaccgctcgttcttcaacgtcatcctcggcggcttcggcgccgaagccgacgccggcggcccggcgggctccaaggagcagcgtccggtgaagtccggttcggccgacgatgcctcgttcctgctgaccaacgccgacagcgtgatcatcgtccccggctacggcctggcggtggcccgtgcccagcacgcgctgatggaactggcggagaagctgacccatcgcggggtcaccgtgaagttcgccatccacccggtcgccgggcgcatgccggggcacatgaacgtgctgctggccgaggccgaggtgccctacgagcaggtgttcgagatggaggacatcaactccgagttcggccagaccgacgtggtcctggtgctcggtgccaacgacgtggtcaacccggcggcgaagaacgatccgaagtcgcccatcgccggcatgccgatcctcgaggcctacaaggccaagaccgtgatcgtcaacaagcgctccatggccagcggctacgccggcctggacaacgagctgttctacctggacaagaccatgatggtgttcggcgacgccaagaaagtcatcgaagacatggtcaaggcggtggagtga

SEQ ID NO: 347955 - DNA, 309 bp, Pseudomonas aeruginosa
atggatatcatttctgacgggatctacaacctgatcatcttcgtgctggccgtgtacgtcggctaccacgtggtatggaacgtcacccctgccttgcacaccccgctgatggcggtgaccaacgcgatttccgcgatcgtcatcgtcggcgccatgctcgccgccgccctgaccgtgaccccgctgggcaaggccatgggcaccctcgccgtggccctggccgcggtcaatgtgttcggtggcttcctggtcacccggcgcatgctggaaatgttcaagaagaaagcgccgaaggcggggggccactga

SEQ ID NO: 347956 - DNA, 1119 bp, Pseudomonas aeruginosa
gtgcagatcggtgtccccctcgagacccatgccggtgagacgcgggtttccgccaccccggaaaccgtcaagaagctgatcggccaaggccaccaggtgatcgtccagagcggcgccggcgtcaacgccagccagccggacagtgcctatgaagccgccggcgcgacgatcggcagcgccgccgaggccttcggcgccgacctggtgctgaaggtggtcgcgcccagcgccgccgagctggcccagatgaaaagcggtgccgtgctggtcggcatgctcaaccccttcgacaacgagaacatcgcccgcatggccgagcgcggcatcaccgccttcgccctcgaggccgcgccgcgtacctcgcgggcgcagagcctggacgtgctctcctcgcaggccaacatcgccggctacaaggcggtgatgctcgccgccaaccactacccgcgcttcatgccgatgctgatgaccgccgccggcaccgtgaaggccgcccgcgtgctgatcctcggcgccggcgtcgccggcctgcaggcgatcgccacggccaagcgcctgggcgcggtgatcgaggcttccgacgtgcgtccggcggtgaaggagcagatcgagtcgctcggcgccaagttcgtcgacgtgccctacgagaccgacgaagagcgcgagtgcgccgaaggcgtcggcggctacgcgcggccgatgccggcctcgtggatggagcgccaggccaaggccgtgcacgagcgcgccaagcagtcggacatcgtcatcaccaccgcgctgatccccggccgcaaggcgccgacgctgctgcacgaggcgaccgtggcggagatgaagccgggctcggtggtcatcgacctggccgccgcccagggcggcaactgcccgctgaccgaggccgaccaggtcgtggtccggcacggcgtgaccatcgtcggccacagcaacctggccgcgctggtaccggcggacgcctcggcgctatacgcacgcaacatcctcgatttcctcaagctcaccctgaacgccgaaggcttcagcgtgaacctcgaggacgacatcgtcgccgcctgcctgatgtgccgcgacggccaggcggtgcgcaagaacggctga

SEQ ID NO: 347957 - DNA, 900 bp, Pseudomonas aeruginosa; identical to SEQ ID NO: 320952

SEQ ID NO: 347958 - DNA, 903 bp, Pseudomonas aeruginosa
atgagcaatgcagcacaagccctcgccacgccggtacggctcgacatccggccggtcgccggacggatcggcgcggagattcgcggcgtgaccctgtccggcgaactggacgccgccaccgtcgaggcgatccaggccgccctggtacgccacaaggtgatcttcttccgggaccagagccatctcgacgaccagacccaggaggccttcgcccacttgctcggcgaaccggtcgcccaccccaccgtgccgtcccgcgaaggcacccgcttcctcctcgagctggatggcgccgaaggccgccgggccaactcctggcataccgacgtgaccttcgtcgaggcctacccgaaggcctcgatcctgcgcagcgtggtggccccggagtccggcggcgacaccgtctgggccaacacggcgagcgcctacgccgacctgccggcggagctgcgcgagctggccgaccggctctgggcggtgcacagcaacgagtacgactacgccggggtcaagcccagcgcctcggtggagcagttggagaactaccgcaaggtgttcacctcgaccgtctacgagaccgagcacccggtggtccgcgtgcatccgcaaagcggcgagcggacgctgctcctcggccacttcgtgaaacgcctgaagggtctttcgcagcatgactcggcgcatctcttcgcggtgctgcaggggcacgtcacgcgcctggagaacaccgtgcgctggcgctggcaggccggcgacgtggcgatctgggacaaccgcgcgacccagcactacgcgatcgacgactacggcgaccagccgcgcgtggtgcgccgggtgaccctcggcggcgacgtgccggtaggcatcgacgggcaacgcagccggacgatccggaaggcatga

SEQ ID NO: 347959 - DNA, 2373 bp, Pseudomonas aeruginosa
atgaagcaccactaccgcctgccgctccgccgaacgccgcccggcggctccgactacgccctggccctgctgctcgccctcggcggtgcgttgccggccagtgccgccgatgctcccgcgcccgccgaggaagcgccgccgctggccagcagcctcccggacaaggccgatacggccctgggcaaggtcactgtcaccgcgcgtcgccgcgaggaggattcgcagaaggtaccgacgccgatcaccgtgctcggcggcgagactctcgaggcccagcgcatctcccgggtgcaggacctgcagcaggtgctgcccagcgtcaatgtcgcctacatccatgcgcggcagtcgagcgtcgccgtgcgcggcatcggcaacaaccccgccagcgacggcctggaaggcagcgccgggatctacctcgacaacgtctacctgggacgtccgggaatggccgtgttcgacctgctggacatcgagcaactggagctgctgcgcggtccgcagggcaccctgttcggcaagaacaccaccgccggggtgctgaacatcagcacccgcgcgccgaccttcactgccgagcgtaccgtcgaggtctccggcgggcaggatggctacttccagggccgcggcacggtttccgggccgctcggcgaaaccctcgccggacgcctctcggcctatcgcacccgcgacgacggctacatcaagaacatccacgacgacaactatctcaacggcggcgagcgccagggcgcgcgcgggcaattgctgttcgagccgaacgaggacttcagcctgcgctggatcgccgactacaacgaggaggattcgagcaacggcagcatggtggtctacggcggcgccgagcgtttctggcagcgcgccgcgctggtcggcgcttcgccgttgcgcgatccgcagcgcaggaaggtcaacatcaacggccgccagcacgtcagcgtgcaccagggtggcagctcgctggaggccaactggaacctcgccggcggctaccgcctgacctccatcagcgcctaccgctactggcacttcaccccggccaacgacgagcaactgaacgtctcggcgatcaacgacaccggggtggaagtgcacgaccggcagttctcccaggagatccgcctggcctcgcccaccggcggtgccttcgactacgtggtgggcgcctacgcgttcaggcagaacctcggcaacaagaccttcacctcctacggaccgttggccgacctgtacctgctcggcgccaatctcggcgcgctgaacgacacctactcgaaggccaacggcaagatcgagaccgacagcttcgcgctgttcgcccagggcacctggcacctcaccgaacgcctggacttcaccgccggcctgcgtggtacctacgaggagaagaacgccaaggtcgagcgcttcgctccgctgggcggcgcggcggtcggcggggtcggcgcggcggtgcgcaacggccagctcggcgcctacgattccggcgatctcagccagtacaacttcgccccttcggcgttgctcagcctcagctaccagttcagcgacgacctgctcggctacgccagcctgtcccacggcgagaagtccggcggggtcaacctggcggtgggcagcgcaccgagcgccggcgccgattcgctgctggtcggaccggagcgcgccaacgacgccgagctgggcctgaagagcacgctcttcgaccggcgcctgctgctcaacgccaacctgttctggaccggcatccacggctaccaggccaccaccctgtaccaggcgccgggctcgacccagttggtgcaggtgctggccaacgccggcagcgtgcgctcgcgtggtctggagttcgaggccaccgcgctgccgttgcgcggcctgaccctgaacttcaacggctcctataacgacgtcacctacctgtcgttcaaggatgccccgtgccctgcggaagtcagcacccggcccggcgcgccgagcagttgcgacctcaccgggcagcgcgtggtcggcgcctcgaaatggatcgccaatctcaatggcgaataccagtggcgcctcgacgaccgcttccaaccctacgtcagcgccagctacgcctaccgctccgccgccgagggcacgctggacaactccgacctttcgaagatcgacggctacgccctggtgaacctcgccgccggtctgcgcagcgatctcggcgacggccaactggacacctcggtatggctgaagaacgccttcgacaaggactactacctgagcgccttcgccagcatcaacggctcctacaccgcatcggtggggcagccgcgcacgctcggcgtatcgctgcgctacgacttctga

SEQ ID NO: 347960 - DNA, 918 bp, Pseudomonas aeruginosa
atggatctgcgccaactgcgttacttcatcgccctcgccgaacaccgcagtttcgtccgcgcggcggacgccatgggcatcacccagccggccttcagccgcagcatccagggcctggagcaggagcttggctgtcagttggtggaccgtggcagcaaggacctgcgcccgacgccggaaggccaggtggtgctgcaacacgcgctgagcctggtgcaggggtcggccaacctgatccacgagatcgcccagttgaacaagctggatgccggcgagctgcgcttcggcagcgggccggcgccggcccagcaactggtgccggacgcggtggccgacttcatcaaccgccacccgcgggtgcagatcagcctggacgtggacaactgggaaaagctcagccgcgccctgctccgcgaagagatcgaattcttcgtcgccgacatccgcgacttcgaggccgacccgaacttccagacgcgcccgctgaccccgcgccgcggccagttcttctgccgtccgcaacatccgctgctgggcaaggacagcctgtccaccaacgacctgttcaactacccgctggcctcgaccctgattcccccgggcatccgcaagctgctggcgaacctcagcggcaagatcgacttcgccgccaacatccgctgcgagaacatgcacgcgctgatccgtatcgtccgccagaccgacgccatcggcatcgccagcgacgagaccctgcgcccctacctgcagcgcggcgaactgcaaccgctacagtggcgcaacctgccgcagaacctggatagcctcagcgcccgctgcggcatcatcagccgcagcggctaccggctttcggcagcggcgaaggcgatgatcgagacgctggtggaactggaccaggcgcaacacgcggcggcctga

SEQ ID NO: 347961 - DNA, 726 bp, Pseudomonas aeruginosa; identical to SEQ ID NO: 320956

SEQ ID NO: 347962 - DNA, 1359 bp, Pseudomonas aeruginosa
atgcaaaatctcagacgcgctgtattcgccggcctggtcgccggcacgctttccgaaggggcggccgcgacggccggggatgggggcttcgtcgaggacagcgaactgcagttcctcgctcgcacctactacttcaaccgcgactaccgcgacagcccgaacaacgccgggcgcaaccgcttcaagcccaggagcgagcgcaacggctaccgcgaggaagccacccagggcctgcgcctccagttcgcctccggctacacgccgggcagcctcggcttcggcctcgacgcccatgccatgctcggcctgcaactggacagcggcggcggccgcaccggcaccggcaacctgccggtcggcgccgacggccatcccgaccatcgctacggcaaggtcggtggcgccctcaggctacgccacggcgaaacccgcctgaagtacggccagaccaccaccagcgcgccggtgttcgccgccagcagcaaccgcacgctggccggcatggcctacggcctgctgctggaggaccgctcgttcgacgggctgctgctcgagggcgggcgcttcaccgccgcctccggccccggcgaatccaaggtccgcggcgacatcagcaccgtctacggacgcctcggcgcctatccggtgcgcctcgacgcggtcggcttcctcggcggtcaatggcaggccacggagcggctgcaactgtcgctctacgcctcgcgcttcgacgacatctggcagcaggcctatttcggcgccagccatcgccagccgctgggcggggagcgcgcgctgcgggtcgacctcgacgcctaccgcacccgcgacagcggccagagccgcttcggccgcatcgacaccctggccagctccctggccctgggctacgaacaggggccgcagcgcatcaccctggcctaccagcgtgtccatggcgagcagccgttcgactacatggccttcggcgacgggcgctccagcgcgtccatggtactggccaactcggtgggctactccgacttcaacggaccgggcgagcgttcctggcaattacgctatgacctggacctcggcgcgctcggcctgcctgggctcagcctgcatgcgctgcatgcccgcggccgtgccggggccagcgccagcagtgccgccgagagcatctacgccggactctacgggcgtgacgggcggcaccgggaaagcgacctcggcttcgcctatcgggtcaaggcgggccccctcgccggcctcgcgctgcgcgcctcgcaggcctggcaccggggcaacgcgagctatctcgacggcgacatcgacgaaacccggctggtcgtcgattactcccgctcgatctggtga

SEQ ID NO: 347963 - DNA, 882 bp, Pseudomonas aeruginosa
gtgatcgcacagttcgtcgcggtggtgctgccgatcctgatctgcaccgggatcggtttcgcctggagccgttccgccgggccggtggatacccgcgcgctggtgttcctggtggccaacgtcggctttccctgcctgctgctgtcgtcgctggaccgccccggcctgtccattggcatggtggccggggtgttcctcgccaccgcgctggcggtgctggcgttcgccctgctgggcctggtcgccctgcgcctgctgcggatgccggtgcggcgctacctgccgtcgatcatgctgccgaactccgggaacatgggcatccccatcgcctacctggccttcggcgaggaggcgctggtgtatgcggtggcgttctccaccctgatccaggtgggtcacgcgacgctcggcgtctggttcgcttcgggcgatatcaccccggcgagcatcctgcgcaacccgatgatctatgccctggccgtggcgctgggcctgatcgccctgggctggagcctgccgccgccgttgcgcgatgtgacccgcctgctgggtgggattaccgtgccgctgatgctggtgatgctcggcctgtcgctggccggtctgcgcctgcacgagacctggcggccgttgctgctgtctctggtgcgggtctggggcggtttcgcggtcggctatgggatcgctgccggcctgggcatggaggcggtggcggcgggcaccttcgccatccagtgcgggatgccgaccgcggtgctcacctacctgttggccaagcgttacgacggaccggtgaacgaagtggcaggcatggtgctgatcaccacgctgctggtgctgctctccacgcctttgttcatccagttgctgccgcgcgcgtga

SEQ ID NO: 347964 - DNA, 816 bp, Pseudomonas aeruginosa
atgaatctcgatagcaaattgttcgacgcgacactcgatctcgaacgcgtgaaagtttcggtgagaacgctggtgaagttatcccgccaggaacaatcggcgatcatccggaccctcaacgagtttggtttcctgctgttgcgcagcgaacacggcgaagacaggcaggaacttctcgcgctcaaggagttgttcggccgcgccgccccccacccgcgcgccgacgccgacggcatcgtgccgatcagcaatgcgcggtatgtcagcggctacctcggctccacgccgctggagcacaagctgcacaccgacggcgctttcctcgacaccccggagcaattgtgcagcctgcaatgcgtgcgcaacgcccgggagggcggggagaccctgctggccagcgccggactggccttcgagcgcctgcgccggcgcatgccgaccaagcatctcggcctgctgcgcggcgacgccctgaccatcgtgcgcaagcaccagagcagcacccagccggtgttccgcctgaacggcgaggcgctgggcatcaagttccggcagaacgacggggcggccgaggtggtcgagcaccctgtggcggtggaggccttcgccgaactggtggcggcgctcgaggatccggcctgccaactgcggatcaagctcgaaccgggggaaatcctggtgctcgacaacaccgcggtgttgcacgggcgcaccgccttctgcgccaacgaactgcgcgaaatgcgccggctcaacttcgacggccacggccgcctgcgggcggagctggaactgggcttcaaggtggggttgtga

SEQ ID NO: 347965 - DNA, 1062 bp, Pseudomonas aeruginosa
atgaaagcgcttacgtcttccctgctcggtctgttcgccgcgcctgtgctcgccggcctgctcggtgcctacgtgccgctggcgagcgccgctccgccgaaggaaatccgcatcgcggtgccggacgtcagcgccggcagttcgcactcgggcggcggcgtggtcgacgtgctctacacccgccagttgctggagaaggagttcgccaacgacggcatcgcggtgaaatggagcttcttcaagggcgccggcccggtggtcaacgaagcgttcgccaacggccaggtggacttcgcctacctcggcgacctggcggcgatcatcggcaagtccggaggcctggacagccgcctgctggccgctaccgcgcgaggggtcaaccactatctcggcgtgcagccgggctccgggatcaagaccctggaggatctcaagggcaagcgcgtaggcatcttccgtggcaccgccagccagttgtcgttcgacaatgccctggccagcgtcggtctcagcgagaaggacctgaaggtgatcaacctcgatttcagcgccgccctgtccgccctcgcagccaggcagatcgatgccacctggggcctggccggactgttcgccctgcgcgaccgcgggctcgcggaaattccgctgagcacccgcgacctgaacggcgccggcaccctgcaggcgctgctggtcggctccggagccttcgtcgatgcccatccggacatcaccgagcggctgctcaaggtgcagttgcaggcccaggactggctggcccgcgaggagaaccgcgacgcctacatcgaactggtgtcgaagcaggccagctacccggtggtgatcctgcagagcgagtaccgtggccgcaagctgggcgacgccctgtcgccgcgcctggacgccgatttccttggccggctggatgcttcgatccaggcggccaagcgtttcggcctgatccgtcgcgaattcagcgccgagcagtgggccgcgccggaactgctggaggcggccggcaagctggcgaaggccaaggccgtggcgcaggcggcggagtga

SEQ ID NO: 347966 - DNA, 1617 bp, Pseudomonas aeruginosa
atgaagaatatcgataaaaccctttcgcccgcctggagccggcccctgccgcgcctggcgccgccgccctccgcggctttcgcccggcgcctgggggacggcctgctgccctggttgctgccgctcgggctggcgctgctgtggtgggtcgccagccatcgccactggatgtcggcccaggtgctgccaactcccgagctggtctggcagagcgcccgcgagttgctcgccggcgaactctggagcgaattggcgatcagcctgcggcgcctggcctggggcctgctcgccggggtcgccagcggcgccgcgctaggcgcctggctgggcttcagtccgcgtgccgagcgcctggtcttccccaccttcagcgccctcgcgcaaatccccacgctggcctggatcccgctgttcatgctgttcttcggcatcggcgaactgctcaagctggtggtgctggtgaaagcggtcgtggtgccggtgaccatccataccctggtcggcgtgcgcgacgcccagcccaagctgcgcgaagccgccgcagtactgcgcctgccgccacgcctgctggtctggcggctgatcctgccggcggcgctgccggccttcctcaccgggctgcgcctggccctggcgcagggctggacctcgctgctggcggtcgagttgctggcttccagcgagggtatcggctacctgatggtgcagggccggcaactgttcatgctcgacatcgtgttcgtctgcatcctcatcatcggcctggtcggggtgggcatggaccgcgccatccagtggctcgaccgccgcctgctgcactggccgcaagccgccaccggcgaattccgccggcgcccgccgggacgcggctggcagcgcctgcaggtgtggctgccgccgctggcgctgctgctcctgtggcagtcggcgagcagcgccgaatgggtcgatccggcgatcctcgccagccctctggaagtggcgcgggcgacctggagcggagcgctcgacggcagcctcccaggcgccctgttcgacagcctgaagcgcacgctcggcgggctcctgctgggcggcggcctgggtttcctcggcggcctgctgctcggcctgtggcgcccggcggaacgcttcttcggccccactttcgcggcactgcggcaggtggcgatcttcgcctgggtaccgctgctcaccgcctggttcggcctgggcgaaccggccaagctgacgttcgtcgcaatcgccgccttcttcccgctgctgctggccacccagcgcggcatcgccagcctgccgccgagcctcggcgaggcggcccgggtgctgcgcctgggtccctggcgacggctgctccggctggtcctgccgggtgccgccccgtcggtgttcgccggcctgcgcctggcgctgatctacgcctggctgggaaccatcggcgccgagtacttcatgccctccgacggcggcatcggcagcctgatgatcggcgcccagcaattgttccgcatggacctgatcggcgccggcatgctcctggtcggcctcaccggcgccctgctcaatgccctcggccaacgcatcgaagcgcgcgccacgcgctggagacacgcatga

SEQ ID NO: 347967 - DNA, 840 bp, Pseudomonas aeruginosa
atgaacgcattcgccgcgcccgccacgggcaccccgctggtcagcttccgccaggtgcgcaagcacttcgccgtggacggccggcgactggaagcgatccagcagttcgacctggagatcggcgagggcgagttcatcgccatcgtcggcgccagtggctgcggcaagtcgaccctgctgcgcctgctgatcggcctggaccgcgactacgacggcgagatccgcgtcgacggccggccaatcgccggcatcggcggcgaacgcggcatcgtgttccaggagcaccgcctgttcccctggctgacggtgcagcagaacgtcgccctcggcctggtcaacgaagcccttggcgaaaccgacaaggcggcgcggatcgacgaatacatccgcctggtcggcctgcacggcttcgagcgtgcctacccgcaccagttgtccggcggcatggcccagcgcgtggcgatcgcccgtggcctggtggccagcccgcgcctgctgctgctcgacgagccgttcagcgccctcgacgcactgacccgccagcagttgcaggaagagttgctggcgatccgccggcgcacccgtatcaccaccctgctggtcacccacgacgtcgaggaggcgctctacctggccgaccgggtggtggtgatggagccgcgtccggggcggatcaggcgggtggtcgaggtgggcctggcgcatccgcgcgagcgcggtggcttcgacttcctgcgccagcgcgaagcgctgctgcacgaactgaccgccgacggcgagtacgtcgcgccgccgccgcgacgggtggaaaacctgcccttcgaattcatcgcttgctga

SEQ ID NO: 347968 - DNA, 1611 bp, Pseudomonas aeruginosa
atgagcaaacgccccaacttcctggtgatcgtcgccgacgacctgggcttctccgatatcggcgccttcggcggcgagatcgccacgccgaacctcgacgccctggccatcgccggcctgcgcctgaccgacttccacaccgcctcgacctgctcgccgacccgctcgatgctgctcaccggcaccgaccaccacatcgccgggatcggcaccatggccgaggcgctgaccccggaactggaaggcaagccgggttacgaagggcatctcaacgagcgcgtggtggcgctgccggagctgctccgcgaggccggctaccagaccctcatggccggcaagtggcacctcggtctgaagccggaacagacgccccatgcacgcggtttcgagcgttccttctcgctgctgccgggcgccgccaaccactatggtttcgagccgccctacgacgaaagcactccgcgcatcctcaagggtacgccagcgctctacgtggaagacgagcgctacctcgacacgctgccggagggcttctattcctccgacgccttcggcgacaagctgctgcaatacctcaaggagcgcgaccagagccggccgttcttcgcctacctgccgttctccgcgccgcactggccgctgcaagcgccgcgggagatcgtcgagaagtaccgcggtcgctacgacgccggtccagaagcgctgcgccaggaacgcctggcccggctcaaggagctgggcctggtggaagcggacgtcgaagcccatccggtgctcgccctgacccgcgagtgggaggccctggaggacgaggaacgggctaagtcggcgcgggcgatggaggtctatgcggcgatggtcgagcgcatggactggaacatcggcagggtcgtggactacctgcgccggcagggcgagctggacaacaccttcgtcctgttcatgtccgacaacggcgccgaaggcgccctgctggaggcgttcccgaaattcggcccggacctgctgggctttctcgaccggcactacgacaacagcctggaaaacatcggccgcgccaattcctacgtctggtatggcccgcgctgggcccaggcggccaccgcaccatcgcgcctgtacaaggcgttcacaacccagggcgggattcgcgtgccagcgctggtgcgctacccgcggctaagccggcagggtgcgatcagccatgccttcgccacggtgatggacgtcaccccgaccatcctcgacctcgccggtgtccgccacccaggcaagcgctggcgcggccgcgagatcgccgagccgcgcggcaggtcttggctgggttggctttccggcgagaccgaggcggcccacgacgagaacaccgtgaccggctgggagctgttcggcatgcgtgcgatccgccagggcgactggaaggcggtgtacctgccggccccggtgggcccggccacctggcagctctacgacctggcccgcgacccgggcgagatccacgacctcgctgacagccagccgggcaagctggcggagctgatcgagcattggaagcgatacgtcagcgagaccggtgtcgtagagggggcttcgcctttcctggtgcgataa

SEQ ID NO: 347969 - DNA, 753 bp, Pseudomonas aeruginosa
atgtccgtatcctctgcatccctcgccggcaaagtcgccttcgtccagggcggttcccgcggcatcggcgccgccatcgttcgccggctggccgccgaaggcgccagcgtcgccttcacctacgtcagctcggcggacaagtcccgggccctggcggccgaactcgaaggcgccggagccagcatcctggccctgcatgccgatagcgccgacgcggccgcgctcgtcgccgccgtcgacgaagcggcggctcgcttcggacgcatcgacatcctggtcaacaacgccgccgtcctcgccctcggttcggtggaagagctgccgctggccgacttcgagcggaccctggcgatcaacgtgcgcagcgtcttcgtcgccacccaggcggcggtcaagcacatgggcgacggcgggcgggtgatcagcatcggcagcaccaatgccgaacgcatgccgttcgccggcggcgccacctacgcgatgagcaagtcggcgctggtcggcctgaccaagggcctggcccgcgacctcggcccgcgcgggatcacggtgaacaacgtgcagccgggtccggtggataccgacatgaacccggacgacggcgacttcgccgaggccctcaagggcctgatggcgctgccgcgctacgcccgcagcgaggaaatcgccagcttcgtcgcctacttggccgggccggaagcggcctacatcaccggggccagcctgaccatcgatggcggtttctcggcctga

SEQ ID NO: 347970 - DNA, 933 bp, Pseudomonas aeruginosa
atggaaaccctcagcaacatccagtgcttcgtccgcagcgccgaggccggtagcttcgccgaggccgccaggcgcctgggcctgacgccggccggggtgggcaagaacgtcgcccgcctggaaagcaacctcggcgtgcgcctgttccagcgcagcacccggcgcctgaccctgaccgaagccggggagcgtttcctgcaagaggtcggcggcagcctggagggcatccagaccgctctcgccaacgtctccagcgtcggcaaccaacccagcggcacgttgaaggtcagcatggggctggccttcggccgcgactacatcctgccgctgctcggcgagttcctcgaacgctatcccgacatcgtgcccgactggcatttcgacaatcgccaggtcgacctcatcggcgaaggcttcgacgccgccatcggcggtggtttcgaactgccgcccggggtggtggcgcgcaacctgacgccgggccacctgatcctcctcgcctcgcccgcctacctccgcgacaagccgccaatccgccatccaggcgacctgggcggcttcgacgggatccgcatccgctcgccgcagaccggccgcgtgcgctcctggccgctgcgccggcgcaacggcgaggaggcgccgatcgagctgcgcgaacgcatgaccatgagcgacccggaagccacctgcgaggtcgccgccatgggcctgggcatcaccctggtatgcatgcagcacgcctatgcctacctggagtccggcgccctggtgcgggtcctgccggactggtacgtcgacgccggcaacaccagcctctactacgcggcgaacaagctgctaccggccaagacccgggtcttcgtcgacttcgtcgtcgactacttccgccgccaggacctggcccggcgcttctccgccttcccaaccggctag

SEQ ID NO: 347971 - DNA, 1173 bp, Pseudomonas aeruginosa
atgcgcgagtccctcggtgtttcgttaccatcccggcccctgctgctgaagctgggcctgctttccctaccctgggcgttgtgcgccgggctgcatgccgtcggcctcggcgtctggctggtcctggcgctcggttggttcgccagcctggccatgctcgtcctcctcctgcgcgcccctcggcaagcggtagcgaatgccaacccgcaggcggatgccgcttcgccggcctggagcgcggcgcaacgggcgctcgccgacgaaaccgcgcaactggacggtcacgcccggcagatcgacgaactgctgcattcggcgatccgccagctcagcgacagcttccacggcctcgccgaacgcatcgatacccagcgcggcctgtcccattcgctgatcgagcgctacgacgggcgcggccaggtcgacgaaggcatcaacttccaggacttcgtcaggaccacccagcagaccctcagcctgttcgtcgaggctaccctggaaaccagccggacctcgcagcaactggtggaacgcatggaccaggtgcggctgaagatcaccgagatcctgcagtcgacccaggacatggacgccatcgccaagcagaccaacctgctcgccctcaacgctgccatcgaggccgcccgagccggcgagagcggccgcggcttcgccgtggtcgccgatgaagtgcgcgcgctgtcgacccgctccacggagttttccgccgccatccgcaagcacgtcgacgtggtccaccacgagatccaggacgccgagagcgcgatctcgcaactggccgacaaggacatgtccttcgccctcgattccaagcacaagatccagggcatgctcgatgacctggaggcgatgaaccggcacaccctgaaggtcatccacgaactggaccggctctcgctggaagtcggccagggcgtcgacgcggcggtcaccgccctgcaattccaggacatgggcagccagttgctcggccagatgcgcaagcaccatgcgcgtcttggcgccttcgccctcggcctcggcgcgctggaggcgcggccgcgccaggaatggcccgaacgggtcgcgcgggaggtcgaggaactgcgccggcccttgcccagcccggtgagccagaacagcgtcaacgtgggcgaagtggaattgttctga

SEQ ID NO: 347972 - DNA, 366 bp, Pseudomonas aeruginosa
atgggcaaaccgattctgatcgtcgacgactcggcgtctatccgccagatgctgagcttcaccctgaagtccgccggctacgaggtggacgaggccgcggacggcaaggaaggcctcggcaaggcccagagcaagagctacagcctggtgttcaccgaccagaacatgccgaacatggacggcctgtcgctgatccgcagcctgcgtaacctggccggctaccgcagcgtgccgatcctcatgctgaccaccgaatcgagcgacgcgatgaagcagcaggggcgcagcgccggcgccaccggctggctggtgaagccgttcgacccgccgaaactgctcgaagtgacgcgcaaggtcctgccctga

SEQ ID NO: 347973 - DNA, 1920 bp, Pseudomonas aeruginosa
atgccccaggatatgagccagtttctccaggtgttcttcgaggaaaccgaggaacacctggccaccctcgaactcctcctgatcggtctcgacctggaccggccggacagcgagacgctgcacggcatcttccgcgccgcgcattcgatcaagggttccagcggaatgttcggtttcgacgacatcaccgccgtcacccacgaactggagaccctgctcgaccgcatccgctgcggccagatgcacctgcggccggacatgatcagttccttcctcgaagcccgcgacgtgttgcagcgcctgctcgacgcccatcgcagcggcagtcccgaccccggggtgccgttactggagacggtcgagcggctgcgcggctggctgcgggtgccggagcaggaagcggcggaggaaggcttcggcctgttcgacgacgcgcccgccagggaaaccgcggacgacgatgccttcggcttcttcgacgaaggcccgggcgctccggaacgagcggccgcgccggaagcgttcgggctcttcgacgaggcgcccggcgcaccggccgcgagcgaagcgttcggcctcttcgatgaggcaccgggttccccaccggcggaggaacgcgccttcggcctgttcgacggcgcccccggcagccccgccgcgcccagtgcgcccgcgcaagccgtcgccgcgccggccaggggcgcagtcgcgcccgtgcgtggcgacggcgagtccggctcgatccgggtcagcgtggaaaagatcgacagcctgatcaacctggtcggcgaactggtgatcacccaggccatgctcggccagctcggcgagcagctcgacccgagccgccacgagcgcctgcagcacgccctggcccagctcgaacacaacacccgcgacctgcaggagtcggtgatgtcgatccgcatgctgccgatcaacttcatcttcagccgcttccccaggctggtgcgcgacaccgccacgcgcctgggcaagcaggtcgagctgcacctgcacggcgagcacaccgaactggacaagagcgtgatcgagaaactcagcgatccgctcacccacatcgtccgcaacagcatcgaccacggcatcgaaacgcccgccgaacgcctcgccgccggcaagccggcgagcggcacggtgaagctcgccgccagccaccagggcggcagcgtggtggtggaggtttccgacgacggtcgcggcctgtcgcgtccgcgtatcctcgccaaggcccgcgagcgcaacctgccggtgcatgacgggatgagcgacgccgaggtctggcaactggtgttcatgcccggcttctccaccgccgagacggtcaccgagctgtccggacgcggcgtcggcatggacgtggtgaagcgcaacatcggtgccatgggcgggcgcatcgacatcgactcggcgcccggcatgggcactcgcatcggcatccgcctgccgctgaccctggcgatcctcgacggcctgatcgtcgccgtcgaagcggtcaactacgtgattccgctgacctacatcgtcgagtcgctgcaggcgcgcagcgacgacgtgcgcggcctcggcggcgaagacaacgcgatgatccgcgtacgcggcgagtacctgccgctgttcagcctgcacgagctgttgcgcatcggcggcgaagcgccggcgccggagcagggcatcgtggtgatcctcgagtccgaggggcgcagcttcgccctgcaggtggacgaactggtcggccagcagcaggtggtgatcaagagcctggaacagaatttccgccgtgtggagggtatcgccggcgccaccatcatgggcgacggcagcgtcgccctgattctcgacgtcgatgcgctgccacgcctggcggcgcgggaggacaccgccgatgaacggcactga

SEQ ID NO: 347974 - DNA, 486 bp, Pseudomonas aeruginosa; identical to SEQ ID NO: 320969

SEQ ID NO: 347975 - DNA, 2040 bp, Pseudomonas aeruginosa
atgggtctgttcaatgcacatgcggtggcgcagcaacgcgccgaccggatcgccacgctcctccagtcgttcgccgacggccagctcgacaccgccgtcggcgaggccccggcgcccggctacgagcgtctctacgacagcctgcgggcgctgcagcggcaactgcgcgaacaacgcgccgaactccagcaggtggaaagcctggaggcggggctggcggagatgagccgccagcacgaagccggctggatcgaccagacgattcccgccgaacgcctggaaggtcgcgcggcgcgcatcgccaagggcgtcaacgaactggtggccgcgcacatcgcggtgaagatgaaggtggtcagcgtggtcaccgcctacggccagggcaacttcgagccgctgatggaccgcctgccgggcaagaaggcgcagatcaccgaagccatcgacggcgttcgcgaacgcctgcgcggggccgccgaggcgacctcggcgcaactggccacggcggcctacaacgcgcggatcaagagcgcgctggacaacgtctcggccaacgtgatgatcgccgacaacgatctcaacatcatctacatgaaccgcaccgtcagcgagatgctcggtcgcgccgaagcggatatccgcaagcaactgccgaacttcgacgccggccgcctgatgggcgccaacatcgacgtgttccacaagaatccggcgcaccagcggcacctgctggccaacctcaccggcgtgcacaaggccgagctcaacctcggcggccggcgcttctccctcgacgtggtgccagtgttcaacgacgccaacgaacgcctcggctccgccgtgcaatggaccgaccgcaccgaggaacaccgcgccgagcaggaagtctcgcaactggtgcaggcggcggccgccggcgacttcagcaagcgcgtcgaggaggccggcaaggaaggcttcttcctcaggctggcgaaggacctgaacagcctggtggataccgccgaccgcggcttgcgcgacgtctcgcggatgctcggggcgctggcccagggcgacctcacccagcgcatcgaggccgactaccagggcaccttcggccagctcaaggatttctccaacgacaccgcacaaagcctgtcgcggatgctcgggcagattcgcgaggccgccgacaccatcaacaccgccgccagcgagatcgccagcggcaacgccgaactgtcggcgcgcaccgagcagcaggcgtcgagcctggaggaaaccgcctcgagcatggaagaactgaccagcacggtgaagctcaacgccgagaatgcccgccaggccaactcgctggcggccaatgcctcggaagtggcgacccagggcggcaccgtggtgcagaaggtggtcagcaccatgtcctcgatcaacgagtcggcgcgcaagatcgccgacatcatcggggtgatcgacggcatcgccttccagaccaacatcctcgccctcaacgccgcggtcgaggcagcccgcgccggcgagcagggccgcggcttcgcggtggtcgccggggaagtgcgcaccctcgcccagcgctccgccgccgcggccaaggagatcaagacgctgatctccgactcggtggacaaggtggagaacggcaacaccctggtggcccaggccggacagaccatgagcgacatcgtggtagcgatccgccgggtcaccgacatcatgtcggagatcgccgccgcctccgccgagcagagcaccggcatcgaagaggtgaacagcgcggtctcgcagatggacgacatgacccagcagaacgccgcgctggtggaggaagccgcggccgcggccgaggccatgcaggagcaggcgggcctgctcaaccagtcggtggcggtgttcaggctggacactccgccgagcgtggtccagctcgccagcgcgcggccgtccgcgccacgccccagcgcgccggcgccgctggcccgcagcggcatggcgcgggccagcaaggcgcgcaaggaagacggctgggaagagttctga

SEQ ID NO: 347976 - DNA, 843 bp, Pseudomonas aeruginosa
atgcccacctccacgccttcgccggtgttcggcaaccaggagttccactacacccgcgaggacttccagcaagtacgcgagcggctctaccggctgaccggcatcagcctggccgagagcaaggcgcaactggtctatagccgcctctcgcggcgcctgcgcctgctgcggctcggcagcttcgccgaatatttcacccacctcgaccgcgagccgggcgagcagcagttgttcgtcaacgcgctgaccaccaacctcaccgcattcttccgcgaacgccaccacttccccctgctcgccgacctcgcccgccgccagttgcagcggcatcgcccgctgcgcatctggtcggcggcggcgagtaccggcgaggaaccctattcgatcgccatcaccctggtggaggcgctgggcagcttcgatccgccggtgaagatcgtcgcctcggacatcgataccggggtgctcgactgcgcccgccagggcgtctatccgctggagcgtctggagcagatgccggcgccgctgaagaaacgcttcttcctccgcggcaccgggcccaacgccggcaaggcgcgggtggtggaggaactgcggcaactggtggagttccgccagatcaacctgctggaggcagactggtcgatcgccggggaactcgacgcgatcttctgccgcaacgtgatgatctacttcgacaagccgacccagacccgcctgctggagcgcatggtggccctgctgcggccggagggcctgttcttcgccgggcattcggagaacttcgtccacgccagccacctggtgcgctccgtcggccagaccgtctacagcccggcctga

SEQ ID NO: 347977 - DNA, 603 bp, Pseudomonas aeruginosa; identical to SEQ ID NO: 320972

SEQ ID NO: 347978 - DNA, 1050 bp, Pseudomonas aeruginosa
atgcccatcagtgtcctggtcgtcgacgattccgccctgatccgcagcctgctcaaggagatcatccaggccgacccggagctgcgcctggtcggctgcgcgccggacgccttcgtcgcccgcgacctgatcaagcagcacgcgccggacgtgatcagcctcgacgtggaaatgccgcgaatggacggcctgaccttcctcgacaagctgatgaaggcgcggccgaccccggtgctgatgatctcctcgctcaccgagcgcggttccgaagccaccctgcgcgcgctggaactgggcgcggtggacttcatcgccaagccccggctgggcatcgccgaaggcatgcaggcctatgccgaggaaatccgcgccaagctcaagaccgtcgcccgcgcccgcctgcgccgccgtgcggcggacgcgccggcgccgccggaaagcgcggcgccgctgctcagcaccgagaagatcatcgccctcggcgcctccaccggcggcaccgaggcgctcaaggaagtgctgctcggcctgccggcgcacagtcccggggtggtcatcacccagcacatgcctcccggcttcacccgcagcttcgccgagcgcctggatcgcctgacccggctcagcgtcagcgaagcgcgcgacggcgaccgcatactgcccggccacgccctggtcgcgccgggcgaccaccacatggaggtgcagcgctccggcgccaactacgtggtgcgtttgaaccgccaggcgcaggtcaacggccaccgcccggcagtggacgtgatgttcgagtcgctggctcgctgcgccgggcgcaacctgctcgccggcctgctcaccggcatgggcaaggacggcgcgcgcgggctcctggcgatccgccaggccggcggctacaccctggcccaggacgaggctacctgcgtggtctacggcatgccccgcgaagcggtggaactgggcgccgcggaagacgtgctgccgctcgaacggatcgccgccgcgctgctccagcaagccgcccggcgcggcagcggcaaccgcctctga

SEQ ID NO: 347979 - DNA, 1992 bp, Pseudomonas aeruginosa; identical to SEQ ID NO: 337559

SEQ ID NO: 347980 - DNA, 543 bp, Pseudomonas aeruginosa; identical to SEQ ID NO: 322992

SEQ ID NO: 347981 - DNA, 381 bp, Pseudomonas aeruginosa; identical to SEQ ID NO: 337557

SEQ ID NO: 347982 - DNA, 828 bp, Pseudomonas aeruginosa
atgagccgcgaacgcgaactggacgcctggatcgacggcctgctggccgatccgcagttccacgggcatccgctgcaccaggcgctggcccgcctgcgccagcaatcgctggagcaactggtgcggctggagcgcatcgcccggatctccgacggtttccagtcgatggcgcgggagcagaacctgtcgctgtccgagcgctaccacaagcagctgcggcgcctggaaaaggtggcgcggatctccgaccgctaccagcagatgatgcgcgacctcaacctggcgctgaaggaagcctcgatccgcgacccactgaccggcctgcccaaccgacgcatgctgctggagcgcctcagggaggagaacgaacgctcccagcgccacggccagagctacgtgctggcaatgctcgatgtggacttcttcaagcaggtcaacgatacctggggccacgacagcggtgaccgggtgctggtggaaatcgcccgggccatggagtccgagctacgcgaatacgacctctgcggccgctggggcggcgaggaattcctcctgctgctgccacagacccgcctgcaggacgccggcccggtactcgagcgggtgcgcgacagcgtacggaccctggcggtacgcgtcggcaccgaggcgctgagcgtcaccgccagcgtcggcgttaccgaacaccgcatcggcgaaacctattcgcagaccgtcaatcgcgccgacgccgcactgctcgacgccaagcgcagcggccgcgacaaatgcgtgttcgccgcgctcccgccgcttcctgccccttcccgcccggctccagcgcgctga

SEQ ID NO: 347983 - DNA, 591 bp, Pseudomonas aeruginosa
atgccgagcaccctgcaaggcctcgccgaataccgcgaggaaatccgcaagagccgcttccacaccatcgccgcgccggtggccgacgaggacgaggcgcaggcgttcatcgccgcccaccgcgacgcttccgccggacacaactgctgggcctggaagtgcggcgcgcagtaccgcttcagcgacgacggcgaacccggcggcagcgccgggcggccgatcctggcggccatcgagggacaggacatggactgcgtggcggtgctggtcagccgctggttcggtggcatcaagctcggcaccggcggcctcgcccgcgcctatggcggcggcgcggccaagtgcctgcagcaggcgccgcgcagcgagctggtcgagcgctgtcgggtgcgcttcgcctgtgccttcgccgaccacgcgctgatcaaggcgcgcagcctggcgctgggcgccagcgtggcggccgaagactacggcgccgacggcgtcgtcctgaccctggagttgccggtggcgcgcttcgaggcgcttcaggcgctgctggtggacctcagccgaggccaggtgcggctgcagcggctggacgcctga

SEQ ID NO: 347984 - DNA, 666 bp, Pseudomonas aeruginosa; identical to SEQ ID NO: 322996

SEQ ID NO: 347985 - DNA, 1407 bp, Pseudomonas aeruginosa
atgcatagcgaagaccagcgccccaacgacctcatctacggcctcgacgaccggccgcgcccgcttcccgccttccttgccgcgctacagcacgtgctggccagcttcgtcggtatcgtcactccgccgctggtgatcggctcgctgctcggcctcggcgagcacctgccatacctgatcagcatggcgctgatggtttccggcgccggcaccctgatccaggcgcgccggccgttcggcatcggcgccgggatgatctgcctgcaaggcaccagcttcgccttcctcggcgccgtgctggccgccgggatgctggtgaagcagcgcggcggcggtcccgaggagatcctcgcgatgatcttcggcgtgtgcttcttcggcgccttcgtgcagatcgtcctcagtcgtttcctcggccatcttcgccgggtgatcacgccgctggtcaccggcatcgtcatcaccctgatcggcgtcagcctgatcaaggtcggcatcaccgacctcggcggcggagccggggccacggacttcggcgcaccggccaatctcgcgctgggcgcgctggtgctgctgagcatcgtcctgctgaaccgctcgcgcctgccctggctgcgcctggccgccatcgtcatcggcctggcgctgggtaccctggcggcctgggcgaccggcctgttcgttccgcgggcgttgcccgagctgccgctggtcagcctgccgcagccgttccgcttcggcttcgccttcgactggatggccttcctgccggtggcgctgatctacctgatcagcagcatcgagacagtcggcgatctgaccgccaactgcatgctctcgcggcagcccctggagggaccggcgtacctgcagcggttgcgcggcggggtgctcggcgacggcgtcagttgcctgctggcagccaccttcagcgccttcccgaacaccaccttcgcgcagaacaacggggtgatccagctcaccggggttgccagccggcacgtcgggatctatatcggcggcgtgttgctggcgctcggcctgttcccctgggtcggcgcgatcctccagcagatccccaagccggtgctcggtggcgccaccctggtgatgttcggcagcgtcgccgccgccggcatccgcattctcggccagaccccgatggaccgccgcagcgtgctgatcatcgccgcctcgttcggcgtcggcctcggcgtggccgcgcagccgaccctgctcgaccagatgccggcggtggtgaagaccctgttcgactcggcgatcaccagcggcggcatcaccgccatcctgctcaacctgctgctgcccgaggagcgcgttgccgaagcggcgcaggccagcgcgaagggcggcgccctggcgcgctggcgcaagccgctgggttga

SEQ ID NO: 347986 - DNA, 837 bp, Pseudomonas aeruginosa
atgagccgcacactcgccaccgtgatgctagccggggggctactggccgcaggccaggctgtcgccgaagaccatgacatgacgccgacccacgagaccgactcggggccgctgctctggcacaacgagagcctgacctacctctacggcaagaacttcaagatcaacccgtcgatccagcagaccttcaccctggaacatgccagcggctggacctggggcgacctgttcatcttcttcgaccagatcaactacaacggcaaggaagacgccagcaacggcaagaacacctactacggcgagatcactccgcgcctgagcttcggcaagctcaccggagcggacctctccttcggcccggtgaaggacgtgctgctggccggcacctacgagttcggcgaaggcgacaccgaggcctacctgctcggcccgggcttcgacctggcgatccccggcttcgactacttccagctcaacttctactaccgcaagcccgacggcaaccgcgtgcgcgccggcgcctggcagatcaccccggtgtggtcctacaccattccggtgggcaactccgacatcctcatcgacggctacatggactgggtgatcaacaacaagagcgccagcaccagccgccgcaaccagagcgactatcacgccaacctgcacttcaacccacaggtcaagtacgacctgggcaaggccctcggctacgagcctaagcacctgtacgtgggcctggagtacgactactggtccgacaagtacggtgtgaaggactcgcagtacttcaccaccgaccagaacaccgcaagcttcctggtcaagtaccacttctga

SEQ ID NO: 347987 - DNA, 792 bp, Pseudomonas aeruginosa
atgaacggacagcctgcggaactgcaccgcccgattcccaccctcgcccgcctgccacggccggtctacgcgcgcgccgaaagcctgcgcgccggctcctggacctcgcgccaccggcacgcctgggtacagctttcctacgccatcagcggcgtgctcggcgtacataccgccgagggcagcttcttcgccccgccgcagcgggcgatctggattccggcgcagctggaacacgaggtggtcacctccacccgcgccgagatgcgcagcctgtacatccgtggcgacgcctgcgcctgggcgccgacgcgctgccgggtgctggaggtgacgccgctggcgcgcgagctgatcaagagtttctgcgagttgccggtggactacccggagggcgacagcgccgaatcgcggctggtgcaggtgctgctggaccagttgcggctgctgccggaggtcgccttctccctgccgatgccgcgcgagccgcgcctgctgcggctgtgccaggcactgatcgacgaaccgacccagagcctgaccatgggcgactgggcgcagcgcctgggcacctcggaaaagaccctgtcgcgcctgttccagcgcgagaccgggatgaactaccggctctggcgccaacgccagcgcctgctcgcctcgctcaacgcgctggaggccggcgacagcgtcaccggcgccgccctggacagcggctacgactcgacctcggcctatatcgccgccttcaagggactcttcggcttcactcccggcgaactgttccgccagcgctga

SEQ ID NO: 347988 - DNA, 1335 bp, Pseudomonas aeruginosa
atgaggaatctgttcgccttgacgccgatggcgctggcgctgtgcaccgcgtccgccgcctgggccgatgagggggaagccaaagaaggcttcatcgaaggctccagcctccaattgctgacccgcaactactacttcaaccatgaccgccggcacgcttccgggcacgacagcaaggaatgggcgcaaggcttcatcgccacctttcagtccggctacacgcccggcgtggtcggcttcggcgtcgacgcctacggcatgctcgggctgaagctcgacggcggcggcggtaccggcggcaccagcatcctgccgatcaccgcgccgagcaaggaaggctacgaatccggcaaggcgcccgatgagttctccagtggcggggcggcgctgaagatccgcgccttcgacaccgagctgaagctgggcgaccagttcctcagcaacccggtggtcgccggcggcgagtcgcgcatgctgccgcagaccttccgcggtgtgagcctgaccaacaacagtttcgaggacctgaccctcacggctggccaggtcagtttcaccaagtactacaaccagagtggccaccgtcgcctcggctcgtactacggcgaactgccgggcgaccgcgacagccatcatctcagctggctgggcggcacctggggcggcatcgagggcttcaccagcagcctgtacgccgccgaactgcagaacgtctggaagcagtactacgccgacgtcgactacacctacgagatcgacgacaactggtcgctgaaccccggcgcgcactactacaagaccgtcgacagcggcgactcgttgctcggccggatcgacaacaacacctacagcctgcatttcgcggtcggctacaggcagcacaccgtcaccgcggtgctgcagaaggtcaacggcaacacgccgttcgactacatcaaccagggcgacagcatcttcctcgacaactcgcagcagtattccgacttcaacggtcccaacgagaagtcctggaagctgcaatacgactacgacttcgtcgccctcggcctacccggcctgagcgcctcggcctcgtactcgcgcggcaagctggacctgacccgggtcgatccggacagccccggctacggcggctggtacagcgccgacggcaagaacgccaagcactgggaacgcgacctcgacctgcagtacgtggtccagggcggtccggccaaggacctctcgctgcgcctgcgctgggccacccaccgcggcaccggcggctacagcgcggtggacaacgacatcgacgaataccgggtgatcgtcgactatcccatcgacgtgttctga

SEQ ID NO: 347989 - DNA, 186 bp, Pseudomonas aeruginosa; identical to SEQ ID NO: 337550

SEQ ID NO: 347990 - DNA, 939 bp, Pseudomonas aeruginosa
gtggacacattgcaaggcatgcgcgtgttcgccagggtggtggacagcggcagcttcacttccgccgcccaggccctggacctgtccaccgcgcaggtatcgcggctgatctccgacctggaggcgcacctgcagacgcgcctgctgcaccgcaccacccggcgcctggccctgaccgaagccggcgagcgttacctggaacggtgccgcgggatcctcgaggacatcgaggtcgccgaggccgaagccgccggcgcgcacatccgcccctgcggccgcttgcgcgtgcagtcgctgatgggcatgggccagcatcacctggtgccgatgatcgcccgctacggcgcactgttccccgacgtggtgatcgagctgaccctgtcccagcgcaacccggacatgctcgaggaaggccaggatgtgctgatcaccggcgagcgccagttgcccgactcggagttcgtcgcccagcgcctgggcagcatccacagcgtgctctgcgccagtcccggctacctgcagcagcacggcgtgccacgctcggtggacgacctggagcgccacgtctgcctgcgcctgcaggacccggcctacccggagggctggattttcgccgacgagcagggcgagcgcaccgtcagcccgcagaacaccttcatggtcaatgtcgccgaggtcatggcccaggcggccaaggccgacctcggcatcgccctgctgcccagctacgtggcggccgcggcgctgcgcaacggcgagctgctacgggtgttgcccggccatgccatgcaccagcggaccatctatgcgctgtatccctcgcggcgttacctggacgcgaagatccgcacctgggtcgatctgttgcaacaggaacttccccaggcattcgcccgcgacgaaactaccatgcaaagttcaagttactgggcacagtga

SEQ ID NO: 347991 - DNA, 3048 bp, Pseudomonas aeruginosa
atgaagggcggtttcaacctgtcggactgggccctgcgccaccagtccctggtctggtacctgatggcggtatcgctggtgatgggcgtgttctcctacctcaacctggggcgcgaggaggatccctcgttcgccatcaagaccatggtcatccagacccgctggccgggcgccacggtggacgacaccctggagcaggtcaccgaccgcatcgagaagaagctcgaggagctggactcgctggattacgtgaagagctacacgcgacccggcgaatcgacggtcttcgtctacctcaaggacaccaccaaggccggcgacatcccggatatctggtaccaggtgcgcaagaagatatccgacatccagggcgaattcccccaaggcatccagggaccgggtttcaacgacgagttcggcgacgtgttcggcagcgtctacgccttcaccgccgatggcctggacttccgccagctgcgcgactacgtggagaaggtgcgcctggacatccgctcggtgaaagacctgggcaaggtgcagatgatcggtgcgcagaacgaggtcatctacctcaacttctctacccgcaagctggccgccctcggtctcgaccagcgccaggtcgtgcagagcctgcaggcgcagaacgcggtgaccccgtcgggcgtggtcgaggccggccccgagcgcatctcggtgcgcacctccggcaacttccgttcggaaaaggacctgcaggcggtcaacctgcgggtcaacgatcgtttctaccggctgtccgacctggccagcatcagccgcgatttcgtcgacccgccgacctcgctgttccgctacaagggcgagccggccatcggcctggcggtggcgatgaaggagggcggcaatatcctcgagttcggcgaggcgctcaatgcgcgcatgcaggagatcaccggcgaactgccggttggtgtcggcgtgcaccaggtgtcgaaccaggcccaggtggtgaagaaggcggtcggcggtttcacccgggcgctgttcgaggcggtggtgatcgtcctcatcgtcagcttcgtcagcctcggcctgcgcgccgggctggtggtggcctgctcgatcccgctggtgctggcgatggtcttcgtgttcatggaatacaccgacatcaccatgcagcgggtttccctcggcgcgctgatcatcgccctcggcctgctggtggacgatgccatgatcaccgtggagatgatgatcacgcgcctcgaactgggcgactcgctacacgactcggcgacctacgcctacacctcgacggccttcccgatgctcaccgggaccctggtgacggtggccggcttcgtacccatcgggctcaacgccagctccgctggcgagtacaccttcaccctgttcgcagtgatcgctgtggcgctgctgctgtcgtggatcgtcgcggtgctgttcgccccggtgatcgccgtgcacatcctgccgaagactctcaagcacaagtcggagcagaagaagggccgcatcgccgagcgtttcgacagcctgctgcacctggcgatgcgccggcgctggacgaccatcttcctcaccgcgctgctgttcggcgtgtcgctgttcctgatgaagttcgtccagcaccagttcttcccgtcttccgaccgtccggaactgctggtcgacctcaacctgccgcaaaacagcagcatccacgagaccagggcggtgatggaccgcctggaagcgacgctgaaggacgacgaggacatcgaccactggagcgcctacgtcggcgaaggcgcgatccgcttctacctgccgctggaccagcagttgcagaacaacttctatggccagctggtgatcgtcaccaaggacctggaggcccgcgagcgcgtcgccgcacgcctgcgcgatcgcttgcgcaaggactacgtcggcatcagcacctacgtgcagccgctggagatggggccgccggtgggacggccgatccagtaccgggtcagcggaccgcagatcgacaaggtccgcgagtacgccatgggcctggccggcgtgctcgacggcaacccgaacatcggcgatatcgtctacgactggaacgagcccgggaagatgctcaagatcgatatcgcccaggacaaggcgcgccagctcgggctttcctccgaggacgtggcgcagatcatgaacagcgtggtgaccggcagcgcggtgacccaggtgcgcgacgacatctacctggtgaacgtcatcggccgcgccgaggatagcgagcgcggctcgctggagaccctggagagcctgcagatcgtcacgcccagcggcacctcgatcccgctcaaggcgttcgccaaggtcagctacgagctggagcagccgctggtgtggcgccgcgaccgcaagccgacgatcacggtgaaggcgtcgctgcgcggagagatccagcccaccgacctggtcgcccggctggcgccggaggtcaagcgcttcgccgacggcctgccggcgaactaccggatcgaagtgggcggcacggtggaggagagcggcaaggccgagggcccgatcgccaaggtggtgccgctgatgctgttcctcatggcgaccttcctgatgatccagttgcagagcgtgcagaagctgttcctggtggccagcgtcgcgccgctggggctgatcggggtggtcgcggcgttgctgccgaccggcacgccgatgggcttcgtggcgatcctcgggattctcgcgctgatcggcatcatcatccgcaactcggtgatcctggtgacccagatcgatgccttcgagaaagacggcaagacgccctgggaagccgtgctggaagccacccaccaccgcacccggccgatcctgctgacggcggcggcggccagcctggggatgatccccatcgcccgcgaagtgttctgggggccgatggcctatgcgatgatcggcggcatcgtcgccgccacgctgctcacgctgatcttcctgccggcgctgtacgtcgcctggtaccggattccggaaccgggacgctga

SEQ ID NO: 347992 - DNA, 1071 bp, Pseudomonas aeruginosa
atgaagccgttttccctcgccggcctgttcggcttcgccctgctcctctccggctgcggcgacgagccgcagccggcaccgccgcggccggtgctgacggtgaccgtgaagaccctgaagaacgacgacctcggtcgcttcgccgggagcatccaggcgcgctacgagagcgtgctcggcttccgcaccaacggacggatcgcctcgcgcctgttcgacgtcggtgacttcgtcggcaagggcgcgctgctggcgaccctcgaccccaccgaccagcagaaccagttgcgcgccagccagggcgacctggccagcgccgaggcacagttgatcgacgcccaggccaatgcccggcgccaggaagaactgttcgcccgcagcgtcaccgcccaggcgcgcctggacgatgcgcggacccgcctgaagaccagccaggccagcttcgaccaggccaaagcggcggtgcagcaggccagggaccagctttcctacacgcgcctggtgaccgatttcgacggcgtcatcaccacctggcacgccgaggccgggcaagtggtcagcgccggccaggcggtggtcaccctggcccggcccgaagtgcgcgaggcggtcttcgacctgcccaccgaggtcgccgagagcctgccggccgacgcgcgcttcctggtcagcgcccagctcgacccgcaggccaggaccaccggcagcatccgcgagctgggtccgcaggccgacgcctcgacccgcacccgtcgcgtgcgcctgagcctggcgcagacgccggaggcgtttcgcctcggttcgaccatccaggtccagctgagcagcgccggtagcgtgcgcagcgtgctgccggccagcgtgctgctggagcgcgacggcaagacccaggtctgggtcgtcgatgggaaacagtccagcgtggccctgcgcgaggtacaggtgctcagccgcgacgaacgccaggtggtgatcggacagggcctggccgacggcgaccgggtggtccgcgccggagtcaacagcctcaagcccggccagaagatcaaactcgacgaggatgcgcgatga

SEQ ID NO: 347993 - DNA, 1104 bp, Pseudomonas aeruginosa
atggcgctgcccgccatcctgtgcgccggcctgcttgtcggttgcggcgccgagccgcccgccgaggaacacgtccgtgtgctggcgcagacggtgaagatggccgagttcgcctcggccacctcgatcaccggcgacatccaggcacgggtacaggccgaccagtcgttccgtgtcggcggcaagatcgtcgagcgcctggtcgatgtcggcgaccacgtcgcggctggccaggtgctggcgcggctcgacccgcaggaccagcgcagcaacgtggagaacgcccaggcggcggtcgccgcgcagcaggcgcagtcgaagctcgccgacctcaactaccagcggcagaaggcgctgctgcccaagggctacaccagccagagcgagtacgaccaggcgctggcctcggtgcgcagcgcgcagagttcgctgaaggccgcccaggcgcagttggccaacgcccgcgacctgctttcctataccgagctgcgtgcctccgacgccggggtcatcaccgcccgccaggccgaggtcggccaggtggtgcaggccaccgtgccgatcttcaccctggcccgcgacggcgagcgcgacgcggtgttcaacgtctacgagtcgttgttcagccacgatgtcgacggccagcggatcaccgtcagcctgctcggcaagccggaagtcaccgccagcggcaaggtccgcgagatcacccccacggtggacgagcgcagcggtacgctgaaggtcaaggtcggcctcgactcggtgccggcggaaatgagcctcggcagcgtggtcaacgccagcgtcgccgcgccggccgagcacagcgtggtgctgccctggtcggcgctgtccaaggtcggcgagcagccggcggtctggttgctcgaccagcaaggcaaggcgcgtctgcaaccggtgcgggtggcacgctacgccagcgagaaggtggtcatcgacggtggcctggaggcgggccagacggtggtcacggtgggcggccaactgctccatccgggccaggtggtcgaggtggcccagccgccgcagccgacccagagcaccgccagccgcgacgccgtgggcggaggccagccatga

SEQ ID NO: 347994 - DNA, 840 bp, Pseudomonas aeruginosa
atgagcgaactcccggaacaccccgccaccctggcgccgccgaccgtcctttcgccggccaagcgcatcgaggccttcaccggcgatcccaacttcatgacctcgctggcccgtggcctggcggtgatccatgcgttccaggagcgcaagcggcacctgaccatcgcccagatcagccaccgcaccgagataccccgcgccgccgtgcgtcgctgcctgcacacgctgatgcagcttggctacgccaccaccgacgggcgcacctactcgctgttgccgaaggtgctcaccctcggccacgcctacctgtcgtcgacgccgctggcgatcactgcgcagccgatcctcgaccgcctcagcgaacagctccacgaagcctgctcgatggccaccctggagggcgacgacgtgctctacatcgcccgttcggccactccccagcggctgatttcggtggacctcaacgtcggcagccggctgcccgcctattgcacctcgatgggccgcatcctcctcgccgcgctggacgacgacgcgctgcacgcctacttcggcggagtggagatgcaggccaagaccagccgtaccctgtatacccccgagaccctgctgccgtgcctggtggagattcgtcgccagggctggtgcatcgtcgaccaggagctggaagtcggcctgcgctcgctggcggtgccggtacgcgactccgccggccatgtgctcgccgcgctgaacgtcggcacccatgccgggcgggtctcccgcgccgaactggaaagccgtttcctgccgttgctgctggaggccagccgcgagctgagcgcgcgcctgttcacctga

SEQ ID NO: 347995 - DNA, 606 bp, Pseudomonas aeruginosa
atgagccacgaactgctgcgggaaaccccttcccagaccgccggtccctatgtccacatcggcctggcgctggccgccgccggcaacccgacccgtgacctggagatctggaaccgcatggcccgcgaagacgcgccgggccagcacatcctcctgctcggccacgtctacgacggcaacggccacctggtgcgcgactcgttcctggagttctggcaggccgacagcgaaggccgctaccaagagcgctacgatccggagcgaccgttcaacagcttcggccgcaccgccaccaccttcgatgccggcgagtggaccctgcacacggtcaagccgggggtggtgcgtaacgcccagggcgtgccgatggcgccgcacatcaacgtctcgctgttcgcccgcggcatcaacatccacttgcagacccggctgtacttcgatgacgagaccgaggccaacgccgcctgtccggtgctcaacctgatcgagcaggcgccgcgtcgcgacaccctgctcgcgcggcgctgcgaagtggacggacagctcgcctaccgtttcgacatccgcatccagggcgacaacgagacggtgttctttgacttctag

SEQ ID NO: 347996 - DNA, 720 bp, Pseudomonas aeruginosa
atgcacgacgccgaaagccgtcgtttcgtcatccgtgaccgaaactggcaccccaaagccttgacccccgactacaagacctccgtgccgcgctcgccgagccaggcgctggtgagcatcccgcaatcgctctcggaaaccagcgggccggacttctcccacctcaggctcggccgccacgacaacgacctgctgctcaacttcgaccacggcggcctgccccagggcgagcgcatcatcatgttcggccgggtcttcgaccagtacggcaagccggtcccgcacaccctggtggagatgtggcaggccaacgccggcgggcgctaccggcacaagaacgaccgctacctggcgccgctcgacccgaacttcggcggcgtcggccggaccctcaccgacagcgagggccactattacttccgcaccatcaagcccgggccctatccctggcgcaacggccccaacgactggcgcccggcgcacatccacgtgtctatcagcggcccggcgatcgccgcgcggctggtcacccagatgtacttcgagggcgacccgctgatccccaagtgcccgatcatccgcacccttgccgacccgggggcggcgcagagcctgatcggccggctcgacatgagcatggccaacccgatggattgcctggcctaccgcttcgacatcgtcctgcgcgggcagcgcaagaccttcttcgagaacgcctga

SEQ ID NO: 347997 - DNA, 918 bp, Pseudomonas aeruginosa
atgaacctcgacaaccgcatcaagttccgccacctcgcctgcttcctcgaagtcgcccgccagcgcagcttcgccaaggcggcggatgccgtggcggtgtcgcagccggcgatctccaagaccctcaaggaactggaggaaatcctcggcgcgcgcctgttcgaacggagcaaggccggcgccgagctgaccgaggcgggcgtgaccttcctgcgctatgccggcccctgcgtgcaggccctgcgcgacggggtgaacaccctgcgcggccacgaggcgcaggtcgagacggtgcgggtcggcgtgctgtcgacggtggagagcctggtggtgcccgaggtgatccggcgcctgcaccggcgccacggtgcgctggtggtcagcgtcgccaccggacccagcgcctacctgctggcgcaactgaaggtcggcgagctggacctggtggtcgggcggatgaccgatagcccggacatccagggcctgaccttcgagcacctgtacagcgagtcgatgatgctggtggtgcgtcccggccatcccttgctcgccgcgcccctcggcgacctgcagcggctggccgaattcccactggtgctgccgctggccggcaccaccatccgccgccacgccgacagcctgttcgtgcaatggggcatcgcgctcgccggacagcgcctggaaaccctctcgccgaccctcagccgcagctatgtgttgcgcagcgaggcgatctgggtggcgccgcgcgatgccgtgcgcctggacgtcggcaacggcgagctggccgagctggacctgggtatccgcgaaccgggcggttcggtcgggctgtgccacaacgcggccttgccgttgccgctgggggcgcaatggttcagcgcggtgttgcgcgaggtggccgccgagttgcactga

SEQ ID NO: 347998 - DNA, 2388 bp, Pseudomonas aeruginosa
atgaccccgttcccgcgcttcgccctgcgtactctccccgccctgttcctcagcctcggctgtctcgccgccaccgtgcaggccgccgaggcggttcgctaccgcttcagccaggctgccgcgccgctggcccaggcgctcaacgcgttcagccgggccagcgggcagacgctgctctacaccgccgagctgccgccgcaggcgaccgctccggcattgcacggttcgctggtcgcggaggaggcgctgcaacgcctgctgcagggcagcggcctgcgcgcgcggcggatcgacgagcgcaccctgaccctggaaccgatccccgccagcggcgcgctcgacctcgatgccacgacggtctccgccgccgccccggcgcagggctaccggccggcggccaacgcctcgatcagccgcggcgatgcgccgctactggaaatcccccaggcgatcagcgtggtcccggcacaggcgctgcaggaccagcgcccgcgcaaccttgacgacgcgctgggcaacatcagcggcatcacccaggccaacaccctcggcggtacccaggacgcggtgatgaagcgcggcttcggcgacaaccgcgacggctcgatcatgcgcgacggcatgccctcggtgcagggccgcaatttcaccgccaccgccgaccacgtcgaggtgctgaaggggccagcatccctgctctatggcatccaggatccgggcggggtggtcaacgtggtgagcaagaagccacaactgcaacaagccaacgccctgaccctgcgtggctcggcctacgcccacgggcgcaacggcagcggcggccagctcgactccaccggcccgctgggcgacagcggactggcctaccggatgatcctcgatcatgaggacgaggattactggcgcgacttcggcaagagtcgcgagacgctggtggcgccctcgctggcctggtacggcgaggacacgacggtcaacctgagctacgagcaccgcgagttcaccacgccgttcgaccgtggcacggccatcgacccgcgtaccaaccgcccgctggacatcccgcgcagccggcgcctggacgagcccttcaacatcaccgagagccgttccgagctgacccgcctggatctcgaacggcagctcgacgacacctggaaggcccacttcggctacggctacagtcgcgagacctacgacgacaaccaggcccgggtgatggccgtgaatgccgacggcaccctgacccggcgcatggacggcacccacggcgcggtcagcagcgacagcttcgccaccctcggcctgagcggaacgctgcaactggccgggatgcaacatgacctgcaattcggcatggaccacgagaagcgcaagatcttccgcgccgacctgctgcgcgacagcaagaccagccgcttcgactacctcgacccggtctatggccaggtggtgccgtcgacccgggtggtcgccggcgacagcgaccagaccgacaagctgcgcagcgactcgctgtacttccaggactcgatccacctggacgaacgctggatcctggtcggcggcgcgcgctaccagatctacgaccagctcgccgggcgcggccggccgttcaacgccaacaccgatatcaacgggcagaaatgggtgccgcgcggcggcctggtctaccgcctgagcgacgaggtttcgctgtacggcagctacacgcgctcgttcaagccgaactcgaccatcgccccgctgagcaccggcgagaccatcgattcggcgatcctgccggaggaggcgacctcctgggagctgggcgccaagctggatgtgccggggcgtctcagcggcaccctggcgctgttcgacattcgcaagaagaacgtgctggtcaacgaactcgacggtgctggcaacagcagcgtgcgcgccgccggccgggtccgctcgcgcggcctggagctggacctcaccggccagctcagcgaacgctggagcctgatcggcagctacgcctggctcgccgcggaagtcaccgaggacccgaccctggagggcaagcgcctgcagaacgtggcgcgcaacaccgcgtcgctgtcggcggtctacgaactcggccagctcttcggcggcgaccgcctgcgcctgggcggcggcgcgcgctacgtcggcaagcgcccgggcgacccggccaattccttcgacctgccgtcctacaccgtggccgatgccttcgccagctacgacacccgcttcggcgggcacggcgtgaagttccagctcaacgtgaagaacctgttcgaccgcacctactacccgtccagtgccaatcgactgtacgtggcgatgggcgagccccggcagttccaggtgtcgacgacggtggagttctga

SEQ ID NO: 347999 - DNA, 996 bp, Pseudomonas aeruginosa
atgacccgacccgatagcgacgccgcgccctacgagcccgtcctcgagcagaccgcccaggcctggctggtgcgcctgcgcggtacgccggatgcggcgacccggcgggccttcgaggactggctggcgcagcggccggcgcatgccgaggcctatgcccgcgccgaggcgctctggcgcctgacggaaataccggcgagccgcctggccatcgaagaggccgatgccctggaagcctacctgcggccgcgccgagcgtcgcgcaacccgcggcgctgggcctacccgctggccagcgtcgcctgcctgctggcgatgctctggctgggcggctggtggcagcccggcgactggctgcaggactggcgtgccgactatgtcgccgcgccgggacaggtcgccgaatggaagctggccgatggctcctacctgagcctggacgccggcagcgcggtgcgcgtgcgtatcgacggcggccagcggcgggtcgaactgctgcgcggcgccgccgcgttgcgggtgaagcgcgacgcgctgccattcgtggtcgaggccggcgaaggtcgggcgcgggtactgggcaccgagttcgaggtccgtcgcggcgccggggcgacccgcgtcaccgtgttgcaagggcgggtcgcggtgagcgccggcaccggtgcgggcgccgccgaggaagtgctgggcgccggccagcaggtcggcttcgccgacggcaagctgggccggcccgtggccatcgacgccgccgccgcgctggcctggcgccagggttggctgagcttctaccggcggccgctggcggaagtgctcgacgaactcgctcgctactaccccggacgcattctcctgctcgacgacgcgctcggtcgccagccggtcagcggcagcttccgcagcgatgatcccgaagccgcgctgaagtcgctgcaggcggtgctcggctatcgccagcagatcctgttcggacgcctggtggtgattcgctga

SEQ ID NO: 348000 - DNA, 588 bp, Pseudomonas aeruginosa; identical to SEQ ID NO: 323013

SEQ ID NO: 348001 - DNA, 951 bp, Pseudomonas aeruginosa
atgtacgaatggctcaacgccttgcccaaggccgaactgcacctgcacctggaaggtaccctggagccggagctgctgttcgccctcgccgagcgcaaccgcatcgccctgccctggaacgacgtcgagaccctgcgcaaggcctacgccttcaacaacctgcaggaattcctcgacctctactacgccggcgccgacgtgctgcgcaccgagcaggacttctacgacctgacctgggcctacctgcagaagtgcaaggcgcagaacgtcgtccacgtcgagccgttcttcgacccgcagacccacaccgatcgcggcattcccttcgaggtggtgctcgccggcatccgcgccgcgctacgggacggcgagaagctgctgggcatccgccatgggctgatcctcagcttcctccgccacctcagcgaggaacaggcgcagaaaaccctcgaccaggcgctgccgttccgcgacgccttcatcgccgtcggcctcgacagctcggaagtagggcatccgccgagcaagttccagcgggtcttcgaccgggcccgcagcgaaggcttcctcaccgtcgcccatgccggcgaggaggggccgcccgagtacatatgggaagccctcgacctgctcaaggtcgagcgcatcgaccacggcgtacgcgccttcgaggacgagcggctgatgcggcggctgatcgacgaacagatcccgctgaccgtctgcccgctgtccaacaccaagctctgcgtgttcgacgacatgagccagcacaccatcctcgacatgctcgaacgcggcgtgaaggtgacggtgaactccgatgacccggcctacttcggcggctatgtcaccgagaacttccatgccttgcagcagagcctgggaatgaccgaggagcaggccaggcgcctggcgcagaacagcctggatgcgcgcctggtgaagtga

SEQ ID NO: 348002 - DNA, 963 bp, Pseudomonas aeruginosa
ttggaccgtctacccatcatcgacatcgccccgctctacggcgccgaccgtggcgcctggaacgacgtggcgcggcggatcgaccaggcctgccgcgagtggggcttcttctacatcgccggacacccgttgccggccgcgcgcttcgaagccctgctggcggcggcgcgggagttcttcgcgctgcccgtcgaagagaagctgaagatcgatatcacccgtagccgcaatcatcgcggctatggcgcgatcgccaccgagcagctcgacccggcgttgcccagcgacttcaaggagaccttcgacatggccctgcacctgccggcggagcatcccgacgtgcgcgccggcaaatccttctacgggcccaaccgacaccccgacctgcccggctgggaggccctgctggaaggacactatgccgacatgctggcgctggcccgtaccgtgctgcgcgccctggccatcgccctggggatcgaggaggacttcttcgatcgccgcttcgagcagccggtcagcgtgttccgcctgatccactatccgccggcctcggcccggcagagcgccgaccagcccggcgccggcgcgcacaccgactacggctgcgtgaccctgctctaccaggacgccgccggtggcctgcaagtgcagaaccgccagggcgaatggatcgacgcgccgcccatcgacggcaccttcgtggtcaacatcggcgacatgatggcgcgctggagcaacgaccgttaccgctcgaccccgcaccgggtgatcagcccgcgcggggtgcaccgctactccatgccgttcttcgccgaaccgcacatggacaccgagatccgctgcctgccgggctgcttcgacgcggacaacccgccgaagtatccgccgaccacctgtggcgattggctgacctcgcgcttcgcgcagacctatgcctatcggcgcggcgaaacggcctga

SEQ ID NO: 348003 - DNA, 1098 bp, Pseudomonas aeruginosa
atgaaacaccgtcgcacgcaatcccgcatgtccgtcctgcgccgccttgccgccgtcctcggcctcggcgcctgcgctctcgccgccgaggccgccgaaccactgaagatcggcttcgtctatgtcggcccggtcggcgaccacggctggacctaccagcacgaactgggccgccgcgaactggtggagcacttcggcgacaaggtgaagaccagcttcgtcgagaacgtcgccgagggcgccgacgccgagcgggtcatccgcaacctggcgaaagacggctacggcctggtcttcaccacctccttcggctacatgaaccctaccgccaaggtggcccggcagtttcccaaggtgaccttcgagcacgccaccggctacaagcgcgacaggaacctcggcacctacctgtcgcgctcctacgagggacgctacgtcggcggcttcctcgcggcgaagatgacccgcagccacaagatcggctacatcgcctcgtttccgattcccgaggtgatccgcgacatcaacgcgatccagctggcgctggacaaatacgacccgcaggccgaactcaaggtgatgtgggtgagcacctggttcgatccgggcaaggaggccgacgcggccaacgcgctgatcgaccagggcgtcgacgtggtgttccagcacaccgatagcccggcgccgatccaggccgccgagcgtcgcggggtgtacgccgtgggctacgcctcggacatgcagcacttcggtccgaagaccgtgctcacctcgatcgtcaacgactggggcccgcactatatccgctcggcccaggcggtgatggacggcacctggaaatccgaggacttctggggtggcctggccgagagtacggtggtcctgccgctgaaccaggaggtgctgccggcgccggtgcgggaagaggcgggcaggctgatcgagtcgatccgcagcggagccttccaccccttcaccgggccgatccgcgaccagtccggcaaggagcgtttcgccgccggcgtcagcgcgaccaatgccgacctggcgtcgatgaactattacgtggaaggcatcaaggccgacctgccgaagtga

SEQ ID NO: 348004 - DNA, 516 bp, Pseudomonas aeruginosa
atgaccgcgatctacctggccgggccggacgtcttccgccccgacgccgaagcccatggcgaaaccctcaaggcgctctgcgccgagttcggcttcgtcggcctctacccgctcgaccacgccctgcccgccgacatccgcgagccagccgcacaggccgcctggatctaccgcgccaatgtcggcctgatcgagcgcgccgactgcgtgctggccaacctcgaaccgttccgcggcagcgagccggacagcggcaccgccttcgaagtgggttacgccctggccctgggcaagccggtatatgcctacctcagcgatgccggcgcctacgccgagcgcctcgcccggctggccccggaatggctcggcgagcaccccggcgaggaccgcgacggttggcaactggagggtttcggcctgccattgaacctgatgctggcggtgccttcgcggctggtcgccggcggcccgcgcgaggccctgcgacgcctcgccgaggaactcgagcgcgcctga

SEQ ID NO: 348005 - DNA, 627 bp, Pseudomonas aeruginosa
atgaaccgatccaagggttccagcagccgtcgtaccttcctgcgcctggcagccctgctgctgcccgccggcgccctgctcggcagcctgccgggcgtacgcgccgcggccaggccgcggaaactctatctggccggtcccgatgtgttccgcgccgacgccgtcgcccacggcgaagcactcaaggcactgtgcgcacgctacggtttcgagggcctctacccgctggacaacgcgctgccgaaacagctcgccgagccgcgcgaacaggcggcctggatctaccgcgccaacatcggcctgatcgaacgcgccgacgcggtgctggccaacctgaacttcttccgcggcgccgagccggacagcggcaccgccttcgaggtcggctatgccaccgccctcggcaagccggtctatggctacgtcgacgacgccggcagctacgccgagcggatccgccggcacaccccggagctgatcggcgaggatccgacccgcgaccgcgacggcatgaccctggaagagttcggcctgccgctcaacctgatgctggcggtgccggcaacgctagtcgtcggcgacgccgagcaggccctgcgccaactcgccagccggcgccacggctga

SEQ ID NO: 348006 - DNA, 1053 bp, Pseudomonas aeruginosa
atgtcacgcgccgcccgcccatgcaatcgcttttgcagccttctgctaggactcgccctgctgatgcccgccagccttcctctgtccgctgccgaaacggtggcgccgccatcgccgcggacgctgatcatcgacaccgatccgggcgccgacgatgtgatcgccctgctgttcgccatggcctcgccgaaggagctgaagatccaggcgctgaccaccgtcgccggcaacgtgccgctggaaaagaccgcgcgtaacgcccggctggcccgcgagtggggcaagcgcccggatattccggtctacgccggcgccccgcgaccgctgctgcgcacgccgatctacgccgccgacgtgcacggcagcgaaggcatcagcggcgtcgaggtgcatgagccgaagcagccgctggccgaaggtaacgccgtggactacctgatccgcaccttgcgtgcggcgccggagaagagcgtgaccctggccatgctcggcccggagaccaacctcgcgctggccctgacccaggccccggacatcgtcaagggcatccgcgagatcgtgatcatgggcggcgcccacttcaacggcggcaacatcaccccggccgccgaattcaatatcttcgccgacccccacgcggcggaaatcgtgctcaagagcggggcgccgatcaccatgctgccgctcgacgtgacccacaagatcctcaccagccccgagcgcatcgccaagctgcgcaacctcggcaaccaggccggcaagaccgtcgccgacatcctcgacgcctacgtccagtacgacatcaagtactacggcctgaagggcggcccggtgcacgacgccacggtggtcgcctacctgctcaagccctcgctgttcaagggcaagcggatcaacgtgcaggtcgacagccgcgagggcatcaccttcggccagaccgtggccgactggtacggcggcctcaagcagccggccaacgtcgagtggatcaacgagggcgacgcccaggggttcttcgacctgctcaccgagcgtatcgcccgcctgccctga

SEQ ID NO: 348007 - DNA, 1350 bp, Pseudomonas aeruginosa
atgtcccgcacctggattcgcaatcccctcgccatcttcaccgccaacggtctcgacgccgccggcggcctggtcgtcgaagacggccgcatcgtcgagctgctcggcgccggccaacagcccgcgcagccctgcgccagccagttcgacgccagccggcacgtggtgttgccggggctggtcaacacccatcaccacttctaccagacccttacccgcgcctgggcgccggtggtcaaccagccgctgttcccctggctgaagaccctctacccggtctgggcgcggctgaccccggagaaactcgaactggccaccaaggtggcgctggccgagctgctgttgtccggctgtaccactgccgccgaccaccactacctgtttcccggcggcctcgaacaggccatcgacgtgcaggccggggtggtcgaggaactgggcatgcgcgccatgctcacccgcggctcgatgagcctcggcgagaaggacggcggcttgccgccgcagcagacggtgcaggaagccgagaccatcctcgccgacagtgagcgactgatcgcccgctaccaccagcgcggagacggtgcccgggtgcagatcgccctggcgccctgctcgccgttctcggtgactccggagatcatgcgcgccagcgccgaactggcggcgcgccacgacgtacgcctgcacacccacctggcggagaccctcgacgaggaagacttctgcctgcagcgcttcggcctgcgtaccgtggactacctggatagcgtcggctggctcggcccgcgcacctggctggcccacggcatccacttcaacgccgaggagatccgccggctcggcgaggcgggcaccggtatctgccattgcccgagttcgaacatgcgcctggcctcgggcatctgcccgaccgtggagctggaggcggccggcgcgccgatcggcctgggagtcgatggctcggcctccaacgacgcctcgaacatgatcctcgaggcgcgccaggccctgtacctgcaacgcctgcgctacggcgccgagcggatcaccccggaactcgccctgggctgggccacccgtggctcggcacgcctgctcgggcgcagcgacatcggcgagctggcccccggcaagcaggccgacctggccttgttcaagctcgacgagctgcgcttctcgggtagccacgacccgctctcggcgctgctgctgtgcgctgccgaccgtgccgaccgggtaatggtcggcggcgcctggcgagtggtcgacggtgccgtggaagggctcgacctggccgccctgatcgcccgccaccgcgaggcggcgagcgccctgatcgccgggtga

SEQ ID NO: 348008 - DNA, 1074 bp, Pseudomonas aeruginosa; identical to SEQ ID NO: 324838

SEQ ID NO: 348009 - DNA, 1566 bp, Pseudomonas aeruginosa
atgttggacgccaatcttaaaacccagttgaaggcctacctggaaaaggtcagccagccgttcgagatcgtcgcgtccctcgatgacagcgacaaatcccgcgagctgctgggcctgctgcaagacatcgtcggcctgaccgacaagatcaccctgaagaccgacggcagcgatgcgcgcaaaccgtcgttctcgctgaaccgccccggtgcggacatcggcctgcgcttcgccggtatccccatgggccacgaattcacctcgctggtgctggccctgctgcaggtaggcggccacccctccaagctcgacgcggacgtgatcgagcaggtcaagggcatcgagggcaccttcgagttcgaaacctacttctcgctgtcctgccagaactgcccggacgtggtccaggcgctgaacctgatggccgtgctcaacccgaacatccgtcacgtcgccatcgacggcgcgctgttccaggatgaggtcgaggcgcgccagatcatgtcggtgccgagcatctacctcaacggcgaagtcttcggccagggccgcatgggcgtggaagagatcctcgccaagatcgacaccggcgccgccgcccgcgacgccgagaagctgaccgcccgcgacgccttcgacgtgctggtggtcggcggtggcccggccggcgccgcggcggcgatctacgccgcgcgcaagggcattcgcaccggcgtcgccgccgagcgcttcggcggccaggtgctggacaccatggccatcgagaacttcatctcggtgcaggagaccgaagggccgaagctggcgcgggcgcttgaagagcacgtgcgtcactacgaggtcgacatcatgaacctgcagcgcgccagcaagctggttccggcgaaaaacaccggcgagttgcacgaggtgcagttcgagagcggcggcagcctcaaggccaagaccctgatcctcgccaccggcgctcgctggcgcgaaatgggcgtgcccggcgagcaggagtacaaggccaagggtgtgtgcttctgcccgcactgcgacggcccgctgttcaagggcaagcgcgtggcggtgatcggcggcggcaactctggcgtcgaggcggccatcgacctggccggcatcgtcgcccacgtgaccctgctggaattcgacagcaagttgcgcgccgacgccgtgctgcaacgcaagctctacagcctgccgaacgtcgaggtgatcaccagtgccctgaccagcgaagtgaagggcgacggccagaaggtcaccggcctggtgtacaaggaccgcaactccgaggagttcaagtcgatcgagctggaaggtatcttcgtgcagatcggcctgctgcccaacaccgagtggctcaagggcagcgtcgagctgtcgccgcgcggcgagatcatcgtcgacgcccgtggcgagacctcgctgcccggcatcttcgccgccggcgacgtgaccacggtgccgtacaagcagatcgtgatcgccgtgggcgagggcgccaaggcttcgctgagcgccttcgaccacctgatccggacctccgcgccggagtga

SEQ ID NO: 348010 - DNA, 564 bp, Pseudomonas aeruginosa
atgtccctgatcaacactcaagtccaaccgttcaaggtcaacgctttccacaacggcaagttcatcgaggtgaccgaggaatccctgaagggcaagtggtcggtcctgatcttcatgccggctgccttcaccttcaactgcccgaccgagatcgaagacgccgccaacaactacggcgagttccagaaagccggtgccgaggtctacatcgtgaccaccgacacccacttctcgcacaaggtctggcacgaaacctccccggcagtcggcaaggcccagttcccgctgatcggcgacccgacccaccagctgaccaacgccttcggcgtgcacatcccggaagaaggcctggccctgcgcggtaccttcgtgatcaacccggaaggcgtgatcaagaccgtcgagatccactccaacgagatcgcccgtgacgtcggcgagaccgtgcgcaagctgaaggccgcccagtacaccgccgcccacccgggcgaagtctgcccggccaagtggaaggaaggcgagaagaccctcgctccgtccctggacctggtcggcaagatctaa

SEQ ID NO: 348011 - DNA, 927 bp, Pseudomonas aeruginosa
atggatatcgatctgctcgacaacctgctgttcgccatggtccgcaccggtactccgctgctgctggtggccctgggcgaactggtctgcgagagaagcggagtgctcaacctgggccaggaggggatgatgctgttcggcgcggtgatcggcttcatggtcgccttctccagcggcagcctgtggctcggcgtgctcctcgcggtgctcgccggcatgctgctggcggcgctgttcgccggggtcgccctgtacctgaacgccaaccaggtggcctgcggcctggcgctgaccatcttcggcgtcggcctttcgtcgttcgtcggcgccgcctgggtcggcaagccgctgcaagggttcgccccgctggcgctgccggtgctgggcgagttgccgctgctcgggcgcatgctgttcgcccaggacgcgctggtctacctgagcctggcgctgttcgccgcggtcgcctggatgctcctgcgcagccgcgccgggctggttctccaggcggtcggcgagaaccctgacgcggccagcgcgatgggcctgccggtgctgcgcgtgcgcaccctggcggtgctcttcggcggcgccatggccggcctggccggtgcctacctgtcgctggcctacacgccgatgtgggcggagaacatgaccgccggacgcggctggatcgccctggcgctggtggtcttcgccagttggcgggtgttccgcgtgctgctcggtgcctggttgttcggcctggccagcatcctgcacctggtggcccaggggatcgggctgtcgattccggccaacctgctggcgatgctgccctatgcggcgaccatcctggtgctggtcctgctctcccgcgatgccctgcgcacccggctgtatgccccggtttccctgggccagccgtggaaggccgggcactga

SEQ ID NO: 348012 - DNA, 1098 bp, Pseudomonas aeruginosa
atgctgttgtccctggaaccgcgcggccgacagtcacgctggatgctgctggcctctccgctgctggcggggctgctgaccctggtctgcggtgcgctactgttcgcctgtctcggccacgatccgtggcagaccctgcataccgtgctggtacagccgctcagcgacctctatgggctcggcgagctgctggtcaaggccatgccgatcctgctctgtgccctcggcctggcactggcctaccaggcgcgcgtgtggaacatcggcgcggagggccagttgctggtcggcgccctggccggcagcgcggtggcgatccagttgctcgactggcagagccgctgggcgctggcctgggtgctgctcgccggcaccgctgccggggcgctctgggccgggttcgccgcctggctgcgaacgcgcttcaacgccaacgagatcctgaccaccatcatgctcaactacatcgcgctgaacctgctgctgtacggcgtgcacgggccgttgaaggacccggatggcttcaacttcccgcagtcggcgctgttcggcgaggccagccgcctgccggcgctgttcgaggacagccgggtgcaccttggcgcattgttcggcctgctggcgctggcggcggtctgggtgctggcgcagcgcagcttcctcggtttccaggtccgcgtgctcggcctcgaccgccgcgccgccggtttcgtcggtttccgcgagaagcgcctggtctggttcgtgctgctgttctccggcgcgctggcaggcctggccggcgtctgcgaggtcgccgggccgatcggccaactggtgccgcaggtctcgccgggctacggctatgcggcgatcaccgtggccttccttggccgtctcaatccgttcggcatcctctgcgccagcctgctgatggcgttgctctacctcggcggcgaggccgcgcagatgagcctcaacctgccgttggcgctgaccgggctgttccaggggatgatgctgttcttcctcctcgcctgtgacgtgctgatcctctaccgcccacgtttgcacggacgctggcgcaagcgcccggcgctgcgcgacgccctggcctga

SEQ ID NO: 348013 - DNA, 1572 bp, Pseudomonas aeruginosa
atgtccgcaccttcctccttcgcgccgccgcgcctcgaactgcgcgggatcagcaagcgttatccgggttgcctggccaacgaccgcatcgacctgtgcatcgacgccggcgagatccacgccctgctcggtgagaacggcgccggcaagagcacgctgatgaagatcatctacggcgtgacccgtcccgatgccggcgagatccgctggcagggcgagccggtgcaggtacgcgacccggctcgcgcccgggcgctggggatcggcatggtgttccagcatttctccctgttcgagacgctcagcgtggcggagaacatcgcgctcgccctcggcgccgaggcgggcagcccgcgccggttggaggcgcgtattcgcgaggtgtcgcagcgctacggcatgccgctggagcctcgccggctggtccatgggctgtccatcggcgagcgccagcgggtggagatcgtgcgctgcctgatgcaggacatccgcctgctgatcctcgacgagccgacctcggtgctgaccccgcgcgaggccgaggatctcttcgtcaccctgcgccgtcttgcggaggagggctgcagtgtcctcttcatcagccacaagctggccgaggtccgtgcgctctgccagcgcgccacggtgctgcgcggcggacgggtggccggacagtgcgtgccggcgcaatgttccgatctcgagctggcgcggctgatggtgggcgacgccgagggcctggcggcggagtatccgaaggctaccggcggcgcgcctttcctccaggtgcgcgacctgcactggcgcaacccggaccccttcggcgtgtccttcaccggcctcgatctggaggtgcgcagcggcgagatcctcggtatcgccggggtcgccggcaacggccaggacgagttgctcgctctgctcagcggcgaagtgcgcctgccgcgcgcccaggccgagcgcatccgcctcggcgcctgcgccggcgcgcacctggcgccggatgcgcggcgccgcgccggccaggccttcgtgcccgccgagcggctggggcacggcgcggtgccggagatgagcctggcggacaatgcgctgctcaccgccttccagcagggcctggtgaagcgcgggttggtccggcggcgcaaggtgctggcgctggccgaggagatcatccgccgtttcgccgtgaaggccccgggtgccggggcgccggcccgcagcctttccggcggcaacctgcagaagttcatcctcggccgcgagatcctccaggccccgcgcctgctggtggcggcgcatcccacctggggcgtggacgtcggcgcggcggcgctgatccaccgcgcgctgatcgccttgcgcgatgccggtacggcgatcctggtggtctccgaggacctcgacgagctgttcctgctcagcgaccgcatcgccgcgctgtgttcgggtcggctgtgcccggcggtcgccaccgcgagcgcttcgccgcagcaggtcggcggctggatggccggtcaattcgaggcgccggcggcagtcgccggcgccgttgcccaagggagcctgtga

SEQ ID NO: 348014 - DNA, 885 bp, Pseudomonas aeruginosa
atgtgcccatctggcttccggcaggcgatccgcggaaagcgttccggcaccttgaatccgccttgcgaaatgcccggtcggcaactggcgcttctgtgggtttgtctgtggaaaagctgttcgcattccccgttgaaaaaatgccttcggcggtcgggggaaaggcattggacggagccgcaggatttctcccggttggcgaaagagccagggaaaaggtgctgtggaatgcgccacgacagtgcatcgcgaaactgtggacagcggatccacccatggcgccgccgagcatgcttccgtcgatcgccgcggactttcctggaaagccggaaaacccagtattcatgggcatcatggcgtctaaaggggacgtcctggagacattttcacgggcattcccgttccgcgggtttcctgtggaaaagctgttggcaaactgtgccggaagcgggccgccggggctgccccagggattcggccgacccgtggcttggccgggagagatcgtcctgccgtgctcctccgaacggctgtcgatatcttgtggataaagctgttggcaaagtgttggaaaaaatgccttgccaggtcgcgcccatggcctgccgggttggctgttttctgtccaccgccgatgttgcgaaaatcgccgggacgatcggcgcgggaggcttcccaaggtcccggatgggctcccgacacgctgtggataactctgtgagcaaggtggtgatgactgttttgcgacaaatgctcacgcgggtgcgccgcagggttgcccgcaaatgtgccgcggcgtcccaggcgtgccccggcttagtgccgctcggcgcgggagcctggcccgtggctcccggtgcaagccgcgttccagggctttcctga

SEQ ID NO: 348015 - DNA, 1299 bp, Pseudomonas aeruginosa
atgagcagttcggcccatcgcgggcggatcctgcatttcctcggcgacccggcgaaactcggcgacaaggcctgggagtatttcgaggacggcctgctgtggatcgaacacggccacgtgcgcgcgctcgatcacgcaacctacctgctgccgcaactgcccgccgacctgccgctggaggagcatccgcagcgcctgctgctgcccggcttcgtcgactgccatgtgcattacccgcaactcggagtgatcgcctcctacggcacccaactgctggactggctggaaacccacacctttcccgccgagcagcgctttgccgatgccggctacgccgccgcccaggccgagctgttcctcgacgaactgctgcgccacggcaccactaccgcgctggtgttcggcacggtccatgcggtatccgccgaggcattcttccaggccgcgcagaagcgccgcctgcggatgatcgccggcaaggtgctgatggaccgcaacgcgccgccggcgctgtgcgataccgcggccagtggctacgccgagagccgcgcgctgatcgagcgctggcacggcaacgggcgcctgcaatacgcggtcaccccgcgcttcgcgccgacctcctcgcccgagcaactggccgcggcggcgcgcctgctggacgagtatcccggcgtctacctgcacacccatctttcggagaacctcaaggaagtcgcctgggtcggcgagctgtttccccaggcgcaggactacctggacgtctatcatcgcgccggcctggtcggcgaacgcagcgtgttcgcccatggcatccatctctccgaacgcgaatgccgctgcctggcgcacaagaacgcggcgctggcgcactgtcccagttccaacctgttcatcggctccggcctgttcgaccttggccgcgcccagcaatacggcatccgcgtcggcatcggcagcgacgtcggcggcggcaccagcctgtcgctactggccaacctcgccgacgcctacaagatccagcaattgcgcggcaccagcctcgatccgttccaggcgctctacctggccaccctcggcggcgccagggcgctcgacctggacggcctggtcggtaacttcctgcccggccgcgaagccgacttcgtcgccctcgacctggccgccacgccgatgatcgcccagagcatggagcatgcgcgcggcctggccgataccctgttcgtgctgaacaccgtgggcgacgaccgcgcggtggcggagacctgggtgatgggggagcggcgccatgcgaaggggtga

SEQ ID NO: 348016 - DNA, 918 bp, Pseudomonas aeruginosa
atggccaaatcccgcaacccgtcgctcggccaggtcagcgatttcgatatccgcctgctgcgcatcttcaagaccatcgtcgagtgcggcagtttctccgccgcggagagcactctcggcctcagccgctcggcgatcagcctgcacatgggcgacctggagaagcgcctgggcatgcgcctgtgccagcgcggccgcgccggcttcgccctgaccgacgagggccgcgaggtctatcgcgcgacccagaccctgctggcggcgctggaggggttccgcgccgaggtcaacgacctgcaccagcacctgcgcggcgaactcaacatcggcatcatcaacaacctggtgaccctgccgcagatgcgcatcacccacgctctcagcgcgctcaaggggcagggaccgcaggtgcggatcaacatcggcatgaccacccccaacgagatcgaactgggcgtgctcgacggccacctgcatgtcggcgtggtgccgttgatcagtccgctgtcggggctcgagtacctgccgctgtatgacgagcacgcgcagctctattgcagccgcggccacgcactgttcgagcgcgccgacggcgatatcgcggtggacgaggtgctcgccgcggacgccgtggcgcccagctaccgcctgcccgccgaagcccaggcgcgccaccaggagctgaacaacagcgccagcgcctcggaccgcgagggcatggcattcctgatcctgaccggcaacttcatcggctacctgccgtcgcactacgctgccgactgggtcgccgccgggatgctgcggcccctgctgccggagcgtttccactacgccatcgcgctgaccatcgtgacccgcaagggacgccggccgaacctggtgctggagcgcttcctggaggcggtggcggtgtcgtga

SEQ ID NO: 348017 - DNA, 1347 bp, Pseudomonas aeruginosa
atgaaccagccgctcaacgtggccccgccggtttccagcgaactcaacctgcgcgcccactggatgcccttctccgccaaccgcaacttccagaaggacccgcggatcatcgtcgccgccgaaggcagctggctgaccgacgacaagggccgcaaggtctacgacagcctgtccggcctgtggacctgcggcgccggccactcgcgcaaggaaatccaggaggcggtggctcgccagctcggcaccctcgactactcgccgggcttccagtacggccatccgctgtccttccagttggccgagaagatcgccgggttgctgccaggcgaactgaaccacgtgttcttcaccggttccggctccgagtgcgccgacacctcgatcaagatggcccgcgcctactggcgcctgaaaggccagccgcagaagaccaagctgatcggccgcgcccgcggctaccacggggtcaacgtcgccggcaccagcctcggcgggatcggtggcaaccgcaagatgttcggccagctgatggacgtcgaccatctgccgcacaccctgcaaccgggcatggcgttcacccgcgggatggcccagaccggcggcgtcgagctggccaacgagctgctcaagctgatcgaactgcacgacgcctcgaacatcgccgcggtgatcgtcgagccgatgtccggctccgccggcgtactggtaccgccggtcggctacctgcagcgcctgcgcgagatctgcgaccagcacaacatcctgctgatcttcgacgaggtgatcaccgccttcggccgcctgggcacctacagcggcgccgagtacttcggcgtcaccccggacctgatgaacgtcgccaagcaggtcaccaacggcgccgtgccgatgggcgcggtgatcgccagcagcgagatctacgacaccttcatgaaccaggcgctgcccgagcacgcggtggagttcagccacggctacacctactccgcgcacccggtcgcctgcgccgccggcctcgccgcgctggacatcctggccagggacaacctggtgcagcagtccgccgagctggcgccgcacttcgagaagggcctgcacggcctgcaaggcgcaaagaacgtcatcgacatccgcaactgcggcctggccggcgcgatccagatcgccccgcgcgacggcgatccgaccgtacgtccgttcgaggccggcatgaagctctggcaacagggtttctacgtgcgcttcggcggcgataccctgcaattcggcccgaccttcaacgccaggccggaagagctggaccgcctgttcgacgcggtcggcgaagcgctcaacggcatcgcctga

SEQ ID NO: 348018 - DNA, 288 bp, Pseudomonas aeruginosa
atgagcggccgcccgcaagccgtacccaccgtgcaggtggacaacgccgaggtgatcgtgaccgaatggcgcttcgcccccggcgcggaaaccgggcgccaccgccacggccacgactatgtggtggtaccgctgaccgacggcacgctgctgctggaaacccccgagggcgaccgccatgcgccgctggtcgccggacaggcctacttccgcaaggccggcgtcgagcacaacgtgatcaacgccagcgcacacgaagtggtcttcgtcgagaccgagatcaagtaa

SEQ ID NO: 348019 - DNA, 1494 bp, Pseudomonas aeruginosa
atgggcaccctccaccacctgatcaacggcgaaatggtcgccgacaacggccgcagcgccgacgtcttcaacccctccaccggcgaagccatccacaaggtcccgctggccgacggcaagaccctgcagaaagccatcgatgccgccagggccgctttcccggcctggcgcaacaccccgccggccaagcgtgcacaggtgctgtaccgcttcaagcaactgctggagcagaacgaggcgcggatttccaagctgatcagcgaagagcacggcaagaccctggaagatgccgccggcgaactcaagcgcggcatcgagaacgtcgagtacgcctgcgccgccccggaaatcctcaagggcgagtacagccgcaacgtcggcccgaacatcgacgcctggagcgacttccagccgatcggcgtggtcgccgggatcaccccgttcaacttcccggcgatggtgccgctgtggatgtacccgctggccatcgcctgcggcaacaccttcatcctcaagccctccgagcgcgaccccagctccaccctgctgatcgccgagctgttccacgaagccggcctgccgaagggcgtgctgaacgtggtgcacggcgacaaggaagccgtggacggcctgctccaggcgccggaagtgaaagccatcagcttcgtcggctcgacccccatcgccgaatacatctatgccgagggcaccaagcgcggcaagcgcgtgcaggccctgggcggcgcgaagaaccatgcggtgctgatgcccgacgccgacctcgacaacgccgtcagcgcgttgatgggtgccgcctacggctcctgcggcgagcgctgcatggcgatctcggtggcggtatgcgtcggcgaccaggtggccgacgcgctgatcgccaagctggttccgcagatcaaggcgctgaagatcggcgccggcacttcctgcggcctcgacatgggcccgctggtcactgccgccgcgcaggccaaggtcaccggctacatcgacagcggcgtggcccagggcgcggagctggtggtggacggccgcggctaccaggtcgccggccacgagaacggcttcttcctcggcggcagcctgttcgaccgggtgaccccggaaatgaccatctacaaggaagagatcttcggcccggtgctgtgcgtggttcgcgtcaacagcctggaagaggccatgcagttgatcaacgaccacgaatacggcaacggcacctgcatcttcacccgcgacggcgaggccgcacgcctgttctgcgacgagatcgaggtcggcatggtcggcgtcaacgtcccgctgccggtgccggtggcctaccacagcttcggcggctggaagcgctcgctgttcggcgacctccacgcctacggcccggacggcgtgcgcttctacacccggcgcaaggccatcacccagcgctggccgcagcgggccagccacgaggcctcgcaattcgccttccccagcctctga

SEQ ID NO: 348020 - DNA, 1428 bp, Pseudomonas aeruginosa
atgtccaaagtcgtactggcttcacaactgccgaacaagcgcaacgcctcgctcgcgcccggcctgaaacaacgccacgtcaccatgctgtcgatcgccggggtgatcggcgccggcctgttcgtcggctccggccatgccatcgccgccgccggcccggccgccctgctcgcctacctgatcgccggcaccctggtggtgctggtcatgcgcatgctcggcgaaatggcggtcgcctcccccgataccggttccttctccacctacgccgaccgctccatcggccgctgggccggtttcaccatcggctggctctactggtggttctgggtgctggtgatcccactcgaagcgatcgccgccgcggccatcctcaacgcctggttcccggccatcgacacctggatcttcgccctcgcggtgaccttcctgctcaccgtcaccaacctcttcagcgtggcccgctacggcgagttcgagttctggttcgcgctgctcaaggtgatcgccatcatcgccttcatcgtgctcggcgcggtggccatcgtcggcggcctgccggagcgtgaggtcagcggcctgtccagcctgatggcgagccacggcggcttcgtgccgaacggctacggcgcggtgctcggcgccctgctgacgaccatgttcagcttcatgggcaccgagatcgtcaccatcgccgccgccgagtccaaggacccggcgaagcagatcacccgcgccaccaactcggtgatctggcggatcggcctgttctacctggtgtcgatcttcatcgtgatctccatcgtgccgtggaacgacccgctgctgatccaggtcggctcctaccagcgcgccctggagctgctggacatcccgcacgccaagctgatcgtcgacctggtggtactggtcgccgtggccagttgcctgaactcggcgatctacacctcgtcgcggatggtcttctccctggccaagcgcggcgacgccccgagcgtgctcaagctgaccaacaccgcccacgtaccgcgcccggcggtgctggccagcaccgcggtgggcttcctcaccaccatcgtcaactacttcgcaccggagaaggtcttcaccttcctcctcgccagctccggcgccgtggcgctactggtgtacctggtgatcgccgtggcccagttgcgcatgcgcaagcaattgcaggccagcggccagcccatcgagttccgcatgtggctgtatccctggctgacctgggcggtgatcctgttcatcgtcgccgcgctgagcatcatgctgatcatgccggagcaccgtcacgaggtgttcaccaccgctctgctgacgatcttcaccgtctgcctcgggctgctcaacgcgcgacgcaagccgcgcctcggcgaggactacgccgggaagacggcgcgggtctga

SEQ ID NO: 348021 - DNA, 342 bp, Pseudomonas aeruginosa
gtgagcacgctgccgccctgtccccaatgcaactccgaatacacctacgaggatggtgcgctgctggtctgcccggagtgcgcccatgaatggtcgccgaacgaggccgctacggcgtccgatgatggcaaggtgatcaaggattcggtgggcaacgttctccaggacggcgataccatcaccgtgatcaaggacctgaaagtgaaaggctcctcgctggtggtgaaggtcggcaccaaggtgaagaacatccgcctggtggacggcgaccacgacatcgattgcaagatcgacggcattggcgcgatgaagctgaaatcggaattcgtcaggaaggtctga

SEQ ID NO: 348022 - DNA, 501 bp, Pseudomonas aeruginosa; identical to SEQ ID NO: 319593

SEQ ID NO: 348023 - DNA, 621 bp, Pseudomonas aeruginosa; identical to SEQ ID NO: 319592

SEQ ID NO: 348024 - DNA, 228 bp, Pseudomonas aeruginosa
atgagcaccgtagtctcgttccgcgccgatgacgccctggtcgcggccctcgacgaactggcccgcgccacccaccgcgaccgcccctaccacctgcggcaggcgctcgcgcagtacctggaaaggcagcagtggcaggtcgctgccatcgatgaaggcttggccgatgccaatgccggtcgcctgctggaacacaccgagatcgagaagcgctgggggctgcaatga

SEQ ID NO: 348025 - DNA, 282 bp, Pseudomonas aeruginosa
atgagcctgaagtggacccgcaaggcggccgccgacctggacgccatctacgaccattacgtcgtgctgatcggcccggaaaaagctctgaaagccgttcaggacatcgtcgagcaggtgaaaccgctgcagcaggtagccaaccagggggcagggcggcccagcgaggtgccaggcgtacgcaccctgaccctggagcgctggccgttcagcgccccgtttcgggttaaaggcaaggaaatccagattttgcgcatcgacagggtcgaaattaccccctga

SEQ ID NO: 348026 - DNA, 909 bp, Pseudomonas aeruginosa
atggattcgctgaaaggcatggcgatcttcgccactgtggtgggcaagggctcgatggcagccgcggcccagagcctgggcatgaccccttcggcagtcagccagcagatccgcaagctggagagccgcgcccaggtcactttgctgcatcgcaccacccgccggctgaccctgaccgaggccggcgaggcgttctatcgcagttgcgcgcagatgctggcgatcgccgaggaagccgagcggcggcttggcgaatggcgcgatgcgccggtgggtgagttgcgcctggcggcgccggtggggttctccggcacgctgatcacccaggcgctgaaaccgttgctggagaaccaccgccagttgcgcctgcagctgttcttccaggacgagcgcatcgatctggtcgccgagcgcatcgacctggcgatacgcgtcggcaatctcgccgactccagcctggtggcgcgccacctcggcgattggagcagcgtgctctgcgcggcgccggcctatttgcgccaacgggcgcccatcaaccgtccggagcagttgaccgaggtcgactggatttccctgaacacctcgaaccacctcaaccacctgacgctcagcgggccgggcggggaagtctgcaaactgcgcctggagccacgggtggccgccaacgggatgctcgcggtgcgtcagttcaccctcgacggactcggcgtgtcctaccagccgctgccggaggtgcgcgacgcgctgaacgacgggcgcctgcaacagctattgccggagtggaggattcccgggctcggcatctatgcggtgacgccacggcgcgaggcccagccggccaaggtgaaggtcgccatcgaggcgctgcggcgagcgttcgccacggacggggatgagcgctggagctga

SEQ ID NO: 348027 - DNA, 411 bp, Pseudomonas aeruginosa; identical to SEQ ID NO: 319588

SEQ ID NO: 348028 - DNA, 735 bp, Pseudomonas aeruginosa
atggtcggattcgaagcacgtacccagcagggcgccgcgctgcgccccaccagccatttcgtctacgaaagcatctacacggcaatcctggaaaagcgcctggcgccggccgccaagctgagcaaggaaaccctcgggcagatcttccgggtcagcaacggcaccatccagcgtgccctcacccgtctcgccgaggacggcgcggtggtgatgccgccgaaggaggtcgccagcgtcgcccgcccggacgagcgccaggcgcggcaggtgctggacgcgcgcctgctggtggaaagcgaagtggtgcggcaactgcccgcggggctggatcccgccgcccttgccgagctacgggcgctggtcgacgaggagcaggcttgcctcgcggcccgcgacagcgccgggctgatccgtctcgccgggcgcttccacctgcgcctggccgaactgaccgagaatcccttgctgcagggtttcgtccgtggcctggtggcacgcgcctcgctggacatcgcgctgaacaagggggcggtctataccgccgaggcctgcgccgcgcagcgcgccctgctcgatgccctggaggacggcgacagcgcggcggcggctgcgctgatggacgcttacctgcgaggcctgttcgcccgcatgcgcttcctgcctccacccaccaccgacctgcgcgaggcattcggcatgaaggcccctcgcggggaaaaacgccggagggcctga

SEQ ID NO: 348029 - DNA, 687 bp, Pseudomonas aeruginosa
atgttttcttcgtccaagctggtcaacgcggttgcccagcgcctgctcgacaccatcgagcagggtcgctgggtcgccggccagatgttgcccggccagcgcgagctggctgagcagatggaaatcagccggccgagcctgcgcgaggcgatcatggtcctggagaccctgggcgtggtccgttcgctgccgggcaagggcgtgatggtcctcgaacgcagcgaaccgctgcgcgaggtcgcggcgcccggcgaggcgaccatggaagacgtcctgcaactgcgctatgcgctggagccgttcatcgtcggcatcgtcgcgcagagcgccggggcggcggagatcagcgaactgcggctgttgctgctggacctgcgcgaagcggtcgaggatggcgacccgcaggctctggttgaggcctacacggccttccaccggcgcctggtgaagctcacctcgaacccgatcttcctcagcgtttccgaacagatcggcagcgccctggaacgcagcgacaacctggtgcgccgccagccggaatacgccgaggagatcctccaggaacacgacgccatcctccgtgcgatccgccagcacgacagcgagcgggcgagccaggcgatgcgccagcacatcctcaacgaaggcgcgcgcctgaacatcgacctgcgcttgccgcaggtctga

SEQ ID NO: 348030 - DNA, 1335 bp, Pseudomonas aeruginosa
atgttcatcaagcgctgttcccgctcgatattcctgcaagtcgtgattggcctggtgataggcgtgatctgcggggtcggcattcccgacctggccgtgcagatgaagccgctgggcgatggcttcatcaagctgatcaagatgctcatcgcactgatcgtcttctgcgtggtggtcaacggcatctccggcgccggcgacctgaagaaggtcggccgcatcggcctgaagtcggtgatctacttcgaaatcctcaccaccatcgctctggtcctcggcctggtggtcgcctacagcctgggcctgggcagcggcgccaacatccatctcaacgaattgcccgccggcgacgtcgccctgtataccgggcgcacccaggagatccacggccccgtggcattcctcatgggcctgatcccgacctctgtgttcagcgccttcgccgagaacgacatcctccaggtcctgctgttctccgtgctgttcggcagcgccctgaacctggtcggcgagcaggccagcggcgtggcccgcctgatcaacgaattcagccacatcgtgttccgcatcatgggcatgatcgtgcgcctggcaccgctcggcgtgttcggcgcggtggccttcaccaccgcccgctacggcgtcgactcgctcagccacctgggcgcgctggtgctggtgttctacgccacctgcctggtcttcgtcatggcggtgctcggcagcgtcctgcgtctctccggggtgcgcatgctgccgttcctgcgctacttccgcgaagagctgctgatcgtgatgggcaccgcctcctccgacgcggtgctgccgcaggtgatgcgcaagctcgagcacatgggcatccgcagctccacggtaggcctggtgattcccaccggctactcgttcaacctcgacggattctcgatctacctgaccctggcggtggtgttcatcgcccacgtcaccggcacgccgctggcgatgaccgacctgatcaccatcctgctggtttcgctggtcacctccaagggcgcccacggcattcccggctcggccctggtgatcctcgccgccaccctcaccgcggtgccggcgatcccggtggccggcctggtgctggtgctttcggtggactggttcatgggcatcggccgcgcgctgaccaacctgatcggcaactgcgtggccaccgtgaccatcgcccgctgggaaaacgacatcgatatgccgcgcgcgcaggccatactcgacgggcgcctggaggcgccggccaaggccgacggcgagccgctcaagcgcagcgcggtggccggggaaggcaagctgcatggctga

SEQ ID NO: 348031 - DNA, 588 bp, Pseudomonas aeruginosa
atgagcaagcaaatcgagttcttcttcgacttcggcagtcccaccacctacctcgcctggacccaactgccgcgcatcgccgccgcccatggcgcgagcatcgcctggcggccgatgctgctgggcggcgtgttcaaggccaccggcaaccattcgccgatcgaggtgccggccaaggggcgctacaccctccacgacctggcgcgctatgcgaaacgctacggcgtgccgctggccttcaacccggccttcccgatcaacaccctgacgctgatgcgcggcgcccagggctatctcggcggcgaagggttccagccctacctgaaagcggtgttcgaagcgttgtgggtacgacagcagaacctcggcaagcccgaggtggtcgcccaggtgctggcggaggctgggttcgatccggatgagttcctccgcctggttggcgacgagcaggtcaaggaggggctcaaggcgaccaccgaagaggcggtgcggcgcggcgtcttcggcgcgcccagcttcttcgtcggcgaccagttgttcttcggccaggatcgcctcgatttcgtcgccgaggccctcgccggctga

SEQ ID NO: 348032 - DNA, 729 bp, Pseudomonas aeruginosa
atgacccagcgcaaagcggttctggtaatgggcgccggcgacgccaccggtggcgccatcgcccggcggttcgcccgcgagggctacgtggcgtgcgtcgcccggcgcaacgcggagaagctggagccgctggtgcaggccatccgcgaccaaggcggcgaggctctggcctgcggctgcgacgcacgccaggagcagcaggtgatcgacctcttcgcccgcatcgagggtgaggtcggtgcgctggaggcggtgatcttcaacgtcggcgccaacgtctggttcccgatcaccgaaaccaccgaacgggtctatcgcaaggtctgggagatggccgccttcggcggcttcctcaccggccgcgaggcggcgcgggtgatgctgccgcggcagcgcggaacgatcatcttcactggcgccaccgcctcgttgcgcggccgcgcgcatttcgccgcgttctccggcgccaagttcgccctgcgtgccctggcccaaagcatggcgcgcgagctggggccgaagggcatccacgtcgcccacccgatcatcgacggcgccatcgacaccgacttcatccgcgaaaccctgcccgagctgtacaagcgcaaggagcaggacggcatcctcgatcccgagcacatcgccgagacctactggcagatccactgccagccgcgcgactgctgggtgcacgaactggacctgcgcccctggatggaaaccttctga

SEQ ID NO: 348033 - DNA, 474 bp, Pseudomonas aeruginosa
atgcgttgggaagaactgagcgaacaaccctgttcgctggcgcgggtgctggcgatcgtcggcgatcgctggaccctgctggtattgcgcgactgctttctcggcgtgcgccgtttcgacgacttcgagcgcagcctcggcgtgacccgtcacgtcctcgccgaccgcctcaagcgccttgtcgaagcggagatactggccaaggtgccctaccaggaaaggccgctgcgcgaggaataccggcttaccgagaaagggatggaactgtacccggccatcctttccctggtgaactggggcgaccgccacctcgccggcgtcgaggggccgccactcgagcatgtgcacaagcattgcggccaacacatgcatggcgtgctggtctgttccgaatgcggtgagccgctgcacgcgcgggacgtgacggtacgcgaggggctgttctggaaggggcgcctgctgcggcgcggctga

SEQ ID NO: 348034 - DNA, 453 bp, Pseudomonas aeruginosa
atgtcgctcgactggacctgcaagcaccacgccgacctcaccctgaaggaactctacgcggtgctgcaattgcgcaccgaggtcttcgtggtggaacagaaatgcccctatcaggaagtcgacggcctcgatctggtcggcgatacccatcacctgatggcctggcgcgacggccagttgctcgcctacctgcgcctgctggacccggttcgccacgagggccaggtggtgatcggccgggtggtcagttcctcggccgcgcgcggccaggggctcggtcaccagttgatggaacgcgcgctgcaggcggcggagcgcctctggctggataccccggtgtacctctcggcccaggcccacctgcaggcctactacggccgctatggcttcgtcgcggtcaccgaggtctacctggaagacgacatcccgcacatcggcatgcgccgggcctga

SEQ ID NO: 348035 - DNA, 636 bp, Pseudomonas aeruginosa
atgactcgagtcaacaagaccgtcctcgtcctcgtcgccctggtcgccctggtcctcggcctcaccgtgcacaaggtgctcaccgcccagcgccaggccgatcccaccgtgctgctcgacgccggcatcgtgatcctgccgcagacgcgcaaggtgccggcgctggagttcaccaaccaggacggccaggcggtcagcactgccagtctcaagggtcgctggcacctgctgttcttcggctacaccttctgccccgatgtctgcccgaccaccctcgcccagctccgcgaattgcagggcaagctgccgcaggaggtgcgcgacgacctgcaggtggtattcatcagcgtcgatccgaaccgcgacacgccgcagcagatcaagcaatacctgggctacttcaacgccggcttccaggggctcaccggcactccggagaacatccagaagctggccaacgccatgagcatcccctacatccccgccgacaccagcaagcccaactacaccgtcgaccacagcggcaacctggtgatcatcggcccggacggcgagcagcacggcttcatccgcgcgccgctgaacaacgccaagctggaagcccaactgcccggcgtgctcaagccgcaggcctga

SEQ ID NO: 348036 - DNA, 915 bp, Pseudomonas aeruginosa
atggccaccgtcatcgatcgccacagccagccgacctggcgcgacttcctcgaactgaccaagcccaaggtcgtggtgctgatgctgatcacctcgctgatcggcatgctgctcgccaccaaggcgccgctggatggcttcgtgccctggcaggtgctgatcttcggcaacctcggcatcggcctttgtgccggcgcggcggcggcggtcaaccatgtggtggaccggcgcatcgactcgatcatggcgcggacccacaagcgaccgctggccgagggccgggtgtcgccgagcatggcgctgggcttcgcgctgctcctggcgctggccgggatggccgtgctgctggccttcaccaacccgctgacggcctggctgaccctcgcctcgctgctcggctacgcggcgctctacaccggcttcctgaagcgcgccacgccgcagaacatcgtcatcggcgggctcgccggggcggcgccgccgctgctcggctgggtcgccatcaccggccacctgagcgccgagccgctgttgctggtattgatcatcttcgcctggaccccaccgcacttctgggcgctatgcatccaccgcaaggacgaatacgccaaggccgacatcccgatgctgccggtgacccacggcgagcgctacaccaagctgcacatcctgctctataccctggtgctgttcgcggtgagcctgatgccgttcgtcatccacatgagtgggctggtctacctgctctgcgccctggccctgggcgcgcgcttcctcgactgggcctgggcgctctactgtgacagccggccacatgcggcgataaagaccttcaagtactctatcgtctacctgttcctgctgttcatggcgctgctggtggaccactatctgccgctgaagctgcttctctga

SEQ ID NO: 348037 - DNA, 1074 bp, Pseudomonas aeruginosa
atgacaggcgcaacccgcaaacccggtttcaccgtcgccgtgctggcgaccctgctggccgccgtggtggtcctgctcggcgcctatacccggctgacccacgccggcctcggctgtccggactggccaggctgctacggcttcgtccacgtgccgctgagcgaggcgcaactggcccacgccgaactgcacttccccgacgccccggtggaggcacagaagggctggaacgagatgatccaccgctatttcgccggcgccctcggcctgctcatccttggcctggcgttgcatgcgctggtccgccgcgggcgcgacggccaaccgctgaagctgccgctgctgctgctcgcggtggtgatcgcgcaggccgccttcggcatgtggacggtgaccctcaagctctggccgcaggtggtcaccgcccatctgctcggcggcttcaccaccctggcgctgctctttctcctcgccctgcgcctctccggacgcttcgcggcgcggcgctacccggcggcgacccgcggactggcggggctggccctgctcctggtgatcggccagatcgccctcggcggctgggtcagcagcaactatgcggcggtggcctgcatcgacctgcccacctgccatggcgagtggtggccgcggatggacttcgccaacggcttccacctgacccagcacatcggccccaactacctcggcggccagctcgacagcgacgcgcgcacggcgatccacatgacccaccggatcggcgcgctgtgcgtgaccctggtcctcctgctgctcgcctggcgcctgcagcgcagcggcctggtctggccgactgcgctgatgctgctcggcctgtcgctgcagatcggcctgggcatcagcaacgtgctgctgcacctgccgctgccggtggcggtggcgcacaacggcggtggcgccctgctgctgctcagcctggtgttggtcaactatcgcctgcgcgcgccggccagcgtccgcgcgccggcaccgtcgccgcagcgcgtgcgccgcacgctgccgccggcgcaaggttctcggctgaaggccgcctga

SEQ ID NO: 348038 - DNA, 579 bp, Pseudomonas aeruginosa
atgagtctcgcgattccgatgcctgaacgtccgcgccgcgcccgtggccgcctgcaactgctggcgatcatcggcctggtggtggggccgatgctgctcgccagcgccatgtacaaatggaatttctgggttccgcaggggcgcagctacagcggcgcgctgatcggcaacggccagacccccgccgacctcggcgtgcagggacgcagccagggcgagcagtggcaactgctggtgaccgcgccgggtacttgcggcgaggactgccagcaactggtctacctggcccgccaggtcaacatcgccctcggccgcgaagcctcgcgcgccggccacgccctggccgccagtggcgagttgccggcggacttcgccaacctggtgaggcaggactacccgcgcctgcagcgctacggcctggacccggccctgtacgacaaggccggcggcggcgagcggccgctgctgtgggtggtcgacccgcacggcaacctggtgctgcgctacgacgccaaggccaacggcaagaagctgctgaaggacgtgcaactgctgctcaagctctcgcatatcggttga

SEQ ID NO: 348039 - DNA, 795 bp, Pseudomonas aeruginosa
atggggggattcatgcagtatagccagcgcctcggggaggccggacgcaatgacagacgcagcatgcgtggcgcgttccgccccggcctgctgccgaccctggtggtcctcggcctgctgccggtactgctctggctgggcacctggcagttgcagcgggccgacgagaagcgcgccctgctggccagctacgaggcccggcgcggcgccgagccggtgtcgcccgggcagctagagggactgcgcgacccggcgtacgtccgcgtgcgcctgcacggccgcttcgaccagcggcatacgctgctgctggataaccggctgcgcaacggacaggccggggtcgaggtgctgcaacccttctacgaccaggccagcggcctttggctgctggtcaaccgcggctgggtcgcatggactgaccgacgctcgccgccgacgctggaaacccccgaccgcgtcctcctgctcgacgcctggacctacctgccgccacccggcggcctgcacctggccgacgcgccggccggcggctggccgcgcctggtgacccagctcgacatcccggcgctgtggcaggccttcggtcgcgccgggctgccctgggaaatccgcctggaagcgggcgacgccagcttcgacaccgattggcccctggtctcgatgccgccggagcggcacaccggctacgccgtgcagtggttcgccctggcgacggccctgctcgccctctacctctacctcggtgtgcgccgcgcacgggagaaaaaccatgagtctcgcgattccgatgcctga

SEQ ID NO: 348040 - DNA, 210 bp, Pseudomonas aeruginosa; identical to SEQ ID NO: 319575

SEQ ID NO: 348041 - DNA, 888 bp, Pseudomonas aeruginosa
atggcaagccacgaacactattacgtccccgcccagagcaagtggccgatcatcgccagcatcggcctgctggtgacggtgttcggcctgggtacctggttcaacgacctcaccgccggccacaaggagtcccatggcccgtggatcttcttcgtcggcgggctcatcatcgcctacatgctgttcggctggttcggcaacgtcatccgcgagagccgcgccggactctacagcgcgcagatggaccgctcgttccgctggggcatgagctggttcatcttctccgaggtgatgttcttcgccgccttcttcggcgcgctgttctacgtccgccacttcgccggtccctggctcggcggcgagggtgccaagggcgtggcgcacatgctctggccgaacttccagtacagctggccgctgctgcagaccccggatccgaagctgttcccgccgccgagcgcggtgatcgagccgtggaagctgccgctgatcaacaccatcctgctggtcacctccagcttcaccgtgaccttcgcccaccacgccctgaagaagaacaagcgcggcccgctcaaggcctggctggcgctgaccgtcctgctggggatcgccttcctgatcctgcaggccgaggagtacgtgcacgcctacaacgagctgggcctgaccctcggcgccggcatctacggctcgaccttcttcatgctcaccggcttccatggcgcccacgtgaccctcggcgcgctgatcctcggcatcatgctgatccgcatcctgcgcggtcacttcgatgccgagcaccacttcggcttcgaggccgccagttggtactggcacttcgtcgacgtggtctggatcggcctgttcatcttcgtctacgtgatctga

SEQ ID NO: 348042 - DNA, 555 bp, Pseudomonas aeruginosa
atgagcgatgccaaggtcgatacccgccgcctggtcggccgcctgctgctggtgaccgtgctgatgttcgccttcggcttcgccctggtgccgctctatgacgtgatgtgccgcgccctggggatcaacggcaagaccgccggcagcgcctacagcggcgaacagcaggtggatgtcgggcgcgaggtgaaggtgcagttcatgacctcgaacaatatcgacatggtctgggagttccgctccgccggcgaccagttggtggtgcatcccggcgcggtgaaccagatggtgttctacgcgcgcaacccgagcgacaagccgatgactgcgcaggccatcccgagcatcgccccggccgaggccgccgcctacttccacaagaccgaatgcttctgtttcacccagcaggtgctgcaacccggcgagagcatcgagatgccggtgcgcttcatcgtcgaccgcgatctgcccaaggatgtgcggcacgtgacgctggcctacaccctcttcgatatcactgcgcggaagccgcccgtaccggttgcgggacgataa

SEQ ID NO: 348043 - DNA, 1593 bp, Pseudomonas aeruginosa
atgagtgctgtgatcgatacgcccgaccaccatgccggcgaccaccaccacggaccggccaagggcctgatgcgctgggtgctgacgaccaaccacaaggacatcggcaccctctacctgtggttcagcttcatgatgtttctgctcggcggctcgatggccatggtgatccgcgccgagctgttccagcccggcctgcagatcgtcgagccggcgttcttcaaccagatgaccaccatgcacggcctgatcatggtcttcggcgcggtgatgccggccttcgtcggcctggccaactggatgatcccgctgatgatcggcgcgccggacatggccctgccgcggatgaacaacttcagcttctggctgctgccggcggccttcggcctgctggtcagcaccctgttcatgcccggcggcggccccaacttcggctggaccttctatgcgccgctgtcgaccaccttcgccccgcacagcgtgaccttcttcatcttcgccatccacctggccgggatcagctcgatcatgggcgcgatcaacgtgatcgccaccatcctcaacctgcgcgccccgggcatgaccctgatgaagatgccgctgttcgtctggacctggctgatcaccgcgttcctgctgatcgcggtgatgcctgtgctggccggcgtggtgaccatgatgctgatggacatccacttcggcaccagcttcttcagcgccgccggcggcggcgacccggtgctgttccagcacgtgttctggttcttcggccaccccgaggtgtacatcatgatcctgcccgccttcggtgcggtcagtgcgatcatcccgaccttcgcgcgcaagccgctgttcggctacacctcgatggtctacgccaccgccagcatcgccttcctctccttcgtggtctgggcgcaccacatgttcgtggtcggcatcccggtcaccggcgagctgttcttcatgtacgccaccatgctgatcgcggtgcccaccggggtgaaggtgttcaactgggtgaccaccatgtgggagggttcgctgaccttcgagacgccgatgctgttcgccgtggccttcgtcatcctgttcaccatcggcggcttctccggactgatgctggcgatcgccccggcggacttccagtaccacgacacctacttcgtggtcgcccacttccactacgtgctggtgcccggcgcgatcttcggcatcttcgcctcggcttactactggctgccgaagtggaccggccacatgtacgacgagaccctcggcaagctgcacttctggatgagcttcatcggcatgaacctggcgttcttcccgatgcacttcgtcggcctcgccggcatgccgcgacggatccccgactacaacctgcagttcgccgacttcaacatggtttcgtcgatcggcgccttcatgttcggcaccacccagctgctgttcctgttcatcgtcatcaagtgcatccgcggcggcaagccggcccctgccaagccctgggacggcgccgagggcctggagtggagcatcccctcgccggcgccctaccacaccttcagcaccccgcccgaggtcaagtga

SEQ ID NO: 348044 - DNA, 1101 bp, Pseudomonas aeruginosa
atgggcttccttttgctctcggcgatcagccaggcgaatgccgcctggacggtcaacatggccccgggcgctaccgaggtgagccggtccgtcttcgacctgcacatgaccatcttctggatctgcgtggtgatcggcgtgctggtcttcggcgcgatgttctggtcgatgatcgtccaccgccgctccaccggccagcagccggcgcacttccacgagagcaccacggtggaaatcctctggacggtggtgccgttcgtgatcctggtggtgatggcggtgcccgccacccgcaccctgatccacatctacgacacttccgagccggagctggacgtgcaggtcaccggctaccagtggaagtggcagtacaagtacctgggccaggacgtcgagtacttcagcaacctggccaccccgcaggaccagatccacaaccggcaggcgaaggacgagcattacctgctggaggtggacgagccgctggtgctgccggtgggcaccaaggtgcgcttcctgatcacctccagcgacgtgatccattcctggtgggtgccggccttcgcggtcaagcgcgacgccatccccggcttcgtcaacgaggcctggaccaaggtcgacgagcccggcatctatcgtggccagtgcgccgagctgtgcggcaaggaccacggtttcatgccgatcgtggtcgacgtcaagcccaaggccgagttcgaccagtggctggccaagcgcaaggaagaggcggcgaaggtcaaggaactgaccagcaaggagtggaccaaggaagagttggtcgcgcgcggcgacaaggtctaccacaccatctgcgccgcctgccaccaggccgaaggccagggcatgccgccgatgttcccggcgctgaagggttcgaagatcgtcaccgggcccaaggagcaccacctggaagtggtcttcaacggcgtgcccggcaccgccatggcggccttcggcaagcagctcaacgaggtcgacctggccgcggtgatcacctacgagcgcaacgcctggggcaacgacgatggcgacatggtcaccccgaaagacgtcgtcgcctacaagcagaaacaacaatag

SEQ ID NO: 348045 - DNA, 639 bp, Pseudomonas aeruginosa
atgaacaccgctgccctccgtgaactcatccagcaggcgcacctcagcgaagcccgccacggtcacctggctgatctgatagccagccgcctgccccgcctgcatcgcaccatccagccgcaaggcgagaacacggaagacatactcacccgcttcgtccacgcctacgtcgaacaggtaccggacctgctcgacgccgccaacagcgtggcccgcgaagccggcatcgaggaacggatcaagccggtgctgaaggtcgccgagcagttcttcctcaccccgccggcgttgctcgccggccacgacggcctcgacgccctgctcgacgaagcctacctggcgcaccgcctggtggaagaagtgaacgaccgctacatcgcccatttcggccaggcgctgatcccgctggacaccaccgtggccaacctggtggcccaccagttgatcggcgaacccttcgccaaccggctggacgaagccgtccaccatgcggtggagaacatgctcgacgccaccaccttcgacgccgactcggcccgcgcctaccgcgagaacctgaagaacccgcgggtggtcgccgcctggcagcagtggccgtgcctgtcgaagcagctcggggtggaactcagcctgggctga

SEQ ID NO: 348046 - DNA, 1572 bp, Pseudomonas aeruginosa
atgcatgtttcaaaggtgtttccgtccctccgggacacgttgccgcgggacctgatggcctccgtggtggtgttcctcgtcgccctgccgctgtgcatgggcatcgccatcgcctccgggatgccgccggccaagggcctgctcaccggcatcgtcggtggcctggtggtcggcttcctggccggctcgccgctacaggtcagcggcccggcggccggcctcgcggtgctggtcttcgaactggtgcgtacctacggggtggccatgctcgggccgatcctgctgctcgccggcgccatccagctgctcgccgggcggctgcgcctgggctgctggttccgggtcacctcgccggcggtggtatacgggatgctcgccggcatcggcatcctcatcgtcctttcgcaattgcacgtgatgctcgacctggcgcccaaggcgtccggcctcgacaacctgctggcattcccccaggcggcgttcgccgcgctcggttcgctgggcatggacagcggcctcgacgcggcgctgctcgggctgggcaccatcgcggtgatgtggggctgggacaagctgcgtccgcaacgcctgcgcttcctacccggcgcgctgctcggcgtgagcctggcgaccctggccagcctctggctggcgctggacgtgcggcgggtcgaggtaccggccaacctcggcgaggccatcgactggctacgcccggccgacctgctggccctggccgatccctccctgctgctggcggcggtggtggtggccttcatcgccagtgcggagaccctgctctcggcggcggcggtggatcgcctgcacgacggcccgcgctcggacatggatcgtgagttgtccgcccagggggtcggcaacatgctctgcggcctgctcggcgcgctgccgatgaccggggtgatcgtacgcagctcggccaacgtcaatgccggtgcgcgaacccgtgcctcggcgatcttccacggcctctggttgctcgccttcgtcctcctgctcggcagcctgctgcggcagattccggtggcgagcctggccggggtgctggtctataccggggtcaagctggtcgatttcaaggccctcggcaacctctctcgctacggccggatgccgatgctggtgtacgcggccaccgccctggccatcgtcttcaccgacctgctgaccggcgtgctggtgggcttcgccctgaccctgctgaagctggtgctgaaggcggcgcggctgaagatcgccctgcgctacaccggcgagcatgaagccgagctgcgcctgagcggcgccgcgactttcctcaaggtgccggcgctgtcgcgggtgctcgacgaggtcaagccggggaccaccctgcacgtaccgatggataacctcagctatgtcgaccatgcctgcatggagctgctcgaggactgggggcggatggcaccggtgcagggctcgcgcctggtgatcgaaccgcgcgccttgaagcgtcgcctggaagggcgcctgcgcggcagcgtcgggttgggcggcgcgcgcaatggcggggcggtcagcccaggctga

SEQ ID NO: 348047 - DNA, 729 bp, Pseudomonas aeruginosa; identical to SEQ ID NO: 319568

SEQ ID NO: 348048 - DNA, 1233 bp, Pseudomonas aeruginosa
atgaatgtcgccgctgtcatcgaccagcacgtcgaggaggccggctttctggcggggctgcgcgaccatgccgtgcgtgctccccactacgacctggcgcacctgctggatctcgacaatcggattgaggcgcatctggatgcgttgcagataggtggactgaggagcctggacctggtgctgaaggcgctggacacaaacgccgagggagaggttttcgtcgctgcgatactggtgtttcgtggcacgaacggtacagccctggcccagttgtgcgagcacctacggcgttttcccgagggcgcgcgattcttcgccgcagccctcggctggctcgactgggaccaggcgcggccctgggtggagcgcctgctggcctcgcccgagccgctgttccgcgccattggcttggccgcctgcggcatgcaccggcatgacccggggccggcgctgctgtccgcccttggccacgccgacccggcggtgctggcgcgcgccgcgcgcaccgccggcgagctgcgtcggcgcgacctgatggcgaatattcgtgcctatcgcgcccacgatgacccgagcctgcgcttctgggccaactgggccaccgcgcagatgggcgacgaggaggcgttggggccattgcgtgcgttcgccgggcagcccggcccgttccagctgccggcgaccatggtgctgctcgcctggcagccgcgcgacaccagcatggcctggattcgccaactgatgcaggcggcggacacgcggcggatcggcatccaggccaccggcctgttcggcgatccggtggcggtgccctggctgatccagcagatgcgcgacgagagtctggcgcgggtcgccggcgaggccttcagcctgatcaccggcgccgacctggcgctgctcgacctggagctggaggccttgcccgactacgaccctggccccaacgacgatcccgacgacgaagacgtcgccctcgacgacgatgagaaccttagctggccggaggcggagcgagtctccgcctggtggcgtgacaacggcgcgcgcttcgtcgccgggcgcgcctacctgctcggcgaacctctgggcgaggcgcgctgccgccaggtcctgcgcgacggccagcaacgccagcgaatggctgcggcgtgcctgctggcgcgcttcgtgccgaacctgccgctgttccccaccggtgcgccggtgcgccgccaactggacctgttctga

SEQ ID NO: 348049 - DNA, 915 bp, Pseudomonas aeruginosa
atggcaaagagcgagaccgccctctatttcaccaacgtcattgcgatcgggcctcaagaggcgctgctcgccgggcacctctacctggagggcgcggaacccagcgtgacccgggtgatgatgatcgaccaggacgactggttccacgtctacgatatccccgaagtcgtctacagcgccctgcagaggagtccgcggcgcgggcagcagaaaggtgactactgcttcctgggacgcgccggcctgttgcgtgaacacccgtccgggcagtccagcacggatgccacgctggacatcgacaacgtctacctgatggatctctgcgaggtggacggtgagctctatgcctgcggcacccagaaccaggtgctgcggcagaacaagggcgtttggcagcgtatcgaccaggggctttatgtccccctgggggacgaggttaccgcttgcctgaacggtatagacgggttttcgcgcgacgatgtgtatgccgtcggcgatgccggcgccatctggcattgggacggcaagggctggcaggcatcggcggcgcccaccaacctgccgctctactgcgtgcactgcgccgccgatggcactgtctacataggcggttccggcggcatcctgctacgcggcagcgcacaggtcggctggaccgatatcggcgaccgcgacctgtgctcggaagtactggagaatatggtggagttcgccggcaagctctatgtgaccgcgaccgaccagttgctcgagtacgacggtacgcgcctgagtgagaccaaggtgccagtgcagggtaagaaggcttactacgccatcgatgccaaacccgaggtgatgtgggtggtgggcgatgaatgcgtgctcagctacgacggcggcacctggcagcgtcatgtctgcccggagaactga

SEQ ID NO: 348050 - DNA, 948 bp, Pseudomonas aeruginosa
atggccaaccaggtctatgccaacggccgcgagctctcctgcaagtcggcctcggggaaatcgatagcgtcgttccccgacgtctgcttcacgccgcctcaggcaccaccgacgccgttgggcgtgccggtcccctaccctaataccggcatgtcgaaggacaccacccgaggtagccggaccgtaaggatcacccgcaaggaagtgatgctcaagaacaagagccacttcaagaagagctacggcgacgaggctgggcgtgcgccgaagaaaggcatcatcaccagtaccaataccggcaaggtctatttcacttcatggtcgatggacgtgaagatcgaaggcctgaacgtcgtccgccatctcgacctgaccacccacaaccacaacccctctcccggcaataccgcgacctggccgcacacctcgaagatgaaggcggccttcaagccgggcggcaagtgtgccggcatggagcacctgcgcctgcagccctacagcaaggcgtgccctagcacggcgggcgggggcgcacagaccggccaccacctgattcctggtcgctgtatgcgcggcaaggccggctacagccactccaaggccccggtgatctgtgtgtcgcgcggcaaccagcaccagggctcgcacaagcgttgtcacgcgaagttcgatccggtcgaactggaccacttcgacaaaggcaagccgttcaagtacgaaaccgcgcgcaacaccgcggctgcttcggcagggggagcgttgagcccgccgcgcgagctgacgaaaaaagaaaaggagtgcgtcgccttccagctcgaccagtactacaaggccaagcccaagaaggggccgggctgcaccaccgccacgaacctccgcgcctcgggcgcggcgggaaaagtcataccacccgcgcgttccgcgccggcacctgcgggacgtccatag

SEQ ID NO: 348051 - DNA, 1038 bp, Pseudomonas aeruginosa
atgagccaggtcctgagcatcgtcgcctccggcatggtcagcgcggtcggcctcagcgcgccggccagctgcgcggcgatccgctgcgccctggacaacttccaggagacgcgtttcatcgaccagggcggcgaatggttggtcggcgctccggtgatgctgcccgagccgtcctccggctacgcgcaattggtggggatggctgccatggccatcgccgaatgtgtggccgggttgcccgccgaggacattcgcgaaatgccgttgctgcttggcgttgccgaagtcgaccggcccggacgactggcggggttggagcagcctttgctacaggccatcgaagagcgcctgggttaccgcttccatgaacgttcctgcgtcatcccgcgcggtcgggtgagcgccgcggtggcgctcctcaacgcgcgcaagctcatcgaacaggggtgttcgaaggtgctgatcgccggagtcgattcctacctgaccgcggcgacgctggcggcctaccaggaacgcgaccggctgctgggcagccactgccaggatggcttcatccccggcgaaggcgcggcggcggtactggtgacggccgcgtgcgccagcgaggaaccgcaattgctgtgcctggggctggggttcggggtggagaaggctaccgtcgaaagcgagggcctgccgctgcgggcggacggcctcacccaggcggtgaaagcggcgttcgcggactgcgggttcggttacgaacttgtcgactatcgcctggcagacctccccggcgaccagtattacttcaaggaggccgcgctggccttgagtcgaaccctgcgggtgcgcaaggagcgcgtcgaactctggagccctgcggattgcatcggcgagtgcggagcgatgacaggccccgcgctgctgtgcatcgcccttgccgcctcacgcaaggggtatgcacacggcccgcaggtactctgtcattcgggcaacgatgctggcgaacgggccgcggtggtgcttggctaccagcgagtgagggcgaactag

SEQ ID NO: 348052 - DNA, 1113 bp, Pseudomonas aeruginosa
atggaactgttgaacgccaccccgctggccgccgcctacaaccaggggctcgacgccgaaggccgggagtcgctggtggtgatcgccaagggcagtttcgacctgccgctggacggtcgcgaggcgcgcctgctggacgagcagcagacgctgctgatggtcgatgaattctatggcgagccggggttttccgcgccgcgccgggagtgcgagttcgttcccttcaagccgttctgcgatgtgctggtgctgggcagcgcccaggcgcccggcgggcggccggtacagcagttgaccgcgggcatccgcgtcggccgggtgagcaaggcgctgacggtgcatgggccgcgccagtgggaaccgggattgctcggtgccggcgcgggcgtcgcgcagccgttccagagccaggacatttcctacgccagtgccttcggcggcagccatgcctcgccggacaaccccggtttcatggattgctacatggccaatccggccggatgtggctggtttccgcgcagcgccgacaccgccgagatcgtcggcacgccgatgccggccacggaaaagctcggcgagccggtggacagcccccacggccgcttcacgccgatggcgctcggcccgctcggccgccactggcaggcccgggtcggcttcgccggccgctacgacgacgcctggttggccgagcgcttcccgttcctgcccgccgacttcgacgagcgctacttccagtccgcgccggccgaccagtggaccgaccatctgcgcggcggcgaggaggtcctgctgctcaacctcaccggcgaggagcgcgcggccttccgcgtgccgcgcagggaggtcccggtgaccttcttcctgaaaaagggtggccacgaaaccgcgcaggcacggatcgataccctgctggtggactgcgacgcccgtcgcgtggaagtcacctggcgcattcgccggccgttgaagcgcaacctgttcgagatcgcccaggtgctggtcggcagcaagtccgccgcctggtggcgcgcccgcgagctgggcaaggactactacccctcgcttgccgcactggtacgcagccgccaggccgaggaggacgaggcatga

SEQ ID NO: 348053 - DNA, 450 bp, Pseudomonas aeruginosa
atgagtgtcgagatccatctacccggggccacgacggcccttcccgcgcgcctggacggcgtggtcatcggcgtcctcctcgacgtgccggacgccgccgctccggtggtcgcctatcccggttgcccgagcgagcacggcctggcggcggccaccaccacccagctcagtcgcgccgacatcggcgcccaggtagcgctgatgttcgtcgccggcgatccgcgccagccgctgctgatcggccgcatccagcgcctgccgcaggaagcgctggcgcaactggacggcgagcgcctggagttcagtgccgaacgcgagatagtcctgcgttgtggcaaggccagcatcaccctgacccgcgccggcaaggtgatcatccgtggcgcctatctttccagccgctccaccggggtcaaccggatcaagggcggttcggtgcagatcaactga

SEQ ID NO: 348054 - DNA, 2226 bp, Pseudomonas aeruginosa
atggcacttgcgcaacagacccgcctggtccgggtcgacagtccgctcggcgcggaggtcctgcaattgcagcgaatggagggtcgcgaagagctcggccggccgttcgcctacgagctggaactgatctcggaaaaccccgacctgccactcgacgggctgctgggcaagccggccagcctggcgctggaactgcacgacggcagccggcggcatttccacggcatcgtcgccgcttgcagccagggatccggcaacggccagttcgccagctaccaggtcaccctgcgcccctggctgtggctgctgacgcgcacctccgactgccgcatcttccagaaccagaaggtcccggacatcatcaagcaggtgttccgcgacctcggcttctccgacttcgaggacgccctgagccgctcctaccgcgagtgggaatactgcgtgcagtaccgcgagaccagtttcgacttcgtcagccggctgatggagcaggaaggcatctactactggttccgccacgagcagagccgccacatcctggtgctctccgacgcctacggcgcgcaccagagcccgccgaactacgccagcgtgccctactacccgccgaccctggaacagcgcgagcgcgaccatttctacgactggcacatggcgcgcgaggtgcagtccggctcactgagcctcaacgactacgacttccagcgtcccggcgcgcgcctggaggtgcgttcgaacatcgcccgctcgcacgcggcggccgactacccgctgtacgactaccccggcgaatacgtgcagagccaggacggcgagcagtacgcgcggacccgtatcgaagccttgcaggcgcgctacgaacgggtgcgcctgcgcggccgcgcccgcggcctgggttcgggccacctgttcaagctcagcggctacccgcgcgaggaccagaaccgcgagtacctggtggtcggcgccgagtaccgggtggtccaggaactctacgagaccggcggcggcggggtcggcgcgcagttcgaaagcgagctggactgcatcgatgccggccaggcctaccgccccttgccgaccactccgctgccgatcgtccgtggcccgcagactgcggtggtggtcgggcccaagggcgaggagatctggaccgaccagtatggccgggtcaaggtgcatttccactgggaccgccacgaccagtccaacgagaacagctcctgctggatgcgcgtctcgcaggcctgggcggggaagaactggggctcgatccagatcccgcggatcggccaggaagtgatcgtcagcttcctcgaaggcgacccggaccggccgatcatcaccgggcgggtctacaacgccgagcagacggtgccctacgagctgccggcgaacgctacccagagcggcaccaagagccgttcgagcaagggcggcacgccggccaacttcaacgagatccgcatggaggacaagaagggcgccgagcagttgttcatccatgccgagaggaaccaggacatcgaggtcgagaacgacgagacccactgggtcggccacgaccggaccaagaccatcgaccacgacgagaccgtgcacgtgaagcacgatcgcaccgagaccgtggacaacaacgagaccataaccatcggcgtcgaccgcaccgagaaggtcggcaacaacgagaagatcagtatcggcgcgaaccgcaccgaggacgtcggcagcaacgagaccatcagcatcggcgttgaccgcaccgagaaggtcggcagcaacgagaagatcagcatcggtgccaatcgcaccgaggacgtcggcaacgacgagaccatcagcatcggcgcgaaccgtagcgagtcggtgggcaacaacgagacgatcagcatcggcgccgaccgcagcgagtcggtgggcgccaacgagaccatcgacataggcggcaaccagagcaccagcatcggcaagaacgagtcgcgcagcgtcggccagggccgcgatacctcggtgggcaaggacgatagcctggacgtgggcaagagcttcacgctcaacgccggcgactcgatcaccctggtcaccggtgccgccagcatccgcatgaagaaggacggcagcatcgtcatcagcggcaagaacatcaccatcgacggatccggggcgatcaacgtcaaggccgacaagaacgtggtggtgaagggacgcaagatcctccagaactga

SEQ ID NO: 348055 - DNA, 435 bp, Pseudomonas aeruginosa
gtgacgctctatcgcctccacgaagccgatctcgagattcccgatgcctggcaggaccagagcatcaacatcttcaagctccccgccagcggccccgcccgcgaagccagtttcgtcatcagccgcgacgccagccagggcgacgcgccgttcgccgactatgtcgcccgccaactggaaaacgccgagaagcaattgcccggcttcaagctgcacaagcgctgggacatcaacattcacggccacgccgccgtgctcctcgactaccagtggcagcgcgagggccgcgacctgatgctgcgccaggtattcatcgagcgccgcccggcggtgctgatcaccaccctgaccaccaccccggctgacctgccgcaccacgagccggcctggaagcaggcgatgcagaccctggtcccgcgcccgacccctagctga

SEQ ID NO: 348056 - DNA, 1293 bp, Pseudomonas aeruginosa; identical to SEQ ID NO: 323656

SEQ ID NO: 348057 - DNA, 285 bp, Pseudomonas aeruginosa
atgacacccatcgaatacatcgaccgcgctctggcgctggtcgtcgaccggctggcccgctatccgggatacgaggtcctgctgtccgcggaaaagcaattgcagtacatcaggtccgtcctgctcgaccgcagcctggatcgttccgcactgcaccggttgaccctcggcagcatcgccgtgaaggaattcgacgaaaccgacccggaactctccagggccctcaaggacgcctactacgtcggtatacgcactggccgcggcctgaaagtcgatctgccctga

SEQ ID NO: 348058 - DNA, 1941 bp, Pseudomonas aeruginosa
atgggattgatgcaactgacccgcctggtccaggtggattgcccgctggggccggacgtgctgctgttgcagcgcatggagggacgcgaggaactgggacggctgttcgcctacgagctgcacctggtatcggaaaatcccaacctgccgctggagcagttgctcggcaagccgatgagcctgtcgctggagctgcccggcggcagccggcgcttctttcacggcatcgtcgcgcgctgtagccaggtggccgggcacggccagttcgccggctaccaggccaccctgcggccctggccgtggctgctgacgcgcacctcggactgccgcatcttccagaaccagagcgtgccggagatcatcaagcaggtgttccgcgacctcggcttttccgatttcgaggatgccctcacgcgcccctaccgcgagtgggaatactgcgtgcagtaccgcgagaccagcttcgacttcatcagccggctgatggaacaggagggcatctactactggttccgccatgagcagaagcgccacatcctggtgctctccgacgcctacggcgcgcatcgcagcccgggtggctacgccagcgtgccgtactacccgccgaccctcggccatcgcgagcgcgaccacttcttcgactggcagatggcacgcgaggtccagcccggttcgctgaccctcaacgactacgacttccagcgccccggcgcgcgcctggaggtgcgttcgaacatcgcccggccgcacgcggcggccgactacccgctgtacgactatcccggcgaatacgtgcagagccaggacggcgagcagtacgcgcgcaaccgcatcgaggcgatccaggcgcagcacgagcgcgtgcgcctgcgcggcgtggtgcgcgggatcggcgccgggcacctgttccgcctgagcggctatccgcgcgatgaccagaaccgcgagtacctggtggtcggcgccgaataccgggtggtccaggaactctacgaaaccggcagcggcggcgccggctcgcagttcgagagcgagctggactgcatcgacgccagccagtcgttccgtctcctgccgcagactccggtaccggtggtgcggggtccgcagaccgcggtggtggtcggacccaagggcgaggagatctggaccgaccagtacggccgggtcaaggtgcacttccactgggatcgccacgaccagtcgaacgagaacagctcctgctggattcgcgtgtcccaggcctgggccgggaagaactggggttcgatgcagatcccgcggatcggccaggaagtgatcgtcagcttcctcgaaggcgacccggaccggccgatcatcaccgggcgggtctacaacgccgagcagacggtgccctacgagctgccggcgaacgctacccagagcggcaccaagagccgttcgagcaagggcggcacgccggccaacttcaacgagatccgcatggaggacaagaagggcgccgagcagttatacatccacgccgagcgcaaccaggacaacctggtcgagaacgatgcctcgctgtcggtcggccacgaccgcaacaagagcatcggccacgacgagctggcgcgcatcggcaacaaccgcacccgcgcggtgaagctcaacgacaccctgctggtgggcggggcgaagagcgacagcgtcaccggcacctacctgatcgaggccggcgcgcagatccgcctggtctgcggcaagagcgtggtggagttcaacgccgacggcaccatcaatatctccggcagcgccttcaacctctacgccagcggcaacggcaacatcgacaccggcggccgcctcgacctcaattccggcggcgccagcgaggtcgacgccaagggcaagggcgtgcagggcaccatcgacggccaggtacaggcgatgtttccgccgccggcgaagggctga

SEQ ID NO: 348059 - DNA, 357 bp, Pseudomonas aeruginosa
atggatcagaaattgctggacgacattatctcgacatctattggtggggccgccggtggggcagtagctggattggtcctctacggcgttcaaggtttccatgcctggcttaaggatttcctgcatgggagacgggtgtattcctggctaaagtcggagtcttctagagagggagcgcctgactacaggtctaccaaagcgatcgcaagccacgccaacttgacgttggatagggttcgatacctatgtagtcgcgataagagaatccacatgtccaccggtgagagggacgacctctggacgctcaatgaacagaagaaagagccgcagtatcagatgcatgtccttgaccgctga

SEQ ID NO: 348060 - DNA, 735 bp, Pseudomonas aeruginosa
atgaaaaatttcgaacgagataactcaattgatctaataaagtggatcgcactgatcaccatgatcattgatcactcctggtacattctgacgcctgacttacaagagccatttcgctggatgcgaaccattggacgcctcgcatttccgctcttctgcctcgcaatcgctgctaatgtttatcggcagccgataggatactcaggcggattgaaatatctcagcggtattattctatttgcacttattagccagcaaccatattcgagatttttcgagagcaattatttaaatatcctcttcaccttgggcttgggacttgtaatcgctcaagcggtacatcatcggacaccatcattgatcactgccggggtcgtagccctagctatcgccacctcttatcgacccatcttgagctacggccttgctggcgtgctgctgccagccgcactgctggccgctctccagacccgcgtcattgacaccaggatcattacttggtcgcttgcagctctgatcgcggttctcgcgaacacgggtgccggaatcctgctgctgcccgatctgccagccagggcgctggccagcatctgtgccgctgccctggcaccgctgctcggtctggcgctactgcaagtccgcgtgcagtcgatcaggccggtcggcacgtggatgtacccgctttatccgattcatatgctgctgctcagctccctgtcgctcgcctggatctga

SEQ ID NO: 348061 - DNA, 516 bp, Pseudomonas aeruginosa
atggatcgattgaaagcggctctggcagccgcggtgatcttgctgaccaccgcccaggccgaggcggcaggcaacaggctaaagcaaatgcctcatcccctcccgttactagaattcaacctgatgtgtgtggtgaaagcattcgagctgaactatggagcgtatcagcgtcagctccaggatctacatgtggcgtgcatgactgatagagctttcatcaactggcgatcgagcctggagcgcgtaggaatcctggagcagctgaaaagccccaaggcagcactggtgctatctgtaaacaccggccctggtcgggtcacccaggaaggcgtcaaaaccgtgggcaacttgaaccgctataccgcgacggtaagaactccggtggcaatcgtttttaacgggaatattgatcgagcaccccaaggatacgtggagacagatgtcatccgcgtacagcagaaggacagaatctctgggtacgcaatccatgcgatccgcttgagcatcaagaactga

SEQ ID NO: 348062 - DNA, 1389 bp, Pseudomonas aeruginosa
atgaggtttaaaaatggcgcagactctgcagacgacagaagccaatttaatgttggtcatattcgcgctggcgacataatcttcttcgactctaactcccctcgcttctggtctcgcttgaagaggaacgtcaatgttattggccaacgactccttgcagcgacccgtcactccaagcatagaatttcaatctttgaccgaattcctaagtattctcatgtaatcctagggctcgatggcggaattgttattcacgccgatggaaaatccgttgagatcgaagtcataacggatgcattacatattgccaccgcagaacaagcccactatacaatctacagacataagggcattagcgatgtaacgcgccagaagatttctcttgaggcaattcgatactacagccagaaatactcattctctcctttctttcaaaaatcttcaacattatccaaaaagtctactagcagcaatgaggatacgacccagttctgttcacgtttggttgcatacgtctatcgcgtcgccggtgtcgaattgagtaatttaccggatcacaaggtgttaccagttgatctatttaaagtttgcagcttgccgccctgggaagacattactcaagattttatggatgataatacatcaagcgatttagatgagcgtcttggctccatcacaatgccgaatggagaagaggtgactctatcgacgtttatgaggtcagcaaatgccttactcaaagacaacgccatattcaatgctgaacttcaaaaaatagcatataaatcactgaaagaccttcttataaacgagtctctgctagcgaaattttgtagcgctcaactggacatggccaaacttgtcagcattaagcctgatgaaattcatggggatgtgacagatttgatttgcaaaaccttagaacagatcgaggatttgttactactagcaacaacattagacctaaagctcattactccggacatcctcagcaacttttacccggatgacaggggtcgtggcgcgtatgttaacttcccatcaacagctactatgcgtgaattgcaattaaatcgagaggtaattcgaatatacgctggcttgctatttgctcaagctggaatatttgtaattttggctcactacgtacccaatgaaaagtacagaatattcgaagcagtcaacagagaaacggctgacagattcttaacctccgttttgcaaataagagtcgacctatcgacctacgataattttcaagagctgtttgtttggattgaggatgacaccgatcgatctacgagccagaaaatatttaataacatcgtcactggacttcgattgatagattttctgcgctctgcgaacggtatagacagcaaccagtag

SEQ ID NO: 348063 - DNA, 417 bp, Pseudomonas aeruginosa
atgtcttactacccgggagccgcgttcgccggtctggtcggcaatgcctacccgcaagcctggaaagcatggccatcgaaagcgcccagcggatcgcagtggtttgcgattcatctggacgcgatcggcatcttctgggaagtcgactatgtgaagtgggcgaaacgatgcgctttcgtcgcgactacagatcatcgcttttactggccggacggaaagtcggggttggccgggaaggtgcttcgtcccttgttcctggactggatgctgagaggggcgcttgctggcgagttcgggccggactacctgtccgagcttgctgcagatcctgtgctactgcaggagtacgacgagcaccttgaggtgatggccgcgctgttagctaggtacgagatcgaggagaggctgcaatgctga

SEQ ID NO: 348064 - DNA, 1512 bp, Pseudomonas aeruginosa
atgtttaatcgcgtaagtgctgagaagcttcagtcccgtcttgacgcagacttctacaaaaaagaattcattgcaaatgatgagcttctgaaggcgtcaggtgccgttcgtttaaatagcttgatcgatgttacaaagtcaaattatggcgtgctgccaaagtctgaagaatatgtcacctctggcgtgccgctcattcgcggaggagatctgagttttggcaaagtaaatccacctgaggtacatgcgccaacttcctatgcgggggggaaggggactgcagaggagggcgacatccttgttttgattaagggggcatgtattgatgggccagagggtgtggctcgggtaggtgagagcgaaaagggctttattttcaatgggagttgttatcgtctagcgttcaaggatcgtgatgtggatggctatttttttatagcctattcacaggctcgtcagtttttgatgcaaaaaaaacgtcaggttgccaatacaggtatctcttataatgatgaggactcgatactcgggtactgggtaccaaatcttcatcagataacaaggagatatattggcgacaaagttcgtcaagctgagcgtctgcgggaaggcggaaaattagttcactccagagtcctcgataaatttgagtccttacttgggtgttacgacaagcaaagtaaatcgttcgagagagttagccctgacctcttggaagacaggctcgatcagaatcactacaaaacttcgttgctaagctgctttaagctattgcagtcgaagaaacatgtttcgcttgctgacaaaaagtactttacaggtttgacggatggagatcacgggaacccaaagtatggcatggggccaatttacctccgagcttctgaaatgaaggaagggctgatttctattgattcagttgcaagagttgatcctgagtatgcaaagggtgtttcgataagctgttgggccaaggcagatgacattattttctcggttgttgggactcttggtttgacagcaatcgttgattcgagaacgtctggcttaatgtcgcgaggcgtggcaaaagtctttagtaatatacttccgggttactacgtaaaggcttttttcaaaactcactattttcaggcgcaattggagcggcattcggtaggatctgtgcagaggggagtttatctgtcggcactagagaaaataattgtcccaatatttgaccaatctattctcgatgagattgctgaaggcgagagattggcagatgacatggttaaatccgcaacgcagctgaccaatgccgcaaaacttctcgtcgaggccctcatcgaaggccagctcaccgaggctgaactgctcactgcggaaaaggcactgcaagcgggcaacgaccgactggatcgcgttattctgagccgattgaatactgatggtatcgatggccaaggtccggcgctatttggcgatctggacgagctttaccagttgctctcacttgctgagggggagtga

SEQ ID NO: 348065 - DNA, 240 bp, Pseudomonas aeruginosa
atgctcgggttcacgacgaaagccgaagctcgacagatcggcgtctcgcaccatgggagctattacggcattccgatgtggctgggggatgtcgatagcgattgcccgctggcgttcgccaagtgggcgccgcttgaacttgtcgtctccctgttctcggtcatcgagggcatcgtcaactcgatgctcgatcaagagccgacgttcaagttcaaggttggtcggaggatcgatcagtga

SEQ ID NO: 348066 - DNA, 999 bp, Pseudomonas aeruginosa
atgggcaaccaccatcacgtcaccctcgcggaacactggcacccgcccgtccgccggcagtcgcaccgggtccaggctcagcagggtggcgtccagcggcagcgaggtgaagacgaccgcgttgtagcgcagcagcagcggaatcaccgggatatcgctggccccagtggtgtcctccagattgctggtgaagcgcagccggacgatgccggtcacgatatcgacgctacccttgatcaccgcgccattgagcttaccgttcgcgtccgccgtggtggtcacgatctgcgcggtatccaggcgaaccgccgtcacctgcaggctcgcagaacgcagcggcgcccccggcgtgcggaaggtcatgctggtgacgctgaagccggcgttggtggtcagacaggccagcagcgtgaccgtcggcgccgcccccgagccataggtattcagcgtcgcggtacggccggcgtagtccaccgagccgacggcgatgccggcgttggtgctgctgttgatgttcttgtagagcacaccggagcggtcgacgtagacctcgccggcccaggtgaacaccagcgagcccggcaggatcggctcggccacaccaggcaacaggtccagggtcaccggagcgacggtctgcgaatcggtctgctcgccgtactcgacgccgcggctctgcgcgcgcacgctcagcgtgccgccgaacccctccagcaacgtggtatcggtggccaccaggcgcagcttcttcataccgaagttgtcgaccgtgtcggtgtagtaggtgtactccttgaacacgtagttgccggccaccttcaggctgaattcgccggtctcgtagttgatcgtcccggcgcgcccggcccagccaccggcggcgtcgtcggtcaccgagttgtccacggtgatctccgattcgaagatcggcagcgccccggtgcccatgtcagcaccgagggtcggtgccgcctggcgacgcttggtgatccacgatag

SEQ ID NO: 348067 - DNA, 492 bp, Pseudomonas aeruginosa
atgagcgctgtaaccgctgcaaaacgctctcgtcgagccaagaagccacagggaatctgtctccatccgcgcgccaaggaaacttggcggcgcttgcccttcgtaggcaaggaccatggtcgctactcaatgtgggatgttcctctgaccggtagcttcctcaccggcctcgaggcaggcaagagtatcgcgcacatctatctgaagtatgtccgggacgtggatgactggatggctagcgaggtgttcaggagcatggtccgtgatctgctcgccaaagcgcctttggatgagcgagaggaaactgtcaaacgcggccagttcacgggattcatgagcgagatattcaactggctcaaggcgtctgcccagtttgccggaagcagtctagaccgggtggaagaccaggccctcgtagatcgggtgaaccattacttggatgcaggcgtagccgatgccatagatgctgagattgagagggcttcgacatga

SEQ ID NO: 348068 - DNA, 207 bp, Pseudomonas aeruginosa; identical to SEQ ID NO: 340430

SEQ ID NO: 348069 - DNA, 1200 bp, Pseudomonas aeruginosa
gtggcaaaactcaagctcaccaagtccgcagtcgatgcggcacaaccccaggcgcaggccgtcgaactccgggacacgctggtgcccggcttcctgtgcaaggttacaccagcgggccgcaaggtgttcatgctccagtaccgcacgaacgctggcgagcggcgcaagcccgccctgggcctgtacggggaactgaccgtcgagcaggcccgctcgctggcccaggaatggctggccgaggtgcgccggggcggcgaccccagcgcggccaaggccgccgcccgttcagcccccacggtcaaggagctgtgtaccaagttcatggaggattactccaagcagcgcaacaagcccagcacccagcgcgggtatcaggccgtcatcgaccgctgcatcgttccgatgctgggccgtttgaaggtccaggacgtgaagcgcccggacgtggccacggcgatgaagaagatggcgcacaagccggccgaggccaaccgtgctttcagcgtgatgcgcaagatgttcaacctggccgaggtgtggggccaccggcctgacggcaccaacccctgccgccacgtcccgatgtaccccaacggcaaggccacccacctcatcagcgacgaggacatgggcaagctgtttcggcgactggagcacatcgaagccgagggtctggagaactacgtcatcccgctggcgatccgccttcaattcgagttcgccggccgccgctccgaaatcgtgacgctccgatgggattgggtggacctggacaaccgccgcgtggtctggccggacagcaagacgggcggcatgtccaagcccatgagcgaggaagcctatcgactgctctcgacggcgccacggcaggaaggcactccctatgtgctgccgtctccaagccatcccggcaagcacctgaccacgggcgagtattacggcggctggagccgcgccctcaaggcggcgggcgccacgcacgtcggcacgcatggcatccgccaccgctccgcgaccgacattgccaactcgggcatcccggtcaaggtcggcatggcgctgacggcgcacaagaccgtggcgatgttcatgcgctacgtccacaccgaggacgatccggtgcgcaaggcggccgagctggtggcgaaccggcgcaagacgatcaccgaggcgcagcggcctgcggaggtggctgcatga

SEQ ID NO: 348070 - DNA, 1137 bp, Pseudomonas aeruginosa
atgaccaagaaggcgcctgcgatggcgggagtcgcacccgccgccgtgcctgccggctacgccggcatccacggcggcatcgtggatctgctcgatgccgcgcgccagacggcagcgcgcagcgtcaatgcgctgatgacggccagctactgggagattggccgccgcatcgtggaggccgagcaacagggcaagcggcgcgcgggttatggcgagcagttgatcgagcggctggcaagcgacctcacccagcagttcggccgtggcttcagccgtcagaacctgcagcagatgcggtcgttttttctgacccggccaattcgccagacagtgtctggcgaatcttccccggagccagtgcggccttggcggctggacgagctggcgcaggtcttcacgctgccgtggtcggcctatgtgcggctgttgtcggtcaaggacgagcatgcgcgccagttctatgaagccgaggccttgcgcggcggctggagcgtgcgccagttggatcggcagatcggcagccagttctacgagcgcacggcgctgtcgaaaaacaaggcggcgatgctggccaagggcgcggtggccaagcccgaagatgccgtcgcgcccggcgatgccatcaaagacccctatgtgctggagttcctcgacctcaaggacgagtattcggagtccgatctggaggccgccttgatccggcggctggaagacttcctgctcgaattgggtgaagggttcaccttcattggacggcagcggcgcttgcgcatcgaccagacctggtatcgggtggacttgctgctgttccatcgcaagttacgctgcctggtcatcatcgacctgaagctggggagtctgacgcatgcggacgtaggccagatgcacatgtactgcaactatgccaaggaacactgggcctatcccgaggagaacccgccggtggggctgattctttgtgccgacaaggggctcgccctggcgcggtatgcgctggagggcttacccaccaaggtcatggcggcgaactaccggatggttctgccggataccgatgtgctgcaaaaggaactggaaagcacgcggctcttgctagagtctcgcggaacgattcgtcccaagacgtggaagcggtag

SEQ ID NO: 348071 - DNA, 789 bp, Pseudomonas aeruginosa
atgacaacaatttttgaactggtcaaagacccctacgagcgcaaggcacgtgttatccctggccttcttgtggccttacccgtgctggtgccgctgttgtgcgtctacggggctcggcaccctgtgcttacaggtgtgatcggcctgctgggcggctgcggcgctatctatgcactcgcgagcgtagcgcgcggacgtggtaaaaaacttgaagagatgctggtctcaaaatggggtggcatgcccacgaccatcgcactacgccaccgcgacaagttccttgatggtgtcagcaagcagcgttatcacacggcgatcactgccaagttgggtatcgccatgccaacggcagaagaagaatcagcaaacccagacaaggcagacgacatctacatcggtgccactaagcggcttcgcgaactcacgcgttccaacaagcagctcttgctgaaagagaacatcgcctatggatttcatcgcaacatgctggcgatgaagcctgtcggtatcctgtcgtgcctcatgggcgtcgtctacggattgttgattgcaaagattttgcaggtagcacctctccaatttgacttggtgcaccttgccgatccagggcttgccgcaggcttgacattgctcatttcgctggcgctacttgccgcatggctactgtatttcgatcaggacgcagtaaggcggatgggattcgtctatgcggaacgtttgtttgaatgtttgccgtcgttgccttcttcctcctcacggaagaaagccgtaaaaccgactacagactga

SEQ ID NO: 348072 - DNA, 279 bp, Pseudomonas aeruginosa
atgagcagccaccacgactacatcctcgaaatcacggcagagcatgatgcgttcaagccgttcccaccggagaacggccagcccttgcgctttgcgctcggcgacgcggtgatctataccaacgagtttggcgcacagttccggtgccgcgtcaccgggttttatcgtcccagcggactttcgggcctgtacgcgcgcggtgcgcgctacctgctggactcgtcatcgccgtggatgccggtgtcggaagccagcctgcgccccgacgacccggcctga

SEQ ID NO: 348073 - DNA, 300 bp, Pseudomonas aeruginosa
atgagcgatcccatgcaacccggaacgcctgcgcctggagcagaagggcctggcatctttctgccgaccctcatctggaccaccgaccgcaagacggtaggcaacgagatgcagcgcctgctgggacggcgcgcacagctcaacgtcctgctgtccgcctccgaagaaacggacgacggcaccacctggtacgcaatggcccaggccacgctgaaccagctggactgcgatatcgaacgtctcttcgagtggctgggcgactacgaacccgacacacccacgcccgaagtgccatcgtaa

SEQ ID NO: 348074 - DNA, 2067 bp, Pseudomonas aeruginosa
atgaacgccgttacttacaccgaagctcaagccctcgacagccgcgcaaacgtgctgcaagccgccgacccgagcaagcacatgattctggttccgctgtcgcggctggtgctgcgccccacgggccgcaacgtgcgcaagaccgtcccgcgcatgtccatccccgagctggccgcgagcattcagcgcgtgggcctgctgcaaaacctgatcgtgattcccgccgccgatgacctgcattacgaggtggtggcaggtggccgacgctttgcggccctcaagctgctggcaaagaagcaccgtatcgccaaggattgggacgtgccttgcctgcaggtggccgatggcacggcccgcaccgccagcctgaccgagaacgtgcagcgcgaagccatgcacccagcagaccagtttgaagccttcgccgcgctggtggccgaaggccgaccgattgaggacattgcggcggatttctccgttacgccgctggtggtgcagcgccgcttgaagctcgccaatgtctcgccgcgtttgatggaggactaccgggccgatgccgtgagcctcgatcagctgatggcgctctccatcaccgacgaccacgccgcgcaggaatgcgcgttctacgatgcgccgcaatggcagcgccaaccctcgcacttgcgcgaacgtctgacggagcgcgagattgacgcctaccggcatccgctggtgcgcttcgtcgggctggacacctacgagcaggcgggcggcggcatccgccgcgacctgttcgcggagggcgatgcaggcgtgtacctgaccgacgccgcgctgctggaacgactggcgcaagacaagctggcgggcatcgccgcagaggtgaaggccgagggctgggcttgggctgatgccacgccgggcgtgacccatgccgatctgcacgccttccagcgtgcgccgagggagcgccgcgagccgaacaagcgcgaagcacagcgcatcgagaggctgcaagccaagatgcaggaggtggccgaagccattgatgccgcgacggacgccgacgacgaggacaaggccgatgcgctgcaagaggaaggcgagcggctgggcgagcagttgcaggcgctggaagacggcttgcaggggtacggcgcgaacgtgaaggccgcagccggggccatcgtcaccatcggccgcaacggcgaggtggtgattcatcgcggactgctgcgcgaggccgaggccaaggcactgcgcacactggagaagctgcgccaagggttcagcgacccagatgccgcgaacgatgacgaaggcgaggacgacgagccgcccaaggcagcagcgatttccgaccgactggcccagcgcctgagcgcccatcgcaccgccgcgctgcaaatcgaggtggcccggcatccgcaggtggcggtggccgcgctggtgcatggcatggtgcagaccgtcttgcagggccgctactacgggcgcgacctgccgctgggcgtgagcctgaaagtccaagaccggctggacggcatggccccggactggcccgagtcacccgccgccgtggcgctgcgtgaattgcagcaggcgtggagcggcaagctgcccgaggacagcgccgaactgtttgccgcgctgctggcgatggagcaaggcgaactggtcaagctgctggccgtgtgcgtggcttccacggtggacgtggtgacgcctcgcgccacaccgcaccagcccggcgaggaactggcgcaggccgtgggcctcgacatggccgcatggtggcagccgaccgccgaggggtatttcaagcacgttccgaaggcggcagttctgcaagccgtgggcgagtacgcgcccgatcaggtttcccggctggcgaagctgaagaaggccgacattgccagcgaagccgagcggctggccgatggcgcgggttggatgcctgccatctttaaggtcgaaggcccgcagcaggcagtgaaggaaagcgcgcaggaggcaggcccggagcaggacgccccggaggatgccgaggcaatggcggatgaacccgccgaggcgctggccgcttga

SEQ ID NO: 348075 - DNA, 588 bp, Pseudomonas aeruginosa
atgaccgcagtttccacttccggcaccgcgccgcaccctcgcttgcgcgtgcgcgctcgcctcgtgctggcgggcctgtccgcctgcggcctcgctgcgctggcctgggcgtccttcgtgcatccgctgccacgcctgacctacaacccgtccgacagcgtggaggtcggctggtatcgcatcgatccgctcgaccatcgcaccagctcgccaccacgtccgttgtcggtaggcagcatcgtgctggtgccgctgcctgccgaggctgccgcgctcgctgcgcagcgcggctacctgccgacgcgcattcctctgctcaagcgcgtgggcgcggtggcgccgcaagaggtgtgcatcgctgacggcaaagtccacatcgacggcgtgccttcagccgccgtgctgtctgccgatcgctggggccggccgctgccatcctggcagcaatgccaccgcttgcggcatggcgagctgttcctcctcagtgtgaccaatccggcgtcgttcgatagccggtatttcgggccggtcagcgcagcttccgtgatcggcgttgcgcgccccgtctggctggagtcgcgcccatga

SEQ ID NO: 348076 - DNA, 480 bp, Pseudomonas aeruginosa
atgcgaatcaagagtgccgataccgtagcgcacaaggaagcggttaacccattcgccgccgagctcttcagcaatatcacgggtagccaacgcaatatcctggtagcggtccgctacgcccagccgaccacagtcgatgaatcccgaaaagcggccattttccaccatgatattcggcagacaggcatcgccatgcgtcacgacgagatcctcgccgtcgggcatgcgcgccttgagcctggcgaacagttcggctggcgcgagcccctggtgcgcttcatccagatcatcctgatcgacaaggccggcttccatccgcatacgcgcccgctcgacgcgatgctttgcccggtggtcgaatgggcaggccgtcggatcaagcgcgtgcagtcggcgcagagcgtcggccatgatggataccttctcggcgggagcaaggtgagacgacaggagatcctgccccggcacttcgcccaatag

SEQ ID NO: 348077 - DNA, 363 bp, Pseudomonas aeruginosa
atgaccgaccatgcgacgcccaacctgccatcacgggatttcgattccaccgccgccttctatgaaaagctgggcttcacgagcatttttcgggactccggctggatgatccttaagcagggggatctcatgctggagttcttcgcccacccagagctcgatcccctcgcgagttggttcagttgctgcctgaggctggacgacctcgctgggttctacgagcggtgcaaatccgtcggcatccaggaatccagcagaggctatccccgcatccacgcccccgaactgcaggagtggggaggcacgatggccgcattggtcgatctggatgggacgctcctgcgtttgatacagaacggatag

SEQ ID NO: 348078 - DNA, 831 bp, Pseudomonas aeruginosa
atgagcgcgccttcccgttttccgccccaggtcactacgtggatggagcgctggcgcctgcagcgcgacggtgcgctgctcacgacccactcgagctgggtgcttgccgtccgccagggggacacgccagcgatgctgaaggtcgcgcgcattccagatgaagaggcgggttatcgcctgttaacctggtgggacgggcagggcgccgcacgggtcttcgcctcggcggcgggcgctctgcttatggagcgcgcgttcggggcgggcgaccttgcacagatggcgtggtccggccaggacgacgaggcctgcaggatcctctgccgcacggctgcgcgcctgcacgctccgcggtccggaccgctgcccgacctccatccgctgcaggaatggttccagccgcttttccggctggccgctgagcacgcggcacttgcgcccgccgccagcgtggcgcgccaactcctggcggcaccgcgcgaggtgtgcccgctccacggtgacctgcaccacgagaacgtgctcgacttcggcgaccgcgggtggctcgccatcgacccgcacgggctgctgggcgagcgcaccttcgactatgccaacatcttcacgaatccagacctcagcgaccccgatcggccgcttgcggtcctgccgggcaggctggaggcccggctccgcattgtggtcgccgagaccgggcttgagcccgaacggcttctgcgctggatcgttgcatggaccggcttgtcggcagcctggttcattgacgatggcgagtgcgcggcgattgatctggtcatcaacgccatggcacgccgcatgctcgattag

SEQ ID NO: 348079 - DNA, 612 bp, Pseudomonas aeruginosa
atgcaccgggccagcattgtggagcgcgtggctgaggggctatggaaggtgccggacgacttggccgagcgtggccgccagtacgacgcgcagcgcctgggtggtgtggccgtggagctgaaatcgcacctgcctatcgagcgacaggctcgcgcggttggggccacctggctcgaccagcagttgatcggcggtggctcgggcctgggcgacctgggctttggcagcgatgcaaggcaagccatgcagcagcgtgccgacttcctggcggaacagggggtggcagagcgtcgcgggcagcgcgtcatccttgcacgcaacctgctgggcacgctgcgcaatcgggagctggcgcagaccgccaaggacattgcggcggaaaccggcctggagcatcgccccgtcacagacggccagcgtgccgcaggcatttaccggcgttccgtcatgctcgccagtgggcgctacgtgatgctcgatgacggcatggggttcagcctggtgccgtggcgggcggtgatcgaacagcgactggggcagcagatcgccgcgacggtgcgcggtggtggagtgtcgtgggagattgggcggcagcgcgggttcggtgcttaa

SEQ ID NO: 348080 - DNA, 795 bp, Pseudomonas aeruginosa
atgcaggatcgaagcctcagccgtactcgaaacgaactgtcggagttcctgacccgccatcggaagaagctgacgccgggcgctgtcggcttgcctgccaccgaacggcgccgcacgcccggcctgcgtagggaagaagtggcggccttggctggcgtgggtctgacttggtacacatggtttgagcaagggcgcgatatccaggtgtcggagaaattcctgttgagcgtggcttatgccctcaagctcgacgatgccgaatgcagccatctgttcctgctggcgcacagacgccctccgccgccagaagcacatcaatgggattcggtgacagcggacatccagcaattgctggacgacttgcccaggccggcctacgtgcagaacctgcgctgggatgtggtgggttggaatgcgtcggctgatgcgttgttcggatttgccgacaagcagcgagaagaccgcaacctgctgcgcatgacatttgccgaccccgacatgcggcgacggcttaccgactggcccaacgacgcgcccaggctgctggcgcagttccgctatgacgttgccattgcaccggaagacccggcgatgctggctttgatcgaggatttgaaagtgctctctcccagctttcgccgtgggtgggaagtgccggacggcgggattgcaatacgcggcattggttcagttgcggacaccaagggtgagcaacgaaattttcgtcatgagacgctgatagtggacgagcataggcatttgagaatggtggtgtactttgcggctcaggcttaa

SEQ ID NO: 348081 - DNA, 1554 bp, Pseudomonas aeruginosa
atgacacatcacgaatctgtccctatcgcagtgcccgaggatcacatatccgagcgtgccggcgcccgtgcttgggcggggcttgccatcttgtccctacccacggtcatgctggggctggatctgtcgttgctgcatctgaccttgccggcactcgcgctcgatttgcagccgaccagcacgcaggcgctctggatcatggacgcctatggcttcctgatcgcgggttttctcatcacgatgggaacgctgggcgaccgcatcggtcgccgcaaattgctgctgatcggcgcggttgcttttgccgtggcctcggtggcggccgcgttctcgaccagcgccaacatgcttatcgcggcgcgggccgccctcggcgtggcaggcgccacgttgatgccttcgacactggcgttgatcagcaatctgttccctcatccccgccagcgcgcccttggtattggcatctgggcaacgatgtggggcatcggctatgccctggggccggtcgtgggcggcctgttgctggaatggttctggtggggcgcggccttcctgatcgcggtgcctgtcgtgatcctgctgctgatcctcgccccgtttctgttgcccgagtatcgcgcgcccaaaagcgaacgtgtagacctgaccagcgtggcgctgtcgctcgccgctatgttgcccttcgtctacggcatcaagcagatcgccaaatccagccttgcgcccgatgctgttgtcgccattctggccggcgttctgtttgcgtggatattcgtcaggcgtcagcgacggctggctgatccgttgctcgatttgagcctgtttgccaaccgggccttctcggtcgcactggtcgtgctgttgttcggcctggtggcggtgggcggcacgatgctgctggtcgcacagtatctgcaactggtggtcggctactcacccgcggtcgcgggtttgtggatgggcctcgcggcgctcgccatgatcgttggcggcaccggcgctccgctcgtggcacgagtgatccgaccggggttcgtggtcgccggttcgctggctctgtccgtgttgggttatctgatgctgacgcaattgagccacggcaccgccggcgtaacactgagcgttgccgctctggcgctggcctatctgggcaacggcaccattgccgcgctgggaacagacctcgtggtcggttctgcaccgcccgagaaggccggatcggcctctgcgatgaccgagatggtgcaagacttggggatttcgctgggcatcgctttgcttggaagcattgctggcgcggtttatcaccaagaggtgctgggccatttgccggatggtctcaagaccactgcgcgcgaagccgtcagcgacagcttgtgggccgcatcttccgtcgcgtcggagttgccggccggtttgatggaacaggcgcaggcggcattcatcgcgggactccaaggcgccgccatcttcaacgcagtaagcgttgctgtgctggccgtgctttccgccgtggcgttgcgtcatgtgggcgcgaatgcccgcaaggtctga

SEQ ID NO: 348082 - DNA, 228 bp, Pseudomonas aeruginosa
atgacgatgcccaacgagcgctcccgagcggtggtgctaacgcgtgacttcctcgtcgctctttctcgagataacgccttgccagagaaggtgcgccacgatgcaaaatttcttctgcgtcattatccaacgcgggatgacgtcatcttggccgggaaaatcgaggagcaagctgagagtatgcccctcgaggctctggggcctgtattcagttcctctcttacatga

SEQ ID NO: 348083 - DNA, 765 bp, Pseudomonas aeruginosa
atgacgatttacaaatcgaatactgacagggtggtagtactggataccgaaaccaccggcatgccggtgaccgatggtcaccggatcatcgagatcggctgtgtcgagctggaggggcgccgcctgaccggtcgccacttccacgtctacctgcaacccgatcgcgaggtcgacgaaggggcgatcgccgtccacggcatcaccaacgaatacctgaaggacaagccgcgcttccgcgaggtcgccaacgatttcttcgaattcatccgcggcgcccagctgatcatccacaacgcggcgttcgatatcggcttcatcaacaacgagttcgccctgctgggccagcaggaccgctcggacgtgaccgagtactgctcggtgctggataccctgctgatggcccgcgagcgccatccgggccagcgcaacaacctcgatgcgttgtgcaagcgctacggcgtggacaactccggccgcgacctgcacggcgcgttgctcgacgccgagatcctcgccgacgtctacctggcgatgaccggcggccagaccagcctgtcgctggccggcagcggcgcggaaggcgacggcagcggccggccgatggtcagcccgatccgtcggctcgatccggcgcgggtcgccaccccggtgctgcgcgccaacgccgaagagctggctgcgcatgcggcgcggctggcggtgatcgagaagtcggcaggtggtccgtcgctctgggcgcaactggaagcgccggtcggcgaatag

SEQ ID NO: 348084 - DNA, 1209 bp, Pseudomonas aeruginosa
atgccctacacaatcaaaaccttcatgacaaggtccggcgagcggttttcccagctttacgacacagagacgccaggcctccctttattctacccgacagcctttgtcgctcgcttcctccgctcagccactcacgagacgcagaaagtctatctggccgtgatcaagcgcatctgcgaatgggaatttaccaaacaggtggacctcgccaactgtttccatagaagtaagtttctcacctgtgcccagattgatgaccttgctaaccatctaagagccagcaagctcggaggaaaaggcgaagtcatcggaagcccgaagtacaacacctatgtcgcctatgcaacagagtatcttcgctggcttgcccaagaggttattacggactggaacacagtaaacgtaagagcatcaatcgaagctcaaagcgatatgctcttaaaaaagaaaatccgaaaaagcggttcaaaatcctcgcaaaaccgtcgtgtagttaccaaaagcctgaccactgcctccagcggcaaattattgagcctgttcgagcaaccattcgaaggcataacgcgcactcaagatctaggatccaggatacggaatatcgtaatgctccgtattctctacgaaactggcatgcgcgtcggcgagctactaggcctcaagctaaaaaactttagcaatgcaactggcgaggatagtgccaccttagagatcacccgcaatcaccatgatgaattcgattcaagactgaaccagccagttgctaaaacactcggccgtacgcttccaatatcggaaagcctcgaggcacaacttgatgaatactgcaacaactggcgagctgaagtcgaaggtgtcggtttctctgacgaagacttcatttttgtaatccatcgagccgggcgaaccctaggccaagcactccctaaaagttctttcgactccggactttctaacctcaaaaaatcctttccggcactaacaccgattcacccgcaccttttacgccacgattggaactatcgattctcaatgaaagtagatgcgatcggcatgtcatttgaagaagaacgacaattaagagagtatttaatgggctgggcccccggctcagccatgtcaaaccgctacaactatcgacatgtgcaagaaaaatcgctcgaagtcggcttatccattgcatctgactcagcgaggggcctacagtga

SEQ ID NO: 348085 - DNA, 1533 bp, Pseudomonas aeruginosa
atgacccatggcctgtcgcgattactctcatcaatcaagacctccttcaaacttcacctaatctccttcagcaaacagggaacttattcagccacctcctgcacgactttcttcatgaacttcagggcagcattgaactccaaccctcctgaagaattcaacgcaggctggatagcgcattccattgccagaccgggattccatggcgcgaaaagagtcgccatcgaatttttcctgcactggaaggagcgttacgattcagccattaagatagacgcattgcacttgctgcaagaaacagctgctcgccctaacggcccacgtaacgtgctctcagacgaccctgagaagagctggctaaccgaggatgaatacgagtccttgttgatgtccacttggaacaactacgacacaggagtctctgacacccaagtaacactaattaaaatcttgtctatgcaatacgcgcgaaggccaaatcaaatcgcgctactaaaagctggcgatataaggggctttgatgaatcaaaagaaatcggactaacgggccgaatcatcgatttcccaggaatcaaagaccaagcagccgagactggctttcgagacagcaaattcgaaccacacccactggcagatcacgtatgggggctttgccaaattcagcgccaagaagtcagagaactttatgagcatactctcggcctctctctcacggacgaccaactaaatctactacctttcttctgcagtgaagaacgcattaaagaagcccgcagcctgattgaaacccacctcaaactagagcttcttgacagcctagactctcctcatttccatcttgaacggcattcaattactgagatattaagatggaagagaaacaccccgtcctgcgcatatggcgcagctaagggtcagtactctaaatgcccgaaggcaccaatcagcccccgcaccagtcgggtaatgattattaatgcgacccgaatgcgtcatacacgagcacgtcaacttgcgcgaaagggcgtaccaaaaaatttgctttcgcactggctgggccacacaacagaaagagcactcgaagcctattataacgacccagcggaacaggcccgtgtcatagacgaggccatgggtccggccttggcaccgctagcaatggcttttgctggagctttgatcgattcagatgagcaggccacaagagccaccgatccgactagcaaactcgagttctcacgccctggagagctacttagcgtcggacgctgtggcaagcacagcttctgcgctacgacctcggttcctataccctgctaccgctgcaagcatttcgaacctctcgtacatgcgccacaccatgaagtactagatgctctgctacagaggcagtctgaggagaatcaagcgttaagaattggcgggcagcgaaatctacttattcccattgatctctctgccgacattcttgcagtaaaaaattgcattacccgctgcaacaaccgaattgtcgaactggggctaactcaatga

SEQ ID NO: 348086 - DNA, 2064 bp, Pseudomonas aeruginosa
atgacccagattatccaatttattccaaagcacgaaatatcagccaatcagaacctagacgacttcatcaattttgctcataacgaattaacgctttggtccgacctgcgcggctttacttggacagctgataggtggcaaacaacgcacacgggcatccgttttataaactttgaaaataaagacctaccacccaagtcccgaagccagccaatccatttgatgcatccatcctttatcgaattcgccaaggcatttctccgatacaaacacaccctgcacccaaccaagggaataagcagagacatcgctgcattacgactgatcgaattttcgttgcgccaaaacatggcaacacccgacatcactaaatttgaccagcggcattgggaaataatcgtctgcactttggagtcaagcactatacggcaatcgctctgcaacatagtgctttccattctaaaatcgttatcagatctcttcataatacaggtcgacccgcgtttttggaggcacccttacctaggtgcgcgcagttacgattacttaaatggttctcaagcacctgctgaagtaaaggctcagaaagctcctgatcaggatgcgctacttgcgattgcagaggtattctcacgtggcgcctatgaagtgcagattgataatgacgttatggtcacttgcattaccgctttactactaagtgcacccatgcgtataggtgagaccctgcgctttcgcattgattgcttgcgagacgatcacgacaaaaacggggagattcaatactatttagtctactgggtcccaaagaccaaagagtttgcacgcaaaccaattccgaaaacactaataaatatcactacagacgcaataaatcggctagtaaaaatcactgacgaaggccgctccttggcccgttacatggaaaccaacccatcgagattctaccgccacgccaattgccctaatgttcaagacaacgagccactctcggtaaagcaagtaatgcaggctctaggttttaccgatcgaacctgctgccaatcccttatccatagactaaccggtagttggtcattgtccggatttactctagactcgctttggaaacttatactaatagagcacaaagccaccaacccatatttcccctaccaggagccacaccagggatctaccaatcctccattgaaaatgtctgagtcactgctatgccttcgtcgcaaccaattgcgcttgcggagcactgcaagtcccgttctgttagcgccatttgatcctagtttttatgggaagcgcctggacactggaaacgccgcggccgagtccattaactttttcgcctatcacggatacaaggcatttaagttaaagtcacacagcattcgccacctaattaatagactcgctcgcagcagcggcatttcattggatctgatcacggagtggagcagtcgcgccaccagtcggcagacgcgcacatatttgaatgatgacccgctcacgttcgtcgccaaaggagcagacatactaggtacggtccagaaaaatgagccacttcaaccggttactgaagaacatgcagaaaaatatggccatggtccattccatcgcagccgctacggtatttgtcgtcgtagctggcgagctggcccttgcaacaaattcgcagactgtcttaattgctctgagctattgatgtgtaaaggagataggctggccactgatacgattcaacatgatctagatagccttagacagacgtacgatgccgcacagcaggcgatatcagatggagaaaggtcggcgtcgcgctggacgcttgttacggccgcacaaattaagcaaatcactaatttgctttcaattttgaatgatatatcgatcccggatgggagtcccatcgaaatagagggcagggacttcagccatgaacagacaattgtttccgaaaaagccgaagcagccgcgatcaggctgcctgacaaacaaatgcttggaataacttatggcgatgaccttctagcttgcctagaacttctccggagcaccgacaatgcctaa

SEQ ID NO: 348087 - DNA, 1953 bp, Pseudomonas aeruginosa
atgatccgaaggttccggcttgagcaaaaaggccgctacgagaagctggtaatagctcaacgtttgtcggacatggtggacaactacctggatgggcgccctgcaccgttgctgatcggtgccgaacaaggtggtatcggcgaatgggatgacgtggtcatctaccatgcggatgagcattatgagcacttccagatcaagcggcagacgacccccttcagcgataagcacatcgataaagccgactacataaagtcctataaacccaaggccggcaacaaggcagcagcaagtgcaacgccagttgtcccgtccgatagcgccatcgactctgagctcgataaggccatgaagagcttgtctgcctggagtctcacaccccagtccaagcagccgccagtccgcgctttttcactcatcctgctcggcctggaagttgtcatcaagggcaagccaagtgactccatcaccgccaatcacctgcacgagttttgtcgactctgcaagcaggacggtcttgatctggctgccctatctagccgccccgataccccaacgcaaaacgtctataaatggttgacgacctggtgtggctttaccgactgggatcatgttcgacaaaccatgcggacacttacgatccatgccgtagggagcgaagagaaccttgaagagcgtgcgtgcgagtcgttaggacggcactttaatgattcgcgggcaacccttgagaagctagtggggtacatttctacaagtaccacggatgttaacgccatcagctgtcatgcgatggctaaccatctcaaagacgcacgccggtcagatgctgtgacttggacgcaatacctcatgaggccgcaggctggatccagttggatggtcgccggtacccacagcttgaatggtacgacgagcttgccagcggcccatgctgccacggaagttgtcggtcaccactggacagcgggcggtaacaacagaaggctgcggttgcacgctacctattgcccgcctacgccaaataccgtggccctccactcggccatccttcggctggccctgcacttgaagagcgggagccattgcctgcttctgggtgagccgctttggcgccaaggcgctgggaacgagttgggtagaacgcttgggatcagcgagagtgatcttgatgagcttccttggatagacaattcagaggcgctgtcctgcgcgtcgggtcgcgaaatctcgtcgatcctggaggcgcgagatgaatcttcagcacttcaccgggcaatgaacaatcttgtgtgggagcagctacaagcccgcatcacggccaggttgaactcggtatccgacatgccattactggcagcattggaaccgaagtggcgctcttgggccgctgagctaacagccgacgccgctgcgcgtgagtcactgttagaacaactcatgtaccccaaaacagaaggcttagacgggaaacacgcgctgcgcgtcgggcctcgtactgcagacctgctggaaaccgccattctgatgctgcttctggtttgcgtcgcaatcggtaacgacgatggcaattggcgcgaaatccctgacgttggggatgttctcagcattgcattgcagaactggtcaggcgcttcaggcgatcacagtggcgccaggcctgttgccgatgacctgatggccattttggggccttcgccagcgtcggtagtcattctcgcgggagtcgaagggtctcccacgagcctactcgagtccggtatggctgatgattttgagaccagtaacagcatggcggctgagcgccagcccagattgctggtgacacgatttggggtgctcaagcacttgcgtaacgggacactcgcccagctaaagcagcaattccaacgtcattgggatgcttggcgcgacgcgcgtgaagcagcaatcgaagcttatagggaaggacactaa

SEQ ID NO: 348088 - DNA, 594 bp, Pseudomonas aeruginosa
atgctgacactgcaggaagtggctggcgcaatcattcagcgtgtagagggtcggtatgacgtgtgtccccgggacgtaacggagctaatgctgcctgaggtcgactacgactcgcatgttcttcgactcaagcgctcccacatcgaacgggcgggctggcggacggttctgctcatcgagcttccactgacggcccttcaggcagccaaccagtgggcagccgatgtccgggatgtgctgcccgaacctgagactgcagacctctatatgtttctgatgatcagcggtatcgccaaggatgacgctgcacggattgagacggatgacagattttgccgcaaggttgttgtgcgcgaatctgaagcagctggtgattttcttaaccggacattcttggcggccttggatcccgctggcgatgtcgagacgctgagcgatccattggtgtcggcgctgaacacgctgtccaatgcatacccttggtctgctccacacatcgctgcttggaaaacgcagtttctgaccaaccaaaacggagcggatgtggtgcgtgttcttaccgactcgctgggtgaaagcgaggttcagtcgtga
